United States Patent Application Publication US 2007/0214517 A1 - sequence listing, part 26

SEQ ID NO: 31113 - DNA, 1228 bp, Arabidopsis thaliana; identical to SEQ ID NO: 27523
  misc_feature (1)..(1228): Ceres Seq. ID no. 12421727
  misc_feature: MA Experiment ID: 108434 Result: Down-regulated in Transcription
  misc_feature: MA Experiment 108434 PARAMETER Experiment Name: At_Root_Tips_cDNA_P Parameter: Tissue Value: Root Tips
  misc_feature: MA Experiment ID: 108461 Result: Down-regulated in Transcription
  misc_feature: MA Experiment 108461 PARAMETER Experiment Name: At_Germinating_Seeds_cDNA_P Parameter: Age (day) Value: 1 vs. 0
  misc_feature: MA Experiment 108461 PARAMETER Experiment Name: At_Germinating_Seeds_cDNA_P Parameter: Tissue Value: Germinating Seeds
  misc_feature: MA Experiment ID: 108463 Result: Up-regulated in Transcription
  misc_feature: MA Experiment 108463 PARAMETER Experiment Name: At_Germinating_Seeds_cDNA_P Parameter: Age (day) Value: 3 vs. 0
  misc_feature: MA Experiment 108463 PARAMETER Experiment Name: At_Germinating_Seeds_cDNA_P Parameter: Tissue Value: Germinating Seeds
  misc_feature: MA Experiment ID: 108561 Result: Up-regulated in Transcription
  misc_feature: MA Experiment 108561 PARAMETER Experiment Name: At_100uM_ABA_cDNA_P Parameter: Timepoint (hr) Value: 6
  misc_feature: MA Experiment 108561 PARAMETER Experiment Name: At_100uM_ABA_cDNA_P Parameter: Tissue Value: Aerial
  misc_feature: MA Experiment 108561 PARAMETER Experiment Name: At_100uM_ABA_cDNA_P Parameter: Treatment Value: 100uM ABA vs. No Treatment
  misc_feature: MA Experiment ID: 108569 Result: Up-regulated in Transcription
  misc_feature: MA Experiment 108569 PARAMETER Experiment Name: At_0.001%_MeJA__cDNA_P Parameter: Timepoint (hr) Value: 6
  misc_feature: MA Experiment 108569 PARAMETER Experiment Name: At_0.001%_MeJA__cDNA_P Parameter: Tissue Value: Aerial
  misc_feature: MA Experiment 108569 PARAMETER Experiment Name: At_0.001%_MeJA__cDNA_P Parameter: Treatment Value: 0.001% MeJA vs. No Treatment
  misc_feature: MA Experiment ID: 108572 Result: Up-regulated in Transcription
  misc_feature: MA Experiment 108572 PARAMETER Experiment Name: At_Drought_cDNA_P Parameter: Timepoint (hr) Value: 1
  misc_feature: MA Experiment 108572 PARAMETER Experiment Name: At_Drought_cDNA_P Parameter: Tissue Value: Aerial
  misc_feature: MA Experiment 108572 PARAMETER Experiment Name: At_Drought_cDNA_P Parameter: Treatment Value: Drought vs. No Drought
  misc_feature: MA Experiment ID: 108573 Result: Up-regulated in Transcription
  misc_feature: MA Experiment 108573 PARAMETER Experiment Name: At_Drought_cDNA_P Parameter: Timepoint (hr) Value: 6
  misc_feature: MA Experiment 108573 PARAMETER Experiment Name: At_Drought_cDNA_P Parameter: Tissue Value: Aerial
  misc_feature: MA Experiment 108573 PARAMETER Experiment Name: At_Drought_cDNA_P Parameter: Treatment Value: Drought vs. No Drought
  misc_feature: MA Experiment ID: 108585 Result: Up-regulated in Transcription
  misc_feature: MA Experiment 108585 PARAMETER Experiment Name: At_5mM_NaNP_cDNA_P Parameter: Timepoint (hr) Value: 6
  misc_feature: MA Experiment 108585 PARAMETER Experiment Name: At_5mM_NaNP_cDNA_P Parameter: Tissue Value: Aerial
  misc_feature: MA Experiment 108585 PARAMETER Experiment Name: At_5mM_NaNP_cDNA_P Parameter: Treatment Value: null
  misc_feature: MA Experiment ID: 108605 Result: Up-regulated in Transcription
  misc_feature: MA Experiment 108605 PARAMETER Experiment Name: At_100uM_ABA_cDNA_P Parameter: Timepoint (hr) Value: 6
  misc_feature: MA Experiment 108605 PARAMETER Experiment Name: At_100uM_ABA_cDNA_P Parameter: Tissue Value: Aerial
  misc_feature: MA Experiment 108605 PARAMETER Experiment Name: At_100uM_ABA_cDNA_P Parameter: Treatment Value: 100uM ABA vs. No Treatment
  misc_feature: MA Experiment ID: 108607 Result: Up-regulated in Transcription
  misc_feature: MA Experiment 108607 PARAMETER Experiment Name: At_100uM_ABA_cDNA_P Parameter: Timepoint (hr) Value: 4
  misc_feature: MA Experiment 108607 PARAMETER Experiment Name: At_100uM_ABA_cDNA_P Parameter: Tissue Value: Aerial
  misc_feature: MA Experiment 108607 PARAMETER Experiment Name: At_100uM_ABA_cDNA_P Parameter: Treatment Value: 100uM ABA vs. No Treatment
  misc_feature: MA Experiment ID: 108609 Result: Up-regulated in Transcription
  misc_feature: MA Experiment 108609 PARAMETER Experiment Name: At_100uM_ABA_cDNA_P Parameter: Timepoint (hr) Value: 24
  misc_feature: MA Experiment 108609 PARAMETER Experiment Name: At_100uM_ABA_cDNA_P Parameter: Tissue Value: Aerial
  misc_feature: MA Experiment 108609 PARAMETER Experiment Name: At_100uM_ABA_cDNA_P Parameter: Treatment Value: 100uM ABA vs. No Treatment
  misc_feature: MA Experiment ID: 108668 Result: Up-regulated in Transcription
  misc_feature: MA Experiment 108668 PARAMETER Experiment Name: At_2mM_SA_cDNA_P Parameter: Plant Line Value: WS
  misc_feature: MA Experiment 108668 PARAMETER Experiment Name: At_2mM_SA_cDNA_P Parameter: Timepoint (hr) Value: 6
  misc_feature: MA Experiment 108668 PARAMETER Experiment Name: At_2mM_SA_cDNA_P Parameter: Treatment Value: 2mM SA vs. No Treatment
  misc_feature: MA Experiment ID: 20000070 Result: Up-regulated in Transcription
  misc_feature: MA Experiment 20000070 PARAMETER Experiment Name: At_100uM_ABA_Mutants_cDNA_P Parameter: Plant Line Value: CS24
  misc_feature: MA Experiment 20000070 PARAMETER Experiment Name: At_100uM_ABA_Mutants_cDNA_P Parameter: Timepoint (hr) Value: 6
  misc_feature: MA Experiment 20000070 PARAMETER Experiment Name: At_100uM_ABA_Mutants_cDNA_P Parameter: Tissue Value: Aerial
  misc_feature: MA Experiment 20000070 PARAMETER Experiment Name: At_100uM_ABA_Mutants_cDNA_P Parameter: Treatment Value: 100uM ABA vs. No Treatment
  misc_feature: MA Experiment ID: 20000071 Result: Up-regulated in Transcription
  misc_feature: MA Experiment 20000071 PARAMETER Experiment Name: At_100uM_ABA_Mutants_cDNA_P Parameter: Plant Line Value: CS8104
  misc_feature: MA Experiment 20000071 PARAMETER Experiment Name: At_100uM_ABA_Mutants_cDNA_P Parameter: Timepoint (hr) Value: 6
  misc_feature: MA Experiment 20000071 PARAMETER Experiment Name: At_100uM_ABA_Mutants_cDNA_P Parameter: Tissue Value: Aerial
  misc_feature: MA Experiment 20000071 PARAMETER Experiment Name: At_100uM_ABA_Mutants_cDNA_P Parameter: Treatment Value: 100uM ABA vs. No Treatment
  misc_feature: MA Experiment ID: 20000072 Result: Up-regulated in Transcription
  misc_feature: MA Experiment 20000072 PARAMETER Experiment Name: At_100uM_ABA_Mutants_cDNA_P Parameter: Plant Line Value: CS8105
  misc_feature: MA Experiment 20000072 PARAMETER Experiment Name: At_100uM_ABA_Mutants_cDNA_P Parameter: Timepoint (hr) Value: 6
  misc_feature: MA Experiment 20000072 PARAMETER Experiment Name: At_100uM_ABA_Mutants_cDNA_P Parameter: Tissue Value: Aerial
  misc_feature: MA Experiment 20000072 PARAMETER Experiment Name: At_100uM_ABA_Mutants_cDNA_P Parameter: Treatment Value: 100uM ABA vs. No Treatment
  misc_feature: MA Experiment ID: 20000086 Result: Up-regulated in Transcription
  misc_feature: MA Experiment 20000086 PARAMETER Experiment Name: At_100uM_ABA_Mutants_cDNA_P Parameter: Plant Line Value: CS22
  misc_feature: MA Experiment 20000086 PARAMETER Experiment Name: At_100uM_ABA_Mutants_cDNA_P Parameter: Timepoint (hr) Value: 6
  misc_feature: MA Experiment 20000086 PARAMETER Experiment Name: At_100uM_ABA_Mutants_cDNA_P Parameter: Tissue Value: Aerial
  misc_feature: MA Experiment 20000086 PARAMETER Experiment Name: At_100uM_ABA_Mutants_cDNA_P Parameter: Treatment Value: 100uM ABA vs. No Treatment
  misc_feature: MA Experiment ID: 20000087 Result: Up-regulated in Transcription
  misc_feature: MA Experiment 20000087 PARAMETER Experiment Name: At_100uM_ABA_Mutants_cDNA_P Parameter: Plant Line Value: WS
  misc_feature: MA Experiment 20000087 PARAMETER Experiment Name: At_100uM_ABA_Mutants_cDNA_P Parameter: Timepoint (hr) Value: 6
  misc_feature: MA Experiment 20000087 PARAMETER Experiment Name: At_100uM_ABA_Mutants_cDNA_P Parameter: Tissue Value: Aerial
  misc_feature: MA Experiment 20000087 PARAMETER Experiment Name: At_100uM_ABA_Mutants_cDNA_P Parameter: Treatment Value: 100uM ABA vs. No Treatment
  misc_feature: MA Experiment ID: 20000088 Result: Up-regulated in Transcription
  misc_feature: MA Experiment 20000088 PARAMETER Experiment Name: At_100uM_ABA_Mutants_cDNA_P Parameter: Plant Line Value: Landsberg
  misc_feature: MA Experiment 20000088 PARAMETER Experiment Name: At_100uM_ABA_Mutants_cDNA_P Parameter: Timepoint (hr) Value: 6
  misc_feature: MA Experiment 20000088 PARAMETER Experiment Name: At_100uM_ABA_Mutants_cDNA_P Parameter: Tissue Value: Aerial
  misc_feature: MA Experiment 20000088 PARAMETER Experiment Name: At_100uM_ABA_Mutants_cDNA_P Parameter: Treatment Value: 100uM ABA vs. No Treatment
  misc_feature: MA Experiment ID: 20000117 Result: Up-regulated in Transcription
  misc_feature: MA Experiment 20000117 PARAMETER Experiment Name: At_100uM_ABA_Mutants_cDNA_P Parameter: Plant Line Value: Columbia
  misc_feature: MA Experiment 20000117 PARAMETER Experiment Name: At_100uM_ABA_Mutants_cDNA_P Parameter: Timepoint (hr) Value: 6
  misc_feature: MA Experiment 20000117 PARAMETER Experiment Name: At_100uM_ABA_Mutants_cDNA_P Parameter: Tissue Value: Aerial
  misc_feature: MA Experiment 20000117 PARAMETER Experiment Name: At_100uM_ABA_Mutants_cDNA_P Parameter: Treatment Value: 100uM ABA vs. No Treatment
  misc_feature: MA Experiment ID: 20000169 Result: Up-regulated in Transcription
  misc_feature: MA Experiment 20000169 PARAMETER Experiment Name: At_100uM_ABA_P Parameter: Age (day) Value: 14
  misc_feature: MA Experiment 20000169 PARAMETER Experiment Name: At_100uM_ABA_P Parameter: Organism Value: A. thaliana
  misc_feature: MA Experiment 20000169 PARAMETER Experiment Name: At_100uM_ABA_P Parameter: Plant Line Value: WS
  misc_feature: MA Experiment 20000169 PARAMETER Experiment Name: At_100uM_ABA_P Parameter: Timepoint (hr) Value: 6
  misc_feature: MA Experiment 20000169 PARAMETER Experiment Name: At_100uM_ABA_P Parameter: Tissue Value: Aerial
  misc_feature: MA Experiment 20000169 PARAMETER Experiment Name: At_100uM_ABA_P Parameter: Treatment Value: 100uM ABA vs. No Treatment
  misc_feature: MA Experiment ID: 20000182 Result: Up-regulated in Transcription
  misc_feature: MA Experiment 20000182 PARAMETER Experiment Name: At_2mM_SA_P Parameter: Age (day) Value: 14
  misc_feature: MA Experiment 20000182 PARAMETER Experiment Name: At_2mM_SA_P Parameter: Organism Value: A. thaliana
  misc_feature: MA Experiment 20000182 PARAMETER Experiment Name: At_2mM_SA_P Parameter: Plant Line Value: WS
  misc_feature: MA Experiment 20000182 PARAMETER Experiment Name: At_2mM_SA_P Parameter: Timepoint (hr) Value: 6
  misc_feature: MA Experiment 20000182 PARAMETER Experiment Name: At_2mM_SA_P Parameter: Tissue Value: Aerial
  misc_feature: MA Experiment 20000182 PARAMETER Experiment Name: At_2mM_SA_P Parameter: Treatment Value: 2mM SA vs. No Treatment
  misc_feature: MA Experiment ID: 20000268 Result: Up-regulated in Transcription
  misc_feature: MA Experiment 20000268 PARAMETER Experiment Name: At_100mM_NaCl__P Parameter: Age (day) Value: 14
  misc_feature: MA Experiment 20000268 PARAMETER Experiment Name: At_100mM_NaCl__P Parameter: Organism Value: A. thaliana
  misc_feature: MA Experiment 20000268 PARAMETER Experiment Name: At_100mM_NaCl__P Parameter: Plant Line Value: WS
  misc_feature: MA Experiment 20000268 PARAMETER Experiment Name: At_100mM_NaCl__P Parameter: Timepoint (hr) Value: 6
  misc_feature: MA Experiment 20000268 PARAMETER Experiment Name: At_100mM_NaCl__P Parameter: Tissue Value: Whole Plant
  misc_feature: MA Experiment 20000268 PARAMETER Experiment Name: At_100mM_NaCl__P Parameter: Treatment Value: 100mM NaCl vs. No Treatment
  misc_feature: MA Experiment ID: 20000453 Result: Up-regulated in Transcription
  misc_feature: MA Experiment 20000453 PARAMETER Experiment Name: At_100uM_ABA_P Parameter: Age (day) Value: 15
  misc_feature: MA Experiment 20000453 PARAMETER Experiment Name: At_100uM_ABA_P Parameter: Organism Value: A. thaliana
  misc_feature: MA Experiment 20000453 PARAMETER Experiment Name: At_100uM_ABA_P Parameter: Plant Line Value: WS
  misc_feature: MA Experiment 20000453 PARAMETER Experiment Name: At_100uM_ABA_P Parameter: Timepoint (hr) Value: 24
  misc_feature: MA Experiment 20000453 PARAMETER Experiment Name: At_100uM_ABA_P Parameter: Tissue Value: Aerial
  misc_feature: MA Experiment 20000453 PARAMETER Experiment Name: At_100uM_ABA_P Parameter: Treatment Value: 100uM ABA vs. No Treatment
  misc_feature: MA Experiment ID: 20001248 Result: Down-regulated in Transcription
  misc_feature: MA Experiment 20001248 PARAMETER Experiment Name: At_Far-red-induction_P Parameter: Age (day) Value: 7
  misc_feature: MA Experiment 20001248 PARAMETER Experiment Name: At_Far-red-induction_P Parameter: Light Value: Far-red vs. White
  misc_feature: MA Experiment 20001248 PARAMETER Experiment Name: At_Far-red-induction_P Parameter: Organism Value: A. thaliana
  misc_feature: MA Experiment 20001248 PARAMETER Experiment Name: At_Far-red-induction_P Parameter: Plant Line Value: Columbia
  misc_feature: MA Experiment 20001248 PARAMETER Experiment Name: At_Far-red-induction_P Parameter: Timepoint (hr) Value: 4
  misc_feature: MA Experiment 20001248 PARAMETER Experiment Name: At_Far-red-induction_P Parameter: Tissue Value: Whole Plant
  misc_feature: MA Experiment ID: 20001560 Result: Up-regulated in Transcription
  misc_feature: MA Experiment 20001560 PARAMETER Experiment Name: At_Drought_Soil_Dry_P Parameter: Age (day) Value: 28
  misc_feature: MA Experiment 20001560 PARAMETER Experiment Name: At_Drought_Soil_Dry_P Parameter: Organism Value: A. thaliana
  misc_feature: MA Experiment 20001560 PARAMETER Experiment Name: At_Drought_Soil_Dry_P Parameter: Plant Line Value: WS
  misc_feature: MA Experiment 20001560 PARAMETER Experiment Name: At_Drought_Soil_Dry_P Parameter: Post Timepoint (hr) Value: None
  misc_feature: MA Experiment 20001560 PARAMETER Experiment Name: At_Drought_Soil_Dry_P Parameter: Post-Treatment Value: None
  misc_feature: MA Experiment 20001560 PARAMETER Experiment Name: At_Drought_Soil_Dry_P Parameter: Timepoint (day) Value: 14
  misc_feature: MA Experiment 20001560 PARAMETER Experiment Name: At_Drought_Soil_Dry_P Parameter: Treatment Value: Drought vs. No Drought
  misc_feature: MA Experiment ID: 20001904 Result: Up-regulated in Transcription
  misc_feature: MA Experiment 20001904 PARAMETER Experiment Name: At_Drought_Reproduction_P Parameter: Age (day) Value: 37
  misc_feature: MA Experiment 20001904 PARAMETER Experiment Name: At_Drought_Reproduction_P Parameter: Organism Value: A. thaliana
  misc_feature: MA Experiment 20001904 PARAMETER Experiment Name: At_Drought_Reproduction_P Parameter: Plant Line Value: WS
  misc_feature: MA Experiment 20001904 PARAMETER Experiment Name: At_Drought_Reproduction_P Parameter: Timepoint (day) Value: 7
  misc_feature: MA Experiment 20001904 PARAMETER Experiment Name: At_Drought_Reproduction_P Parameter: Tissue Value: Rosettes
  misc_feature: MA Experiment 20001904 PARAMETER Experiment Name: At_Drought_Reproduction_P Parameter: Treatment Value: Drought vs. No Drought

SEQ ID NO: 31114 - protein, 311 aa, Arabidopsis thaliana; identical to SEQ ID NO: 27524
  peptide (1)..(311): Ceres Seq. ID no. 12421728
  misc_feature (1)..(294): Homolog of NCBI NO: 25283479 NR Description: probable alcohol dehydrogenase [imported] -
  misc_feature (1)..(311): Homolog of NCBI NO: 13160399 NR Description: aldose reductase [Digitalis purpurea]
  misc_feature (1)..(311): Homolog of NCBI NO: 13160397 NR Description: aldose reductase [Digitalis purpurea]
  misc_feature (1)..(311): Homolog of NCBI NO: 15232354 NR Description: aldo/keto reductase family
  misc_feature (12)..(311): Homolog of NCBI NO: 28393400 NR Description: putative aldo/keto reductase [Arabidopsis
  misc_feature (1)..(311): Homolog of NCBI NO: 30687247 NR Description: aldo/keto reductase family [Arabidopsis thaliana]
  misc_feature (1)..(311): Homolog of NCBI NO: 30687261 NR Description: aldo/keto reductase family [Arabidopsis thaliana]
  misc_feature (1)..(311): Homolog of NCBI NO: 7431112 NR Description: abscisic acid activated protein - alfalfa
  misc_feature (1)..(283): Homolog of NCBI NO: 7431106 NR Description: probable alcohol dehydrogenase [imported] -
  misc_feature (1)..(311): Homolog of NCBI NO: 18404526 NR Description: aldo/keto reductase family

SEQ ID NO: 31115 - protein, 286 aa, Arabidopsis thaliana; identical to SEQ ID NO: 27525
  peptide (1)..(286): Ceres Seq. ID no. 12421729
  misc_feature (1)..(269): Homolog of NCBI NO: 25283479 NR Description: probable alcohol dehydrogenase [imported] -
  misc_feature (1)..(286): Homolog of NCBI NO: 13160399 NR Description: aldose reductase [Digitalis purpurea]
  misc_feature (1)..(286): Homolog of NCBI NO: 13160397 NR Description: aldose reductase [Digitalis purpurea]
  misc_feature (1)..(286): Homolog of NCBI NO: 15232354 NR Description: aldo/keto reductase family
  misc_feature (1)..(286): Homolog of NCBI NO: 28393400 NR Description: putative aldo/keto reductase [Arabidopsis
  misc_feature (1)..(286): Homolog of NCBI NO: 30687247 NR Description: aldo/keto reductase family [Arabidopsis thaliana]
  misc_feature (1)..(286): Homolog of NCBI NO: 30687261 NR Description: aldo/keto reductase family [Arabidopsis thaliana]
  misc_feature (1)..(286): Homolog of NCBI NO: 7431112 NR Description: abscisic acid activated protein - alfalfa
  misc_feature (1)..(258): Homolog of NCBI NO: 7431106 NR Description: probable alcohol dehydrogenase [imported] -
  misc_feature (1)..(286): Homolog of NCBI NO: 18404526 NR Description: aldo/keto reductase family

SEQ ID NO: 31116 - protein, 191 aa, Arabidopsis thaliana; identical to SEQ ID NO: 27526
  peptide (1)..(191): Ceres Seq. ID no. 12421730
  misc_feature (1)..(174): Homolog of NCBI NO: 25283479 NR Description: probable alcohol dehydrogenase [imported] -
  misc_feature (1)..(191): Homolog of NCBI NO: 13160399 NR Description: aldose reductase [Digitalis purpurea]
  misc_feature (1)..(191): Homolog of NCBI NO: 13160397 NR Description: aldose reductase [Digitalis purpurea]
  misc_feature (1)..(191): Homolog of NCBI NO: 15232354 NR Description: aldo/keto reductase family
  misc_feature (1)..(191): Homolog of NCBI NO: 28393400 NR Description: putative aldo/keto reductase [Arabidopsis
  misc_feature (1)..(191): Homolog of NCBI NO: 30687247 NR Description: aldo/keto reductase family [Arabidopsis thaliana]
  misc_feature (1)..(191): Homolog of NCBI NO: 30687261 NR Description: aldo/keto reductase family [Arabidopsis thaliana]
  misc_feature (1)..(191): Homolog of NCBI NO: 7431112 NR Description: abscisic acid activated protein - alfalfa
  misc_feature (1)..(163): Homolog of NCBI NO: 7431106 NR Description: probable alcohol dehydrogenase [imported] -
  misc_feature (1)..(191): Homolog of NCBI NO: 18404526 NR Description: aldo/keto reductase family

SEQ ID NO: 31117 - DNA, 1342 bp, Arabidopsis thaliana; identical to SEQ ID NO: 27527
  misc_feature (1)..(1342): Ceres Seq. ID no. 13489686
  misc_feature: MA Experiment ID: 108433 Result: Down-regulated in Transcription
  misc_feature: MA Experiment 108433 PARAMETER Experiment Name: At_rhl_Mutant2_cDNA_P Parameter: Age (day) Value: 7
  misc_feature: MA Experiment 108433 PARAMETER Experiment Name: At_rhl_Mutant2_cDNA_P Parameter: Organism Value: A. thaliana
  misc_feature: MA Experiment 108433 PARAMETER Experiment Name: At_rhl_Mutant2_cDNA_P Parameter: Plant Line Value: rhl Mutant vs. wt landsburg
  misc_feature: MA Experiment 108433 PARAMETER Experiment Name: At_rhl_Mutant2_cDNA_P Parameter: Tissue Value: Roots
  misc_feature: MA Experiment ID: 20000111 Result: Down-regulated in Transcription
  misc_feature: MA Experiment 20000111 PARAMETER Experiment Name: At_42deg_Heat_cDNA_P Parameter: Temperature (deg C) Value: 42 vs. 22
  misc_feature: MA Experiment 20000111 PARAMETER Experiment Name: At_42deg_Heat_cDNA_P Parameter: Timepoint (hr) Value: 6
  misc_feature: MA Experiment 20000111 PARAMETER Experiment Name: At_42deg_Heat_cDNA_P Parameter: Tissue Value: Aerial
  misc_feature: MA Experiment ID: 20000144 Result: Down-regulated in Transcription
  misc_feature: MA Experiment 20000144 PARAMETER Experiment Name: At_42deg_Heat_cDNA_P Parameter: Temperature (deg C) Value: 42 vs. 22
  misc_feature: MA Experiment 20000144 PARAMETER Experiment Name: At_42deg_Heat_cDNA_P Parameter: Timepoint (hr) Value: 1
  misc_feature: MA Experiment 20000144 PARAMETER Experiment Name: At_42deg_Heat_cDNA_P Parameter: Tissue Value: Aerial
  misc_feature: MA Experiment ID: 20000224 Result: Down-regulated in Transcription
  misc_feature: MA Experiment ID: 20001451 Result: Down-regulated in Transcription
  misc_feature: MA Experiment 20001451 PARAMETER Experiment Name: At_Far-red-induction_P Parameter: Age (day) Value: 7
  misc_feature: MA Experiment 20001451 PARAMETER Experiment Name: At_Far-red-induction_P Parameter: Light Value: Far-red vs. White
  misc_feature: MA Experiment 20001451 PARAMETER Experiment Name: At_Far-red-induction_P Parameter: Organism Value: A. thaliana
  misc_feature: MA Experiment 20001451 PARAMETER Experiment Name: At_Far-red-induction_P Parameter: Plant Line Value: Columbia
  misc_feature: MA Experiment 20001451 PARAMETER Experiment Name: At_Far-red-induction_P Parameter: Timepoint (hr) Value: 24
  misc_feature: MA Experiment 20001451 PARAMETER Experiment Name: At_Far-red-induction_P Parameter: Tissue Value: Whole Plant

SEQ ID NO: 31118 - protein, 270 aa, Arabidopsis thaliana; identical to SEQ ID NO: 27528
  peptide (1)..(270): Ceres Seq. ID no. 13489687
  misc_feature (45)..(99): Pfam Name: Zinc finger, C3HC4 type (RING finger) Pfam Description: Zinc finger, C3HC4 type (RING finger)
  misc_feature (1)..(269): Homolog of NCBI NO: 15221223 NR Description: zinc finger (C3HC4-type RING finger) protein
  misc_feature (1)..(269): Homolog of NCBI NO: 21592563 NR Description: putative RING zinc finger protein [Arabidopsis
  misc_feature (1)..(269): Homolog of NCBI NO: 11994767 NR Description: RING zinc finger protein-like [Arabidopsis
  misc_feature (1)..(269): Homolog of NCBI NO: 15228658 NR Description: expressed protein [Arabidopsis thaliana]
  misc_feature (1)..(270): Homolog of NCBI NO: 21594048 NR Description: unknown [Arabidopsis thaliana]
  misc_feature (1)..(270): Homolog of NCBI NO: 18409246 NR Description: zinc finger (C3HC4-type RING finger) protein

SEQ ID NO: 31119 - protein, 259 aa, Arabidopsis thaliana; identical to SEQ ID NO: 27529
  peptide (1)..(259): Ceres Seq. ID no. 13489688
  misc_feature (34)..(88): Pfam Name: Zinc finger, C3HC4 type (RING finger) Pfam Description: Zinc finger, C3HC4 type (RING finger)
  misc_feature (1)..(258): Homolog of NCBI NO: 15221223 NR Description: zinc finger (C3HC4-type RING finger) protein
  misc_feature (1)..(258): Homolog of NCBI NO: 21592563 NR Description: putative RING zinc finger protein [Arabidopsis
  misc_feature (1)..(258): Homolog of NCBI NO: 11994767 NR Description: RING zinc finger protein-like [Arabidopsis
  misc_feature (1)..(258): Homolog of NCBI NO: 15228658 NR Description: expressed protein [Arabidopsis thaliana]
  misc_feature (1)..(259): Homolog of NCBI NO: 21594048 NR Description: unknown [Arabidopsis thaliana]
  misc_feature (1)..(259): Homolog of NCBI NO: 18409246 NR Description: zinc finger (C3HC4-type RING finger) protein

SEQ ID NO: 31120 - protein, 147 aa, Arabidopsis thaliana; identical to SEQ ID NO: 27530
  peptide (1)..(147): Ceres Seq. ID no. 13489689
  misc_feature (1)..(147): Homolog of NCBI NO: 18409246 NR Description: zinc finger (C3HC4-type RING finger) protein
  misc_feature (1)..(146): Homolog of NCBI NO: 15221223 NR Description: zinc finger (C3HC4-type RING finger) protein
  misc_feature (1)..(146): Homolog of NCBI NO: 21592563 NR Description: putative RING zinc finger protein [Arabidopsis
  misc_feature (1)..(146): Homolog of NCBI NO: 11994767 NR Description: RING zinc finger protein-like [Arabidopsis
  misc_feature (1)..(146): Homolog of NCBI NO: 15228658 NR Description: expressed protein [Arabidopsis thaliana]
  misc_feature (1)..(147): Homolog of NCBI NO: 21594048 NR Description: unknown [Arabidopsis thaliana]

SEQ ID NO: 31121 - DNA, 1646 bp, Arabidopsis thaliana; identical to SEQ ID NO: 27531
  misc_feature (1)..(1646): Ceres Seq. ID no. 13488223
  misc_feature: MA Experiment ID: 108434 Result: Up-regulated in Transcription
  misc_feature: MA Experiment 108434 PARAMETER Experiment Name: At_Root_Tips_cDNA_P Parameter: Tissue Value: Root Tips
  misc_feature: MA Experiment ID: 108573 Result: Down-regulated in Transcription
  misc_feature: MA Experiment 108573 PARAMETER Experiment Name: At_Drought_cDNA_P Parameter: Timepoint (hr) Value: 6
  misc_feature: MA Experiment 108573 PARAMETER Experiment Name: At_Drought_cDNA_P Parameter: Tissue Value: Aerial
  misc_feature: MA Experiment 108573 PARAMETER Experiment Name: At_Drought_cDNA_P Parameter: Treatment Value: Drought vs. No Drought
  misc_feature: MA Experiment ID: 20000182 Result: Down-regulated in Transcription
  misc_feature: MA Experiment 20000182 PARAMETER Experiment Name: At_2mM_SA_P Parameter: Age (day) Value: 14
  misc_feature: MA Experiment 20000182 PARAMETER Experiment Name: At_2mM_SA_P Parameter: Organism Value: A. thaliana
  misc_feature: MA Experiment 20000182 PARAMETER Experiment Name: At_2mM_SA_P Parameter: Plant Line Value: WS
  misc_feature: MA Experiment 20000182 PARAMETER Experiment Name: At_2mM_SA_P Parameter: Timepoint (hr) Value: 6
  misc_feature: MA Experiment 20000182 PARAMETER Experiment Name: At_2mM_SA_P Parameter: Tissue Value: Aerial
  misc_feature: MA Experiment 20000182 PARAMETER Experiment Name: At_2mM_SA_P Parameter: Treatment Value: 2mM SA vs. No Treatment
  misc_feature: MA Experiment ID: 20000184 Result: Down-regulated in Transcription
  misc_feature: MA Experiment 20000184 PARAMETER Experiment Name: At_Shoots__P Parameter: Age (day) Value: 7
  misc_feature: MA Experiment 20000184 PARAMETER Experiment Name: At_Shoots__P Parameter: Tissue Value: Shoots vs. Whole Plant
  misc_feature: MA Experiment ID: 20000227 Result: Up-regulated in Transcription
  misc_feature: MA Experiment 20000227 PARAMETER Experiment Name: At_Root-Tips-vs-Tops_P Parameter: Tissue Value: Root Tips vs. Root Tops
  misc_feature: MA Experiment ID: 20000234 Result: Up-regulated in Transcription
  misc_feature: MA Experiment 20000234 PARAMETER Experiment Name: At_Siliques_P Parameter: Age (day) Value: 21
  misc_feature: MA Experiment 20000234 PARAMETER Experiment Name: At_Siliques_P Parameter: Organism Value: A. thaliana
  misc_feature: MA Experiment 20000234 PARAMETER Experiment Name: At_Siliques_P Parameter: Plant Line Value: WS
  misc_feature: MA Experiment 20000234 PARAMETER Experiment Name: At_Siliques_P Parameter: Tissue Value: Less Than 5mm Siliques vs. Whole Plant
  misc_feature: MA Experiment ID: 20000235 Result: Up-regulated in Transcription
  misc_feature: MA Experiment 20000235 PARAMETER Experiment Name: At_Siliques_P Parameter: Age (day) Value: 21
  misc_feature: MA Experiment 20000235 PARAMETER Experiment Name: At_Siliques_P Parameter: Organism Value: A. thaliana
  misc_feature: MA Experiment 20000235 PARAMETER Experiment Name: At_Siliques_P Parameter: Plant Line Value: WS
  misc_feature: MA Experiment 20000235 PARAMETER Experiment Name: At_Siliques_P Parameter: Tissue Value: 5-10mm Siliques vs. Whole Plant
  misc_feature: MA Experiment ID: 20000264 Result: Up-regulated in Transcription
  misc_feature: MA Experiment 20000264 PARAMETER Experiment Name: At_Open_Flower_P Parameter: Age (day) Value: 21
  misc_feature: MA Experiment 20000264 PARAMETER Experiment Name: At_Open_Flower_P Parameter: Plant Line Value: WS
  misc_feature: MA Experiment 20000264 PARAMETER Experiment Name: At_Open_Flower_P Parameter: Tissue Value: Open Flower vs. Whole Plant
  misc_feature: MA Experiment ID: 20000286 Result: Up-regulated in Transcription
  misc_feature: MA Experiment 20000286 PARAMETER Experiment Name: At_Open_Flower_P Parameter: Age (day) Value: 21
  misc_feature: MA Experiment 20000286 PARAMETER Experiment Name: At_Open_Flower_P Parameter: Plant Line Value: WS
  misc_feature: MA Experiment 20000286 PARAMETER Experiment Name: At_Open_Flower_P Parameter: Tissue Value: Half Open vs. Whole Plant
  misc_feature: MA Experiment ID: 20000438 Result: Down-regulated in Transcription
  misc_feature: MA Experiment 20000438 PARAMETER Experiment Name: At_Shoots__P Parameter: Age (day) Value: 14
  misc_feature: MA Experiment 20000438 PARAMETER Experiment Name: At_Shoots__P Parameter: Tissue Value: Shoots vs. Whole Plant
  misc_feature: MA Experiment ID: 20000439 Result: Down-regulated in Transcription
  misc_feature: MA Experiment 20000439 PARAMETER Experiment Name: At_Roots__P Parameter: Age (day) Value: 14 vs. 21
  misc_feature: MA Experiment 20000439 PARAMETER Experiment Name: At_Roots__P Parameter: Organism Value: A. thaliana
  misc_feature: MA Experiment 20000439 PARAMETER Experiment Name: At_Roots__P Parameter: Tissue Value: Roots vs. Whole Plant
  misc_feature: MA Experiment ID: 20000441 Result: Down-regulated in Transcription
  misc_feature: MA Experiment 20000441 PARAMETER Experiment Name: At_1uM_BR-BRZ__P Parameter: Tissue Value: Shoot Apices
  misc_feature: MA Experiment 20000441 PARAMETER Experiment Name: At_1uM_BR-BRZ__P Parameter: Treatment Value: 1uM BR vs. No Treatment
  misc_feature: MA Experiment ID: 20000443 Result: Down-regulated in Transcription
  misc_feature: MA Experiment 20000443 PARAMETER Experiment Name: At_1uM_BR-BRZ__P Parameter: Tissue Value: Shoot Apices
  misc_feature: MA Experiment 20000443 PARAMETER Experiment Name: At_1uM_BR-BRZ__P Parameter: Treatment Value: 1uM BRZ vs. No Treatment
  misc_feature: MA Experiment ID: 20000451 Result: Down-regulated in Transcription
  misc_feature: MA Experiment 20000451 PARAMETER Experiment Name: At_CS6879_Shoots-Roots_P Parameter: Age (day) Value: 14
  misc_feature: MA Experiment 20000451 PARAMETER Experiment Name: At_CS6879_Shoots-Roots_P Parameter: Organism Value: A. thaliana
  misc_feature: MA Experiment 20000451 PARAMETER Experiment Name: At_CS6879_Shoots-Roots_P Parameter: Plant Line Value: CS6879 vs. WS
  misc_feature: MA Experiment 20000451 PARAMETER Experiment Name: At_CS6879_Shoots-Roots_P Parameter: Tissue Value: Roots
  misc_feature: MA Experiment ID: 20000527 Result: Down-regulated in Transcription
  misc_feature: MA Experiment 20000527 PARAMETER Experiment Name: At_10percent_PEG_P Parameter: Age (day) Value: 20
  misc_feature: MA Experiment 20000527 PARAMETER Experiment Name: At_10percent_PEG_P Parameter: Organism Value: A. thaliana
  misc_feature: MA Experiment 20000527 PARAMETER Experiment Name: At_10percent_PEG_P Parameter: Plant Line Value: WS
  misc_feature: MA Experiment 20000527 PARAMETER Experiment Name: At_10percent_PEG_P Parameter: Timepoint (day) Value: 20
  misc_feature: MA Experiment 20000527 PARAMETER Experiment Name: At_10percent_PEG_P Parameter: Tissue Value: Whole Plant
  misc_feature: MA Experiment 20000527 PARAMETER Experiment Name: At_10percent_PEG_P Parameter: Treatment Value: 10percent PEG vs. No Treatment
  misc_feature: MA Experiment ID: 20001558 Result: Up-regulated in Transcription
  misc_feature: MA Experiment 20001558 PARAMETER Experiment Name: At_Drought_Soil_Dry_P Parameter: Age (day) Value: 27
  misc_feature: MA Experiment 20001558 PARAMETER Experiment Name: At_Drought_Soil_Dry_P Parameter: Organism Value: A. thaliana
  misc_feature: MA Experiment 20001558 PARAMETER Experiment Name: At_Drought_Soil_Dry_P Parameter: Plant Line Value: WS
  misc_feature: MA Experiment 20001558 PARAMETER Experiment Name: At_Drought_Soil_Dry_P Parameter: Post Timepoint (hr) Value: 6
  misc_feature: MA Experiment 20001558 PARAMETER Experiment Name: At_Drought_Soil_Dry_P Parameter: Post-Treatment Value: Re-Water vs. No Drought
  misc_feature: MA Experiment 20001558 PARAMETER Experiment Name: At_Drought_Soil_Dry_P Parameter: Timepoint (day) Value: 13
  misc_feature: MA Experiment 20001558 PARAMETER Experiment Name: At_Drought_Soil_Dry_P Parameter: Treatment Value: Drought vs. No Drought
  misc_feature: MA Experiment ID: 20001560 Result: Up-regulated in Transcription
  misc_feature: MA Experiment 20001560 PARAMETER Experiment Name: At_Drought_Soil_Dry_P Parameter: Age (day) Value: 28
  misc_feature: MA Experiment 20001560 PARAMETER Experiment Name: At_Drought_Soil_Dry_P Parameter: Organism Value: A. thaliana
  misc_feature: MA Experiment 20001560 PARAMETER Experiment Name: At_Drought_Soil_Dry_P Parameter: Plant Line Value: WS
  misc_feature: MA Experiment 20001560 PARAMETER Experiment Name: At_Drought_Soil_Dry_P Parameter: Post Timepoint (hr) Value: None
  misc_feature: MA Experiment 20001560 PARAMETER Experiment Name: At_Drought_Soil_Dry_P Parameter: Post-Treatment Value: None
  misc_feature: MA Experiment 20001560 PARAMETER Experiment Name: At_Drought_Soil_Dry_P Parameter: Timepoint (day) Value: 14
  misc_feature: MA Experiment 20001560 PARAMETER Experiment Name: At_Drought_Soil_Dry_P Parameter: Treatment Value: Drought vs. No Drought
  misc_feature: MA Experiment ID: 20001768 Result: Up-regulated in Transcription
  misc_feature: MA Experiment 20001768 PARAMETER Experiment Name: At_Far-red-enriched-adult_P Parameter: Age (day) Value: 28
  misc_feature: MA Experiment 20001768 PARAMETER Experiment Name: At_Far-red-enriched-adult_P Parameter: Light Value: Far-red enriched vs. White
  misc_feature: MA Experiment 20001768 PARAMETER Experiment Name: At_Far-red-enriched-adult_P Parameter: Organism Value: A. thaliana
  misc_feature: MA Experiment 20001768 PARAMETER Experiment Name: At_Far-red-enriched-adult_P Parameter: Plant Line Value: Columbia
  misc_feature: MA Experiment 20001768 PARAMETER Experiment Name: At_Far-red-enriched-adult_P Parameter: Timepoint (hr) Value: 1
  misc_feature: MA Experiment 20001768 PARAMETER Experiment Name: At_Far-red-enriched-adult_P Parameter: Tissue Value: Aerial
  misc_feature: MA Experiment ID: 20001771 Result: Up-regulated in Transcription
  misc_feature: MA Experiment 20001771 PARAMETER Experiment Name: At_Far-red-enriched-adult_P Parameter: Age (day) Value: 28
  misc_feature: MA Experiment 20001771 PARAMETER Experiment Name: At_Far-red-enriched-adult_P Parameter: Light Value: Far-red enriched vs. White
  misc_feature: MA Experiment 20001771 PARAMETER Experiment Name: At_Far-red-enriched-adult_P Parameter: Organism Value: A. thaliana
  misc_feature: MA Experiment 20001771 PARAMETER Experiment Name: At_Far-red-enriched-adult_P Parameter: Plant Line Value: Columbia
  misc_feature: MA Experiment 20001771 PARAMETER Experiment Name: At_Far-red-enriched-adult_P Parameter: Timepoint (hr) Value: 16
  misc_feature: MA Experiment 20001771 PARAMETER Experiment Name: At_Far-red-enriched-adult_P Parameter: Tissue Value: Aerial
  misc_feature: MA Experiment ID: 20001773 Result: Up-regulated in Transcription
  misc_feature: MA Experiment 20001773 PARAMETER Experiment Name: At_Far-red-enriched-adult_P Parameter: Age (day) Value: 30
  misc_feature: MA Experiment 20001773 PARAMETER Experiment Name: At_Far-red-enriched-adult_P Parameter: Light Value: Far-red enriched vs. White
  misc_feature: MA Experiment 20001773 PARAMETER Experiment Name: At_Far-red-enriched-adult_P Parameter: Organism Value: A. thaliana
  misc_feature: MA Experiment 20001773 PARAMETER Experiment Name: At_Far-red-enriched-adult_P Parameter: Plant Line Value: Columbia
  misc_feature: MA Experiment 20001773 PARAMETER Experiment Name: At_Far-red-enriched-adult_P Parameter: Timepoint (hr) Value: 48
  misc_feature: MA Experiment 20001773 PARAMETER Experiment Name: At_Far-red-enriched-adult_P Parameter: Tissue Value: Aerial
  misc_feature: MA Experiment ID: 20001906 Result: Down-regulated in Transcription
  misc_feature: MA Experiment 20001906 PARAMETER Experiment Name: At_Drought_Reproduction_P Parameter: Age (day) Value: 35
  misc_feature: MA Experiment 20001906 PARAMETER Experiment Name: At_Drought_Reproduction_P Parameter: Organism Value: A. thaliana
  misc_feature: MA Experiment 20001906 PARAMETER Experiment Name: At_Drought_Reproduction_P Parameter: Plant Line Value: WS
  misc_feature: MA Experiment 20001906 PARAMETER Experiment Name: At_Drought_Reproduction_P Parameter: Timepoint (day) Value: 5
  misc_feature: MA Experiment 20001906 PARAMETER Experiment Name: At_Drought_Reproduction_P Parameter: Tissue Value: Siliques
  misc_feature: MA Experiment 20001906 PARAMETER Experiment Name: At_Drought_Reproduction_P Parameter: Treatment Value: Drought vs. No Drought
  misc_feature: MA Experiment ID: 20001908 Result: Down-regulated in Transcription
  misc_feature: MA Experiment 20001908 PARAMETER Experiment Name: At_Drought_Reproduction_P Parameter: Age (day) Value: 40
  misc_feature: MA Experiment 20001908 PARAMETER Experiment Name: At_Drought_Reproduction_P Parameter: Organism Value: A. thaliana
  misc_feature: MA Experiment 20001908 PARAMETER Experiment Name: At_Drought_Reproduction_P Parameter: Plant Line Value: WS
  misc_feature: MA Experiment 20001908 PARAMETER Experiment Name: At_Drought_Reproduction_P Parameter: Timepoint (day) Value: 10
  misc_feature: MA Experiment 20001908 PARAMETER Experiment Name: At_Drought_Reproduction_P Parameter: Tissue Value: Siliques
  misc_feature: MA Experiment 20001908 PARAMETER Experiment Name: At_Drought_Reproduction_P Parameter: Treatment Value: Drought vs. No Drought
  misc_feature: MA Experiment ID: 20001911 Result: Down-regulated in Transcription
  misc_feature: MA Experiment 20001911 PARAMETER Experiment Name: At_Drought_Reproduction_P Parameter: Age (day) Value: 40
  misc_feature: MA Experiment 20001911 PARAMETER Experiment Name: At_Drought_Reproduction_P Parameter: Organism Value: A. thaliana
  misc_feature: MA Experiment 20001911 PARAMETER Experiment Name: At_Drought_Reproduction_P Parameter: Plant Line Value: WS
  misc_feature: MA Experiment 20001911 PARAMETER Experiment Name: At_Drought_Reproduction_P Parameter: Timepoint (day) Value: 10
  misc_feature: MA Experiment 20001911 PARAMETER Experiment Name: At_Drought_Reproduction_P Parameter: Tissue Value: Flowers
  misc_feature: MA Experiment 20001911 PARAMETER Experiment Name: At_Drought_Reproduction_P Parameter: Treatment Value: Drought vs. No Drought

SEQ ID NO: 31122 - protein, 493 aa, Arabidopsis thaliana; identical to SEQ ID NO: 27532
  peptide (1)..(493): Ceres Seq. ID no. 13488224
  misc_feature (291)..(493): Pfam Name: Male sterility protein Pfam Description: Male sterility protein
  misc_feature (417)..(492): Homolog of NCBI NO: 15229993 NR Description: acyl CoA reductase -related protein [Arabidopsis
  misc_feature (9)..(373): Homolog of NCBI NO: 15229993 NR Description: acyl CoA reductase -related protein [Arabidopsis
  misc_feature (5)..(492): Homolog of NCBI NO: 35215152 NR Description: putative fatty acyl coA reductase
  misc_feature (11)..(492): Homolog of NCBI NO: 11357157 NR Description: acyl CoA reductase-protein - Arabidopsis thaliana
  misc_feature (11)..(492): Homolog of NCBI NO: 15242260 NR Description: male sterility 2-related protein (emb|CAA68191.1)
  misc_feature (6)..(492): Homolog of NCBI NO: 5020215 NR Description: acyl CoA reductase [Simmondsia chinensis]
  misc_feature (114)..(493): Homolog of NCBI NO: 30689818 NR Description: male sterility 2-related protein [Arabidopsis
  misc_feature (31)..(493): Homolog of NCBI NO: 7487952 NR Description: male sterility protein 2 homolog T16L1.280 -
  misc_feature (5)..(493): Homolog of NCBI NO: 25354587 NR Description: male sterility 2-like protein [imported] -
  misc_feature (1)..(493): Homolog of NCBI NO: 16323107 NR Description: AT4g33790/T16L1_280 [Arabidopsis thaliana]

SEQ ID NO: 31123 - protein, 489 aa, Arabidopsis thaliana; identical to SEQ ID NO: 27533
  peptide (1)..(489): Ceres Seq. ID no. 13488225
  misc_feature (287)..(489): Pfam Name: Male sterility protein Pfam Description: Male sterility protein
  misc_feature (413)..(488): Homolog of NCBI NO: 15229993 NR Description: acyl CoA reductase -related protein [Arabidopsis
  misc_feature (5)..(369): Homolog of NCBI NO: 15229993 NR Description: acyl CoA reductase -related protein [Arabidopsis
  misc_feature (1)..(488): Homolog of NCBI NO: 35215152 NR Description: putative fatty acyl coA reductase
  misc_feature (7)..(488): Homolog of NCBI NO: 11357157 NR Description: acyl CoA reductase-protein - Arabidopsis thaliana
  misc_feature (7)..(488): Homolog of NCBI NO: 15242260 NR Description: male sterility 2-related protein (emb|CAA68191.1)
  misc_feature (2)..(488): Homolog of NCBI NO: 5020215 NR Description: acyl CoA reductase [Simmondsia chinensis]
  misc_feature (110)..(489): Homolog of NCBI NO: 30689818 NR Description: male sterility 2-related protein [Arabidopsis
  misc_feature (27)..(489): Homolog of NCBI NO: 7487952 NR Description: male sterility protein 2 homolog T16L1.280 -
  misc_feature (1)..(489): Homolog of NCBI NO: 25354587 NR Description: male sterility 2-like protein [imported] -
  misc_feature (1)..(489): Homolog of NCBI NO: 16323107 NR Description: AT4g33790/T16L1_280 [Arabidopsis thaliana]

SEQ ID NO: 31124 - protein, 380 aa, Arabidopsis thaliana; identical to SEQ ID NO: 27534
  peptide (1)..(380): Ceres Seq. ID no. 13488226
  misc_feature (178)..(380): Pfam Name: Male sterility protein Pfam Description: Male sterility protein
  misc_feature (304)..(379): Homolog of NCBI NO: 15229993 NR Description: acyl CoA reductase -related protein [Arabidopsis
  misc_feature (1)..(260): Homolog of NCBI NO: 15229993 NR Description: acyl CoA reductase -related protein [Arabidopsis
  misc_feature (1)..(379): Homolog of NCBI NO: 35215152 NR Description: putative fatty acyl coA reductase
  misc_feature (1)..(379): Homolog of NCBI NO: 11357157 NR Description: acyl CoA reductase-protein - Arabidopsis thaliana
  misc_feature (1)..(379): Homolog of NCBI NO: 15242260 NR Description: male sterility 2-related protein (emb|CAA68191.1)
  misc_feature (1)..(379): Homolog of NCBI NO: 5020215 NR Description: acyl CoA reductase [Simmondsia chinensis]
  misc_feature (1)..(380): Homolog of NCBI NO: 30689818 NR Description: male sterility 2-related protein [Arabidopsis
  misc_feature (1)..(380): Homolog of NCBI NO: 7487952 NR Description: male sterility protein 2 homolog T16L1.280 -
  misc_feature (1)..(380): Homolog of NCBI NO: 25354587 NR Description: male sterility 2-like protein [imported] -
  misc_feature (1)..(380): Homolog of NCBI NO: 16323107 NR Description: AT4g33790/T16L1_280 [Arabidopsis thaliana]

SEQ ID NO: 31125 - DNA, 1263 bp, Arabidopsis thaliana; identical to SEQ ID NO: 27535
  misc_feature (1)..(1263): Ceres Seq. ID no. 13491651
  misc_feature: MA Experiment ID: 108434 Result: Down-regulated in Transcription
  misc_feature: MA Experiment 108434 PARAMETER Experiment Name: At_Root_Tips_cDNA_P Parameter: Tissue Value: Root Tips
  misc_feature: MA Experiment ID: 108462 Result: Up-regulated in Transcription
  misc_feature: MA Experiment 108462 PARAMETER Experiment Name: At_Germinating_Seeds_cDNA_P Parameter: Age (day) Value: 2 vs. 0
  misc_feature: MA Experiment 108462 PARAMETER Experiment Name: At_Germinating_Seeds_cDNA_P Parameter: Tissue Value: Germinating Seeds
  misc_feature: MA Experiment ID: 108463 Result: Up-regulated in Transcription
  misc_feature: MA Experiment 108463 PARAMETER Experiment Name: At_Germinating_Seeds_cDNA_P Parameter: Age (day) Value: 3 vs. 0
  misc_feature: MA Experiment 108463 PARAMETER Experiment Name: At_Germinating_Seeds_cDNA_P Parameter: Tissue Value: Germinating Seeds
  misc_feature: MA Experiment ID: 108464 Result: Up-regulated in Transcription
  misc_feature: MA Experiment 108464 PARAMETER Experiment Name: At_Germinating_Seeds_cDNA_P Parameter: Age (day) Value: 4 vs. 0
  misc_feature: MA Experiment 108464 PARAMETER Experiment Name: At_Germinating_Seeds_cDNA_P Parameter: Tissue Value: Germinating Seeds
  misc_feature: MA Experiment ID: 108469 Result: Up-regulated in Transcription
  misc_feature: MA Experiment ID: 108488 Result: Down-regulated in Transcription
  misc_feature: MA Experiment ID: 108574 Result: Up-regulated in Transcription
  misc_feature: MA Experiment 108574 PARAMETER Experiment Name: At_Wounding__cDNA_P Parameter: Timepoint (hr) Value: 1
  misc_feature: MA Experiment 108574 PARAMETER Experiment Name: At_Wounding__cDNA_P Parameter: Tissue Value: Aerial
  misc_feature: MA Experiment 108574 PARAMETER Experiment Name: At_Wounding__cDNA_P Parameter: Treatment Value: Wounding vs. No Wounding
  misc_feature: MA Experiment ID: 108577 Result: Down-regulated in Transcription
  misc_feature: MA Experiment 108577 PARAMETER Experiment Name: At_42deg_Heat_cDNA_P Parameter: Temperature (deg C) Value: 42 vs. 22
  misc_feature: MA Experiment 108577 PARAMETER Experiment Name: At_42deg_Heat_cDNA_P Parameter: Timepoint (hr) Value: 6
  misc_feature: MA Experiment 108577 PARAMETER Experiment Name: At_42deg_Heat_cDNA_P Parameter: Tissue Value: Aerial
  misc_feature: MA Experiment ID: 108579 Result: Up-regulated in Transcription
  misc_feature: MA Experiment 108579 PARAMETER Experiment Name: At_4deg_Cold_cDNA_P Parameter: Temperature (deg C) Value: 4 vs. 22
  misc_feature: MA Experiment 108579 PARAMETER Experiment Name: At_4deg_Cold_cDNA_P Parameter: Timepoint (hr) Value: 6
  misc_feature: MA Experiment 108579 PARAMETER Experiment Name: At_4deg_Cold_cDNA_P Parameter: Tissue Value: Aerial
  misc_feature: MA Experiment ID: 108585 Result: Up-regulated in Transcription
  misc_feature: MA Experiment 108585 PARAMETER Experiment Name: At_5mM_NaNP_cDNA_P Parameter: Timepoint (hr) Value: 6
  misc_feature: MA Experiment 108585 PARAMETER Experiment Name: At_5mM_NaNP_cDNA_P Parameter: Tissue Value: Aerial
  misc_feature: MA Experiment 108585 PARAMETER Experiment Name: At_5mM_NaNP_cDNA_P Parameter: Treatment Value: null
  misc_feature: MA Experiment ID: 108594 Result: Down-regulated in Transcription
  misc_feature: MA Experiment 108594 PARAMETER Experiment Name: At_Ler-rhl_Root_cDNA_P Parameter: Plant Line Value: null
  misc_feature: MA Experiment ID: 108595 Result: Up-regulated in Transcription
  misc_feature: MA Experiment 108595 PARAMETER Experiment Name: At_Ler-pi_Ovule_cDNA_P Parameter: Plant Line Value: null
  misc_feature: MA Experiment ID: 108608 Result: Up-regulated in Transcription
  misc_feature: MA Experiment 108608 PARAMETER Experiment Name: At_100uM_ABA_cDNA_P Parameter: Timepoint (hr) Value: 1
  misc_feature: MA Experiment 108608 PARAMETER Experiment Name: At_100uM_ABA_cDNA_P Parameter: Tissue Value: Aerial
  misc_feature: MA Experiment 108608 PARAMETER Experiment Name: At_100uM_ABA_cDNA_P Parameter: Treatment Value: 100uM ABA vs. No Treatment
  misc_feature: MA Experiment ID: 108667 Result: Up-regulated in Transcription
  misc_feature: MA Experiment 108667 PARAMETER Experiment Name: At_2mM_SA_cDNA_P Parameter: Plant Line Value: WS
  misc_feature: MA Experiment 108667 PARAMETER Experiment Name: At_2mM_SA_cDNA_P Parameter: Timepoint (hr) Value: 1
  misc_feature: MA Experiment 108667 PARAMETER Experiment Name: At_2mM_SA_cDNA_P Parameter: Treatment Value: 2mM SA vs. No Treatment
  misc_feature: MA Experiment ID: 108668 Result: Up-regulated in Transcription
  misc_feature: MA Experiment 108668 PARAMETER Experiment Name: At_2mM_SA_cDNA_P Parameter: Plant Line Value: WS
  misc_feature: MA Experiment 108668 PARAMETER Experiment Name: At_2mM_SA_cDNA_P Parameter: Timepoint (hr) Value: 6
  misc_feature: MA Experiment 108668 PARAMETER Experiment Name: At_2mM_SA_cDNA_P Parameter: Treatment Value: 2mM SA vs. No Treatment
  misc_feature: MA Experiment ID: 20000069 Result: Up-regulated in Transcription
  misc_feature: MA Experiment 20000069 PARAMETER Experiment Name: At_100uM_ABA_Mutants_cDNA_P Parameter: Plant Line Value: CS23
  misc_feature: MA Experiment 20000069 PARAMETER Experiment Name: At_100uM_ABA_Mutants_cDNA_P Parameter: Timepoint (hr) Value: 6
  misc_feature: MA Experiment 20000069 PARAMETER Experiment Name: At_100uM_ABA_Mutants_cDNA_P Parameter: Tissue Value: Aerial
  misc_feature: MA Experiment 20000069 PARAMETER Experiment Name: At_100uM_ABA_Mutants_cDNA_P Parameter: Treatment Value: 100uM ABA vs. No Treatment
  misc_feature: MA Experiment ID: 20000070 Result: Up-regulated in Transcription
  misc_feature: MA Experiment 20000070 PARAMETER Experiment Name: At_100uM_ABA_Mutants_cDNA_P Parameter: Plant Line Value: CS24
  misc_feature: MA Experiment 20000070 PARAMETER Experiment Name: At_100uM_ABA_Mutants_cDNA_P Parameter: Timepoint (hr) Value: 6
  misc_feature: MA Experiment 20000070 PARAMETER Experiment Name: At_100uM_ABA_Mutants_cDNA_P Parameter: Tissue Value: Aerial
  misc_feature: MA Experiment 20000070 PARAMETER Experiment Name: At_100uM_ABA_Mutants_cDNA_P Parameter: Treatment Value: 100uM ABA vs. No Treatment
  misc_feature: MA Experiment ID: 20000071 Result: Up-regulated in Transcription
  misc_feature: MA Experiment 20000071 PARAMETER Experiment Name: At_100uM_ABA_Mutants_cDNA_P Parameter: Plant Line Value: CS8104
  misc_feature: MA Experiment 20000071 PARAMETER Experiment Name: At_100uM_ABA_Mutants_cDNA_P Parameter: Timepoint (hr) Value: 6
  misc_feature: MA Experiment 20000071 PARAMETER Experiment Name: At_100uM_ABA_Mutants_cDNA_P Parameter: Tissue Value: Aerial
  misc_feature: MA Experiment 20000071 PARAMETER Experiment Name: At_100uM_ABA_Mutants_cDNA_P Parameter: Treatment Value: 100uM ABA vs. No Treatment
  misc_feature: MA Experiment ID: 20000086 Result: Up-regulated in Transcription
  misc_feature: MA Experiment 20000086 PARAMETER Experiment Name: At_100uM_ABA_Mutants_cDNA_P Parameter: Plant Line Value: CS22
  misc_feature: MA Experiment 20000086 PARAMETER Experiment Name: At_100uM_ABA_Mutants_cDNA_P Parameter: Timepoint (hr) Value: 6
  misc_feature: MA Experiment 20000086 PARAMETER Experiment Name: At_100uM_ABA_Mutants_cDNA_P Parameter: Tissue Value: Aerial
  misc_feature: MA Experiment 20000086 PARAMETER Experiment Name: At_100uM_ABA_Mutants_cDNA_P Parameter: Treatment Value: 100uM ABA vs. No Treatment
  misc_feature: MA Experiment ID: 20000087 Result: Up-regulated in Transcription
  misc_feature: MA Experiment 20000087 PARAMETER Experiment Name: At_100uM_ABA_Mutants_cDNA_P Parameter: Plant Line Value: WS
  misc_feature: MA Experiment 20000087 PARAMETER Experiment Name: At_100uM_ABA_Mutants_cDNA_P Parameter: Timepoint (hr) Value: 6
  misc_feature: MA Experiment 20000087 PARAMETER Experiment Name: At_100uM_ABA_Mutants_cDNA_P Parameter: Tissue Value: Aerial
  misc_feature: MA Experiment 20000087 PARAMETER Experiment Name: At_100uM_ABA_Mutants_cDNA_P Parameter: Treatment Value: 100uM ABA vs. No Treatment
  misc_feature: MA Experiment ID: 20000088 Result: Up-regulated in Transcription
  misc_feature: MA Experiment 20000088 PARAMETER Experiment Name: At_100uM_ABA_Mutants_cDNA_P Parameter: Plant Line Value: Landsberg
  misc_feature: MA Experiment 20000088 PARAMETER Experiment Name: At_100uM_ABA_Mutants_cDNA_P Parameter: Timepoint (hr) Value: 6
  misc_feature: MA Experiment 20000088 PARAMETER Experiment Name: At_100uM_ABA_Mutants_cDNA_P Parameter: Tissue Value: Aerial
  misc_feature: MA Experiment 20000088 PARAMETER Experiment Name: At_100uM_ABA_Mutants_cDNA_P Parameter: Treatment Value: 100uM ABA vs. No Treatment
  misc_feature: MA Experiment ID: 20000089 Result: Up-regulated in Transcription
  misc_feature: MA Experiment ID: 20000090 Result: Up-regulated in Transcription
  misc_feature: MA Experiment ID: 20000111 Result: Down-regulated in Transcription
  misc_feature: MA Experiment 20000111 PARAMETER Experiment Name: At_42deg_Heat_cDNA_P Parameter: Temperature (deg C) Value: 42 vs. 22
  misc_feature: MA Experiment 20000111 PARAMETER Experiment Name: At_42deg_Heat_cDNA_P Parameter: Timepoint (hr) Value: 6
  misc_feature: MA Experiment 20000111 PARAMETER Experiment Name: At_42deg_Heat_cDNA_P Parameter: Tissue Value: Aerial
  misc_feature: MA Experiment ID: 20000117 Result: Up-regulated in Transcription
  misc_feature: MA Experiment 20000117 PARAMETER Experiment Name: At_100uM_ABA_Mutants_cDNA_P Parameter: Plant Line Value: Columbia
  misc_feature: MA Experiment 20000117 PARAMETER Experiment Name: At_100uM_ABA_Mutants_cDNA_P Parameter: Timepoint (hr) Value: 6
  misc_feature: MA Experiment 20000117 PARAMETER Experiment Name: At_100uM_ABA_Mutants_cDNA_P Parameter: Tissue Value: Aerial
  misc_feature: MA Experiment 20000117 PARAMETER Experiment Name: At_100uM_ABA_Mutants_cDNA_P Parameter: Treatment Value: 100uM ABA vs. No Treatment
  misc_feature: MA Experiment ID: 20000166 Result: Up-regulated in Transcription
  misc_feature: MA Experiment 20000166 PARAMETER Experiment Name: At_100uM_ABA_P Parameter: Age (day) Value: 14
  misc_feature: MA Experiment 20000166 PARAMETER Experiment Name: At_100uM_ABA_P Parameter: Organism Value: A. thaliana
  misc_feature: MA Experiment 20000166 PARAMETER Experiment Name: At_100uM_ABA_P Parameter: Plant Line Value: WS
  misc_feature: MA Experiment 20000166 PARAMETER Experiment Name: At_100uM_ABA_P Parameter: Timepoint (hr) Value: 1
  misc_feature: MA Experiment 20000166 PARAMETER Experiment Name: At_100uM_ABA_P Parameter: Tissue Value: Aerial
  misc_feature: MA Experiment 20000166 PARAMETER Experiment Name: At_100uM_ABA_P Parameter: Treatment Value: 100uM ABA vs. No Treatment
  misc_feature: MA Experiment ID: 20000173 Result: Down-regulated in Transcription
  misc_feature: MA Experiment 20000173 PARAMETER Experiment Name: At_42deg_Heat_P Parameter: Age (day) Value: 14
  misc_feature: MA Experiment 20000173 PARAMETER Experiment Name: At_42deg_Heat_P Parameter: Organism Value: A. thaliana
  misc_feature: MA Experiment 20000173 PARAMETER Experiment Name: At_42deg_Heat_P Parameter: Plant Line Value: WS
  misc_feature: MA Experiment 20000173 PARAMETER Experiment Name: At_42deg_Heat_P Parameter: Temperature (deg C) Value: 42 vs. 22
  misc_feature: MA Experiment 20000173 PARAMETER Experiment Name: At_42deg_Heat_P Parameter: Timepoint (hr) Value: 6
  misc_feature: MA Experiment 20000173 PARAMETER Experiment Name: At_42deg_Heat_P Parameter: Tissue Value: Aerial
  misc_feature: MA Experiment ID: 20000179 Result: Down-regulated in Transcription
  misc_feature: MA Experiment 20000179 PARAMETER Experiment Name: At_Germinating_Seeds_P Parameter: Age (hr) Value: 6 vs. 0
  misc_feature: MA Experiment 20000179 PARAMETER Experiment Name: At_Germinating_Seeds_P Parameter: Tissue Value: Germinating Seeds
  misc_feature: MA Experiment ID: 20000180 Result: Down-regulated in Transcription
  misc_feature: MA Experiment 20000180 PARAMETER Experiment Name: At_Germinating_Seeds_P Parameter: Age (hr) Value: 24 vs. 0
  misc_feature: MA Experiment 20000180 PARAMETER Experiment Name: At_Germinating_Seeds_P Parameter: Tissue Value: Germinating Seeds
  misc_feature: MA Experiment ID: 20000182 Result: Up-regulated in Transcription
  misc_feature: MA Experiment 20000182 PARAMETER Experiment Name: At_2mM_SA_P Parameter: Age (day) Value: 14
  misc_feature: MA Experiment 20000182 PARAMETER Experiment Name: At_2mM_SA_P Parameter: Organism Value: A. thaliana
  misc_feature: MA Experiment 20000182 PARAMETER Experiment Name: At_2mM_SA_P Parameter: Plant Line Value: WS
  misc_feature: MA Experiment 20000182 PARAMETER Experiment Name: At_2mM_SA_P Parameter: Timepoint (hr) Value: 6
  misc_feature: MA Experiment 20000182 PARAMETER Experiment Name: At_2mM_SA_P Parameter: Tissue Value: Aerial
  misc_feature: MA Experiment 20000182 PARAMETER Experiment Name: At_2mM_SA_P Parameter: Treatment Value: 2mM SA vs. No Treatment
  misc_feature: MA Experiment ID: 20000184 Result: Down-regulated in Transcription
  misc_feature: MA Experiment 20000184 PARAMETER Experiment Name: At_Shoots__P Parameter: Age (day) Value: 7
  misc_feature: MA Experiment 20000184 PARAMETER Experiment Name: At_Shoots__P Parameter: Tissue Value: Shoots vs. Whole Plant
  misc_feature: MA Experiment ID: 20000213 Result: Up-regulated in Transcription
  misc_feature: MA Experiment 20000213 PARAMETER Experiment Name: At_4deg_Cold_P Parameter: Timepoint (hr) Value: 2
  misc_feature: MA Experiment ID: 20000214 Result: Up-regulated in Transcription
  misc_feature: MA Experiment 20000214 PARAMETER Experiment Name: At_4deg_Cold_P Parameter: Timepoint (hr) Value: 6
  misc_feature: MA Experiment ID: 20000234 Result: Down-regulated in Transcription
  misc_feature: MA Experiment 20000234 PARAMETER Experiment Name: At_Siliques_P Parameter: Age (day) Value: 21
  misc_feature: MA Experiment 20000234 PARAMETER Experiment Name: At_Siliques_P Parameter: Organism Value: A. thaliana
  misc_feature: MA Experiment 20000234 PARAMETER Experiment Name: At_Siliques_P Parameter: Plant Line Value: WS
  misc_feature: MA Experiment 20000234 PARAMETER Experiment Name: At_Siliques_P Parameter: Tissue Value: Less Than 5mm Siliques vs. Whole Plant
  misc_feature: MA Experiment ID: 20000235 Result: Down-regulated in Transcription
  misc_feature: MA Experiment 20000235 PARAMETER Experiment Name: At_Siliques_P Parameter: Age (day) Value: 21
  misc_feature: MA Experiment 20000235 PARAMETER Experiment Name: At_Siliques_P Parameter: Organism Value: A. thaliana
  misc_feature: MA Experiment 20000235 PARAMETER Experiment Name: At_Siliques_P Parameter: Plant Line Value: WS
  misc_feature: MA Experiment 20000235 PARAMETER Experiment Name: At_Siliques_P Parameter: Tissue Value: 5-10mm Siliques vs. Whole Plant
  misc_feature: MA Experiment ID: 20000265 Result: Down-regulated in Transcription
  misc_feature: MA Experiment 20000265 PARAMETER Experiment Name: At_Open_Flower_P Parameter: Age (day) Value: 21
  misc_feature: MA Experiment 20000265 PARAMETER Experiment Name: At_Open_Flower_P Parameter: Plant Line Value: WS
  misc_feature: MA Experiment 20000265 PARAMETER Experiment Name: At_Open_Flower_P Parameter: Tissue Value: Closed Flower vs. Whole Plant
  misc_feature: MA Experiment ID: 20000286 Result: Down-regulated in Transcription
  misc_feature: MA Experiment 20000286 PARAMETER Experiment Name: At_Open_Flower_P Parameter: Age (day) Value: 21
  misc_feature: MA Experiment 20000286 PARAMETER Experiment Name: At_Open_Flower_P Parameter: Plant Line Value: WS
  misc_feature: MA Experiment 20000286 PARAMETER Experiment Name: At_Open_Flower_P Parameter: Tissue Value: Half Open vs. Whole Plant
  misc_feature: MA Experiment ID: 20000495 Result: Down-regulated in Transcription
  misc_feature: MA Experiment 20000495 PARAMETER Experiment Name: At_Guard_Cells_P Parameter: Harvest Date Value: 8/2/2002
  misc_feature: MA Experiment 20000495 PARAMETER Experiment Name: At_Guard_Cells_P Parameter: Organism Value: A. thaliana
  misc_feature: MA Experiment 20000495 PARAMETER Experiment Name: At_Guard_Cells_P Parameter: Tissue Value: Guard Cells vs. Leaves
  misc_feature: MA Experiment ID: 20000527 Result: Down-regulated in Transcription
  misc_feature: MA Experiment 20000527 PARAMETER Experiment Name: At_10percent_PEG_P Parameter: Age (day) Value: 20
  misc_feature: MA Experiment 20000527 PARAMETER Experiment Name: At_10percent_PEG_P Parameter: Organism Value: A. thaliana
  misc_feature: MA Experiment 20000527 PARAMETER Experiment Name: At_10percent_PEG_P Parameter: Plant Line Value: WS
  misc_feature: MA Experiment 20000527 PARAMETER Experiment Name: At_10percent_PEG_P Parameter: Timepoint (day) Value: 20
  misc_feature: MA Experiment 20000527 PARAMETER Experiment Name: At_10percent_PEG_P Parameter: Tissue Value: Whole Plant
  misc_feature: MA Experiment 20000527 PARAMETER Experiment Name: At_10percent_PEG_P Parameter: Treatment Value: 10percent PEG vs. No Treatment
  misc_feature: MA Experiment ID: 20000709 Result: Up-regulated in Transcription
  misc_feature: MA Experiment 20000709 PARAMETER Experiment Name: At_15mM_NH4NO3_L-to-H_P Parameter: Age (hr) Value: 14
  misc_feature: MA Experiment 20000709 PARAMETER Experiment Name: At_15mM_NH4NO3_L-to-H_P Parameter: Organism Value: A. thaliana
  misc_feature: MA Experiment 20000709 PARAMETER Experiment Name: At_15mM_NH4NO3_L-to-H_P Parameter: Plant Line Value: WS
  misc_feature: MA Experiment 20000709 PARAMETER Experiment Name: At_15mM_NH4NO3_L-to-H_P Parameter: Timepoint (hr) Value: 4
  misc_feature: MA Experiment 20000709 PARAMETER Experiment Name: At_15mM_NH4NO3_L-to-H_P Parameter: Tissue Value: Aerial
  misc_feature: MA Experiment 20000709 PARAMETER Experiment Name: At_15mM_NH4NO3_L-to-H_P Parameter: Treatment Value: 15mM NH4NO3 vs. 30mM Mannitol
  misc_feature: MA Experiment ID: 20001451 Result: Down-regulated in Transcription
  misc_feature: MA Experiment 20001451 PARAMETER Experiment Name: At_Far-red-induction_P Parameter: Age (day) Value: 7
  misc_feature: MA Experiment 20001451 PARAMETER Experiment Name: At_Far-red-induction_P Parameter: Light Value: Far-red vs. White
  misc_feature: MA Experiment 20001451 PARAMETER Experiment Name: At_Far-red-induction_P Parameter: Organism Value: A. thaliana
  misc_feature: MA Experiment 20001451 PARAMETER Experiment Name: At_Far-red-induction_P Parameter: Plant Line Value: Columbia
  misc_feature: MA Experiment 20001451 PARAMETER Experiment Name: At_Far-red-induction_P Parameter: Timepoint (hr) Value: 24
  misc_feature: MA Experiment 20001451 PARAMETER Experiment Name: At_Far-red-induction_P Parameter: Tissue Value: Whole Plant
  misc_feature: MA Experiment ID: 20001557 Result: Up-regulated in Transcription
  misc_feature: MA Experiment 20001557 PARAMETER Experiment Name: At_Drought_Soil_Dry_P Parameter: Age (day) Value: 27
  misc_feature: MA Experiment 20001557 PARAMETER Experiment Name: At_Drought_Soil_Dry_P Parameter: Organism Value: A. thaliana
  misc_feature: MA Experiment 20001557 PARAMETER Experiment Name: At_Drought_Soil_Dry_P Parameter: Plant Line Value: WS
  misc_feature: MA Experiment 20001557 PARAMETER Experiment Name: At_Drought_Soil_Dry_P Parameter: Post Timepoint (hr) Value: 3
  misc_feature: MA Experiment 20001557 PARAMETER Experiment Name: At_Drought_Soil_Dry_P Parameter: Post-Treatment Value: Re-Water vs. No Drought
  misc_feature: MA Experiment 20001557 PARAMETER Experiment Name: At_Drought_Soil_Dry_P Parameter: Timepoint (day) Value: 13
  misc_feature: MA Experiment 20001557 PARAMETER Experiment Name: At_Drought_Soil_Dry_P Parameter: Treatment Value: Drought vs. No Drought
  misc_feature: MA Experiment ID: 20001560 Result: Up-regulated in Transcription
  misc_feature: MA Experiment 20001560 PARAMETER Experiment Name: At_Drought_Soil_Dry_P Parameter: Age (day) Value: 28
  misc_feature: MA Experiment 20001560 PARAMETER Experiment Name: At_Drought_Soil_Dry_P Parameter: Organism Value: A. thaliana
  misc_feature: MA Experiment 20001560 PARAMETER Experiment Name: At_Drought_Soil_Dry_P Parameter: Plant Line Value: WS
  misc_feature: MA Experiment 20001560 PARAMETER Experiment Name: At_Drought_Soil_Dry_P Parameter: Post Timepoint (hr) Value: None
  misc_feature: MA Experiment 20001560 PARAMETER Experiment Name: At_Drought_Soil_Dry_P Parameter: Post-Treatment Value: None
  misc_feature: MA Experiment 20001560 PARAMETER Experiment Name: At_Drought_Soil_Dry_P Parameter: Timepoint (day) Value: 14
  misc_feature: MA Experiment 20001560 PARAMETER Experiment Name: At_Drought_Soil_Dry_P Parameter: Treatment Value: Drought vs. No Drought
  misc_feature: MA Experiment ID: 20001905 Result: Up-regulated in Transcription
  misc_feature: MA Experiment 20001905 PARAMETER Experiment Name: At_Drought_Reproduction_P Parameter: Age (day) Value: 40
  misc_feature: MA Experiment 20001905 PARAMETER Experiment Name: At_Drought_Reproduction_P Parameter: Organism Value: A. thaliana
  misc_feature: MA Experiment 20001905 PARAMETER Experiment Name: At_Drought_Reproduction_P Parameter: Plant Line Value: WS
  misc_feature: MA Experiment 20001905 PARAMETER Experiment Name: At_Drought_Reproduction_P Parameter: Timepoint (day) Value: 10
  misc_feature: MA Experiment 20001905 PARAMETER Experiment Name: At_Drought_Reproduction_P Parameter: Tissue Value: Rosettes
  misc_feature: MA Experiment 20001905 PARAMETER Experiment Name: At_Drought_Reproduction_P Parameter: Treatment Value: Drought vs. No Drought

SEQ ID NO: 31126 - protein, 312 aa, Arabidopsis thaliana; identical to SEQ ID NO: 27536
  peptide (1)..(312): Ceres Seq. ID no. 13491652
  misc_feature (50)..(175): Pfam Name: No apical meristem (NAM) protein Pfam Description: No apical meristem (NAM) protein
  misc_feature (47)..(214): Homolog of NCBI NO: 25458553 NR Description: OsNAC6 protein [imported] - rice
  misc_feature (46)..(208): Homolog of NCBI NO: 21105748 NR Description: nam-like protein 10 [Petunia x hybrida]
  misc_feature (44)..(191): Homolog of NCBI NO: 26452827 NR Description: putative ATAF2 protein [Arabidopsis thaliana]
  misc_feature (47)..(209): Homolog of NCBI NO: 40647397 NR Description: NAC domain protein [Lycopersicon esculentum]
  misc_feature (47)..(209): Homolog of NCBI NO: 21105734 NR Description: nam-like protein 3 [Petunia x hybrida]
  misc_feature (47)..(209): Homolog of NCBI NO: 14485513 NR Description: putative NAC domain protein [Solanum tuberosum]
  misc_feature (44)..(312): Homolog of NCBI NO: 22326685 NR Description: No apical meristem (NAM) protein family
  misc_feature (44)..(312): Homolog of NCBI NO: 10177060 NR Description: contains similarity to NAC-domain
  misc_feature (7)..(312): Homolog of NCBI NO: 23397338 NR Description: unknown protein [Arabidopsis thaliana]
  misc_feature (1)..(312): Homolog of NCBI NO: 30697896 NR Description: No apical meristem (NAM) protein family

SEQ ID NO: 31127 - protein, 269 aa, Arabidopsis thaliana; identical to SEQ ID NO: 27537
  peptide (1)..(269): Ceres Seq. ID no. 13491653
  misc_feature (7)..(132): Pfam Name: No apical meristem (NAM) protein Pfam Description: No apical meristem (NAM) protein
  misc_feature (4)..(171): Homolog of NCBI NO: 25458553 NR Description: OsNAC6 protein [imported] - rice
  misc_feature (3)..(165): Homolog of NCBI NO: 21105748 NR Description: nam-like protein 10 [Petunia x hybrida]
  misc_feature (1)..(148): Homolog of NCBI NO: 26452827 NR Description: putative ATAF2 protein [Arabidopsis thaliana]
  misc_feature (4)..(166): Homolog of NCBI NO: 40647397 NR Description: NAC domain protein [Lycopersicon esculentum]
  misc_feature (4)..(166): Homolog of NCBI NO: 21105734 NR Description: nam-like protein 3 [Petunia x hybrida]
  misc_feature (4)..(166): Homolog of NCBI NO: 14485513 NR Description: putative NAC domain protein [Solanum tuberosum]
  misc_feature (1)..(269): Homolog of NCBI NO: 22326685 NR Description: No apical meristem (NAM) protein family
  misc_feature (1)..(269): Homolog of NCBI NO: 10177060 NR Description: contains similarity to NAC-domain
  misc_feature (1)..(269): Homolog of NCBI NO: 23397338 NR Description: unknown protein [Arabidopsis thaliana]
  misc_feature (1)..(269): Homolog of NCBI NO: 30697896 NR Description: No apical meristem (NAM) protein family

SEQ ID NO: 31128 - protein, 215 aa, Arabidopsis thaliana; identical to SEQ ID NO: 27538
  peptide (1)..(215): Ceres Seq. ID no. 13491654
  misc_feature (1)..(78): Pfam Name: No apical meristem (NAM) protein Pfam Description: No apical meristem (NAM) protein
  misc_feature (1)..(117): Homolog of NCBI NO: 25458553 NR Description: OsNAC6 protein [imported] - rice
  misc_feature (1)..(111): Homolog of NCBI NO: 21105748 NR Description: nam-like protein 10 [Petunia x hybrida]
  misc_feature (1)..(94): Homolog of NCBI NO: 26452827 NR Description: putative ATAF2 protein [Arabidopsis thaliana]
  misc_feature (1)..(112): Homolog of NCBI NO: 40647397 NR Description: NAC domain protein [Lycopersicon esculentum]
  misc_feature (1)..(112): Homolog of NCBI NO: 21105734 NR Description: nam-like protein 3 [Petunia x hybrida]
  misc_feature (1)..(112): Homolog of NCBI NO: 14485513 NR Description: putative NAC domain protein [Solanum tuberosum]
  misc_feature (1)..(215): Homolog of NCBI NO: 22326685 NR Description: No apical meristem (NAM) protein family
  misc_feature (1)..(215): Homolog of NCBI NO: 10177060 NR Description: contains similarity to NAC-domain
  misc_feature (1)..(215): Homolog of NCBI NO: 23397338 NR Description: unknown protein [Arabidopsis thaliana]
  misc_feature (1)..(215): Homolog of NCBI NO: 30697896 NR Description: No apical meristem (NAM) protein family

SEQ ID NO: 31129 - DNA, 1379 bp, Arabidopsis thaliana; identical to SEQ ID NO: 27539
  misc_feature (1)..(1379): Ceres Seq. ID no. 13489931
  misc_feature: MA Experiment ID: 108435 Result: Down-regulated in Transcription
  misc_feature: MA Experiment 108435 PARAMETER Experiment Name: At_stm_Mutants_cDNA_P Parameter: Plant Line Value: wt Landsburg vs stm
  misc_feature: MA Experiment 108435 PARAMETER Experiment Name: At_stm_Mutants_cDNA_P Parameter: Tissue Value: Shoot Apical Meristem Region
  misc_feature: MA Experiment ID: 108461 Result: Down-regulated in Transcription
  misc_feature: MA Experiment 108461 PARAMETER Experiment Name: At_Germinating_Seeds_cDNA_P Parameter: Age (day) Value: 1 vs. 0
  misc_feature: MA Experiment 108461 PARAMETER Experiment Name: At_Germinating_Seeds_cDNA_P Parameter: Tissue Value: Germinating Seeds
  misc_feature: MA Experiment ID: 108462 Result: Up-regulated in Transcription
  misc_feature: MA Experiment 108462 PARAMETER Experiment Name: At_Germinating_Seeds_cDNA_P Parameter: Age (day) Value: 2 vs. 0
  misc_feature: MA Experiment 108462 PARAMETER Experiment Name: At_Germinating_Seeds_cDNA_P Parameter: Tissue Value: Germinating Seeds
  misc_feature: MA Experiment ID: 108463 Result: Up-regulated in Transcription
  misc_feature: MA Experiment 108463 PARAMETER Experiment Name: At_Germinating_Seeds_cDNA_P Parameter: Age (day) Value: 3 vs. 0
  misc_feature: MA Experiment 108463 PARAMETER Experiment Name: At_Germinating_Seeds_cDNA_P Parameter: Tissue Value: Germinating Seeds
  misc_feature: MA Experiment ID: 108464 Result: Up-regulated in Transcription
  misc_feature: MA Experiment 108464 PARAMETER Experiment Name: At_Germinating_Seeds_cDNA_P Parameter: Age (day) Value: 4 vs. 0
  misc_feature: MA Experiment 108464 PARAMETER Experiment Name: At_Germinating_Seeds_cDNA_P Parameter: Tissue Value: Germinating Seeds
  misc_feature: MA Experiment ID: 108569 Result: Up-regulated in Transcription
  misc_feature: MA Experiment 108569 PARAMETER Experiment Name: At_0.001%_MeJA__cDNA_P Parameter: Timepoint (hr) Value: 6
  misc_feature: MA Experiment 108569 PARAMETER Experiment Name: At_0.001%_MeJA__cDNA_P Parameter: Tissue Value: Aerial
  misc_feature: MA Experiment 108569 PARAMETER Experiment Name: At_0.001%_MeJA__cDNA_P Parameter: Treatment Value: 0.001% MeJA vs. No Treatment
  misc_feature: MA Experiment ID: 108572 Result: Up-regulated in Transcription
  misc_feature: MA Experiment 108572 PARAMETER Experiment Name: At_Drought_cDNA_P Parameter: Timepoint (hr) Value: 1
  misc_feature: MA Experiment 108572 PARAMETER Experiment Name: At_Drought_cDNA_P Parameter: Tissue Value: Aerial
  misc_feature: MA Experiment 108572 PARAMETER Experiment Name: At_Drought_cDNA_P Parameter: Treatment Value: Drought vs. No Drought
  misc_feature: MA Experiment ID: 108573 Result: Up-regulated in Transcription
  misc_feature: MA Experiment 108573 PARAMETER Experiment Name: At_Drought_cDNA_P Parameter: Timepoint (hr) Value: 6
  misc_feature: MA Experiment 108573 PARAMETER Experiment Name: At_Drought_cDNA_P Parameter: Tissue Value: Aerial
  misc_feature: MA Experiment 108573 PARAMETER Experiment Name: At_Drought_cDNA_P Parameter: Treatment Value: Drought vs. No Drought
  misc_feature: MA Experiment ID: 108576 Result: Down-regulated in Transcription
  misc_feature: MA Experiment 108576 PARAMETER Experiment Name: At_42deg_Heat_cDNA_P Parameter: Temperature (deg C) Value: 42 vs. 22
  misc_feature: MA Experiment 108576 PARAMETER Experiment Name: At_42deg_Heat_cDNA_P Parameter: Timepoint (hr) Value: 1
  misc_feature: MA Experiment 108576 PARAMETER Experiment Name: At_42deg_Heat_cDNA_P Parameter: Tissue Value: Aerial
  misc_feature: MA Experiment ID: 108595 Result: Down-regulated in Transcription
  misc_feature: MA Experiment 108595 PARAMETER Experiment Name: At_Ler-pi_Ovule_cDNA_P Parameter: Plant Line Value: null
  misc_feature: MA Experiment ID: 20000113 Result: Up-regulated in Transcription
  misc_feature: MA Experiment 20000113 PARAMETER Experiment Name: At_42deg_Heat_cDNA_P Parameter: Temperature (deg C) Value: 42 vs. 22
  misc_feature: MA Experiment 20000113 PARAMETER Experiment Name: At_42deg_Heat_cDNA_P Parameter: Timepoint (hr) Value: 8
  misc_feature: MA Experiment 20000113 PARAMETER Experiment Name: At_42deg_Heat_cDNA_P Parameter: Tissue Value: Aerial
  misc_feature: MA Experiment ID: 20000180 Result: Up-regulated in Transcription
  misc_feature: MA Experiment 20000180 PARAMETER Experiment Name: At_Germinating_Seeds_P Parameter: Age (hr) Value: 24 vs. 0
  misc_feature: MA Experiment 20000180 PARAMETER Experiment Name: At_Germinating_Seeds_P Parameter: Tissue Value: Germinating Seeds
  misc_feature: MA Experiment ID: 20000224 Result: Down-regulated in Transcription
  misc_feature: MA Experiment ID: 20000227 Result: Down-regulated in Transcription
  misc_feature: MA Experiment 20000227 PARAMETER Experiment Name: At_Root-Tips-vs-Tops_P Parameter: Tissue Value: Root Tips vs. Root Tops
  misc_feature: MA Experiment ID: 20000234 Result: Down-regulated in Transcription
  misc_feature: MA Experiment 20000234 PARAMETER Experiment Name: At_Siliques_P Parameter: Age (day) Value: 21
  misc_feature: MA Experiment 20000234 PARAMETER Experiment Name: At_Siliques_P Parameter: Organism Value: A. thaliana
  misc_feature: MA Experiment 20000234 PARAMETER Experiment Name: At_Siliques_P Parameter: Plant Line Value: WS
  misc_feature: MA Experiment 20000234 PARAMETER Experiment Name: At_Siliques_P Parameter: Tissue Value: Less Than 5mm Siliques vs. Whole Plant
  misc_feature: MA Experiment ID: 20000265 Result: Down-regulated in Transcription
  misc_feature: MA Experiment 20000265 PARAMETER Experiment Name: At_Open_Flower_P Parameter: Age (day) Value: 21
  misc_feature: MA Experiment 20000265 PARAMETER Experiment Name: At_Open_Flower_P Parameter: Plant Line Value: WS
  misc_feature: MA Experiment 20000265 PARAMETER Experiment Name: At_Open_Flower_P Parameter: Tissue Value: Closed Flower vs. Whole Plant
  misc_feature: MA Experiment ID: 20000286 Result: Down-regulated in Transcription
  misc_feature: MA Experiment 20000286 PARAMETER Experiment Name: At_Open_Flower_P Parameter: Age (day) Value: 21
  misc_feature: MA Experiment 20000286 PARAMETER Experiment Name: At_Open_Flower_P Parameter: Plant Line Value: WS
  misc_feature: MA Experiment 20000286 PARAMETER Experiment Name: At_Open_Flower_P Parameter: Tissue Value: Half Open vs. Whole Plant
  misc_feature: MA Experiment ID: 20000308 Result: Down-regulated in Transcription
  misc_feature: MA Experiment 20000308 PARAMETER Experiment Name: At_100mM_NaCl__P Parameter: Age (day) Value: 17
  misc_feature: MA Experiment 20000308 PARAMETER Experiment Name: At_100mM_NaCl__P Parameter: Organism Value: A. thaliana
  misc_feature: MA Experiment 20000308 PARAMETER Experiment Name: At_100mM_NaCl__P Parameter: Plant Line Value: WS
  misc_feature: MA Experiment 20000308 PARAMETER Experiment Name: At_100mM_NaCl__P Parameter: Timepoint (hr) Value: 72
  misc_feature: MA Experiment 20000308 PARAMETER Experiment Name: At_100mM_NaCl__P Parameter: Tissue Value: Whole Plant
  misc_feature: MA Experiment 20000308 PARAMETER Experiment Name: At_100mM_NaCl__P Parameter: Treatment Value: 100mM NaCl vs. No Treatment
  misc_feature: MA Experiment ID: 20000439 Result: Down-regulated in Transcription
  misc_feature: MA Experiment 20000439 PARAMETER Experiment Name: At_Roots__P Parameter: Age (day) Value: 14 vs. 21
  misc_feature: MA Experiment 20000439 PARAMETER Experiment Name: At_Roots__P Parameter: Organism Value: A. thaliana
  misc_feature: MA Experiment 20000439 PARAMETER Experiment Name: At_Roots__P Parameter: Tissue Value: Roots vs. Whole Plant
  misc_feature: MA Experiment ID: 20000441 Result: Up-regulated in Transcription
  misc_feature: MA Experiment 20000441 PARAMETER Experiment Name: At_1uM_BR-BRZ__P Parameter: Tissue Value: Shoot Apices
  misc_feature: MA Experiment 20000441 PARAMETER Experiment Name: At_1uM_BR-BRZ__P Parameter: Treatment Value: 1uM BR vs. No Treatment
  misc_feature: MA Experiment ID: 20000443 Result: Up-regulated in Transcription
  misc_feature: MA Experiment 20000443 PARAMETER Experiment Name: At_1uM_BR-BRZ__P Parameter: Tissue Value: Shoot Apices
  misc_feature: MA Experiment 20000443 PARAMETER Experiment Name: At_1uM_BR-BRZ__P Parameter: Treatment Value: 1uM BRZ vs. No Treatment
  misc_feature: MA Experiment ID: 20000578 Result: Down-regulated in Transcription
  misc_feature: MA Experiment 20000578 PARAMETER Experiment Name: At_CS3726__P Parameter: Organism Value: A. thaliana
  misc_feature: MA Experiment 20000578 PARAMETER Experiment Name: At_CS3726__P Parameter: Plant Line Value: CS3726
  misc_feature: MA Experiment 20000578 PARAMETER Experiment Name: At_CS3726__P Parameter: Tissue Value: Whole Plant
  misc_feature: MA Experiment ID: 20001248 Result: Up-regulated in Transcription
  misc_feature: MA Experiment 20001248 PARAMETER Experiment Name: At_Far-red-induction_P Parameter: Age (day) Value: 7
  misc_feature: MA Experiment 20001248 PARAMETER Experiment Name: At_Far-red-induction_P Parameter: Light Value: Far-red vs. White
  misc_feature: MA Experiment 20001248 PARAMETER Experiment Name: At_Far-red-induction_P Parameter: Organism Value: A. thaliana
  misc_feature: MA Experiment 20001248 PARAMETER Experiment Name: At_Far-red-induction_P Parameter: Plant Line Value: Columbia
  misc_feature: MA Experiment 20001248 PARAMETER Experiment Name: At_Far-red-induction_P Parameter: Timepoint (hr) Value: 4
  misc_feature: MA Experiment 20001248 PARAMETER Experiment Name: At_Far-red-induction_P Parameter: Tissue Value: Whole Plant
  misc_feature: MA Experiment ID: 20001450 Result: Up-regulated in Transcription
  misc_feature: MA Experiment 20001450 PARAMETER Experiment Name: At_Far-red-induction_P Parameter: Age (day) Value: 7
  misc_feature: MA Experiment 20001450 PARAMETER Experiment Name: At_Far-red-induction_P Parameter: Light Value: Far-red vs. White
  misc_feature: MA Experiment 20001450 PARAMETER Experiment Name: At_Far-red-induction_P Parameter: Organism Value: A. thaliana
  misc_feature: MA Experiment 20001450 PARAMETER Experiment Name: At_Far-red-induction_P Parameter: Plant Line Value: Columbia
  misc_feature: MA Experiment 20001450 PARAMETER Experiment Name: At_Far-red-induction_P Parameter: Timepoint (hr) Value: 8
  misc_feature: MA Experiment 20001450 PARAMETER Experiment Name: At_Far-red-induction_P Parameter: Tissue Value: Whole Plant
  misc_feature: MA Experiment ID: 20001451 Result: Up-regulated in Transcription
  misc_feature: MA Experiment 20001451 PARAMETER Experiment Name: At_Far-red-induction_P Parameter: Age (day) Value: 7
  misc_feature: MA Experiment 20001451 PARAMETER Experiment Name: At_Far-red-induction_P Parameter: Light Value: Far-red vs. White
  misc_feature: MA Experiment 20001451 PARAMETER Experiment Name: At_Far-red-induction_P Parameter: Organism Value: A. thaliana
  misc_feature: MA Experiment 20001451 PARAMETER Experiment Name: At_Far-red-induction_P Parameter: Plant Line Value: Columbia
  misc_feature: MA Experiment 20001451 PARAMETER Experiment Name: At_Far-red-induction_P Parameter: Timepoint (hr) Value: 24
  misc_feature: MA Experiment 20001451 PARAMETER Experiment Name: At_Far-red-induction_P Parameter: Tissue Value: Whole Plant
  misc_feature: MA Experiment ID: 20001459 Result: Up-regulated in Transcription
  misc_feature: MA Experiment 20001459 PARAMETER Experiment Name: At_50mM_NH4NO3_L-to-H_P Parameter: Age (day) Value: Undefined
  misc_feature: MA Experiment 20001459 PARAMETER Experiment Name: At_50mM_NH4NO3_L-to-H_P Parameter: Organism Value: Undefined
  misc_feature: MA Experiment 20001459 PARAMETER Experiment Name: At_50mM_NH4NO3_L-to-H_P Parameter: Plant Line Value: Undefined
  misc_feature: MA Experiment 20001459 PARAMETER Experiment Name: At_50mM_NH4NO3_L-to-H_P Parameter: Timepoint (hr) Value: 4
  misc_feature: MA Experiment 20001459 PARAMETER Experiment Name: At_50mM_NH4NO3_L-to-H_P Parameter: Tissue Value: Siliques
  misc_feature: MA Experiment 20001459 PARAMETER Experiment Name: At_50mM_NH4NO3_L-to-H_P Parameter: Treatment Value: 50mM NH4NO3 vs. 100mM Manitol
  misc_feature: MA Experiment ID: 20001558 Result: Down-regulated in Transcription
  misc_feature: MA Experiment 20001558 PARAMETER Experiment Name: At_Drought_Soil_Dry_P Parameter: Age (day) Value: 27
  misc_feature: MA Experiment 20001558 PARAMETER Experiment Name: At_Drought_Soil_Dry_P Parameter: Organism Value: A. thaliana
  misc_feature: MA Experiment 20001558 PARAMETER Experiment Name: At_Drought_Soil_Dry_P Parameter: Plant Line Value: WS
  misc_feature: MA Experiment 20001558 PARAMETER Experiment Name: At_Drought_Soil_Dry_P Parameter: Post Timepoint (hr) Value: 6
  misc_feature: MA Experiment 20001558 PARAMETER Experiment Name: At_Drought_Soil_Dry_P Parameter: Post-Treatment Value: Re-Water vs. No Drought
  misc_feature: MA Experiment 20001558 PARAMETER Experiment Name: At_Drought_Soil_Dry_P Parameter: Timepoint (day) Value: 13
  misc_feature: MA Experiment 20001558 PARAMETER Experiment Name: At_Drought_Soil_Dry_P Parameter: Treatment Value: Drought vs. No Drought
  misc_feature: MA Experiment ID: 20001559 Result: Down-regulated in Transcription
  misc_feature: MA Experiment 20001559 PARAMETER Experiment Name: At_Drought_Soil_Dry_P Parameter: Age (day) Value: 28
  misc_feature: MA Experiment 20001559 PARAMETER Experiment Name: At_Drought_Soil_Dry_P Parameter: Organism Value: A. thaliana
  misc_feature: MA Experiment 20001559 PARAMETER Experiment Name: At_Drought_Soil_Dry_P Parameter: Plant Line Value: WS
  misc_feature: MA Experiment 20001559 PARAMETER Experiment Name: At_Drought_Soil_Dry_P Parameter: Post Timepoint (hr) Value: 29
  misc_feature: MA Experiment 20001559 PARAMETER Experiment Name: At_Drought_Soil_Dry_P Parameter: Post-Treatment Value: Re-Water vs. No Drought
  misc_feature: MA Experiment 20001559 PARAMETER Experiment Name: At_Drought_Soil_Dry_P Parameter: Timepoint (day) Value: 14
  misc_feature: MA Experiment 20001559 PARAMETER Experiment Name: At_Drought_Soil_Dry_P Parameter: Treatment Value: Drought vs. No Drought
  misc_feature: MA Experiment ID: 20001560 Result: Down-regulated in Transcription
  misc_feature: MA Experiment 20001560 PARAMETER Experiment Name: At_Drought_Soil_Dry_P Parameter: Age (day) Value: 28
  misc_feature: MA Experiment 20001560 PARAMETER Experiment Name: At_Drought_Soil_Dry_P Parameter: Organism Value: A. thaliana
  misc_feature: MA Experiment 20001560 PARAMETER Experiment Name: At_Drought_Soil_Dry_P Parameter: Plant Line Value: WS
  misc_feature: MA Experiment 20001560 PARAMETER Experiment Name: At_Drought_Soil_Dry_P Parameter: Post Timepoint (hr) Value: None
  misc_feature: MA Experiment 20001560 PARAMETER Experiment Name: At_Drought_Soil_Dry_P Parameter: Post-Treatment Value: None
  misc_feature: MA Experiment 20001560 PARAMETER Experiment Name: At_Drought_Soil_Dry_P Parameter: Timepoint (day) Value: 14
  misc_feature: MA Experiment 20001560 PARAMETER Experiment Name: At_Drought_Soil_Dry_P Parameter: Treatment Value: Drought vs. No Drought
  misc_feature: MA Experiment ID: 20001757 Result: Up-regulated in Transcription
  misc_feature: MA Experiment 20001757 PARAMETER Experiment Name: At_50mM_NH4NO3_L-to-H_P Parameter: Timepoint (hr) Value: 6
  misc_feature: MA Experiment 20001757 PARAMETER Experiment Name: At_50mM_NH4NO3_L-to-H_P Parameter: Tissue Value: Leaf
  misc_feature: MA Experiment 20001757 PARAMETER Experiment Name: At_50mM_NH4NO3_L-to-H_P Parameter: Treatment Value: 50mM NH4NO3 vs 100mM Mannitol
  misc_feature: MA Experiment ID: 20001768 Result: Up-regulated in Transcription
  misc_feature: MA Experiment 20001768 PARAMETER Experiment Name: At_Far-red-enriched-adult_P Parameter: Age (day) Value: 28
  misc_feature: MA Experiment 20001768 PARAMETER Experiment Name: At_Far-red-enriched-adult_P Parameter: Light Value: Far-red enriched vs. White
  misc_feature: MA Experiment 20001768 PARAMETER Experiment Name: At_Far-red-enriched-adult_P Parameter: Organism Value: A. thaliana
  misc_feature: MA Experiment 20001768 PARAMETER Experiment Name: At_Far-red-enriched-adult_P Parameter: Plant Line Value: Columbia
  misc_feature: MA Experiment 20001768 PARAMETER Experiment Name: At_Far-red-enriched-adult_P Parameter: Timepoint (hr) Value: 1
  misc_feature: MA Experiment 20001768 PARAMETER Experiment Name: At_Far-red-enriched-adult_P Parameter: Tissue Value: Aerial
  misc_feature: MA Experiment ID: 20001771 Result: Up-regulated in Transcription
  misc_feature: MA Experiment 20001771 PARAMETER Experiment Name: At_Far-red-enriched-adult_P Parameter: Age (day) Value: 28
  misc_feature: MA Experiment 20001771 PARAMETER Experiment Name: At_Far-red-enriched-adult_P Parameter: Light Value: Far-red enriched vs. White
  misc_feature: MA Experiment 20001771 PARAMETER Experiment Name: At_Far-red-enriched-adult_P Parameter: Organism Value: A. thaliana
  misc_feature: MA Experiment 20001771 PARAMETER Experiment Name: At_Far-red-enriched-adult_P Parameter: Plant Line Value: Columbia
  misc_feature: MA Experiment 20001771 PARAMETER Experiment Name: At_Far-red-enriched-adult_P Parameter: Timepoint (hr) Value: 16
  misc_feature: MA Experiment 20001771 PARAMETER Experiment Name: At_Far-red-enriched-adult_P Parameter: Tissue Value: Aerial
  misc_feature: MA Experiment ID: 20001906 Result: Down-regulated in Transcription
  misc_feature: MA Experiment 20001906 PARAMETER Experiment Name: At_Drought_Reproduction_P Parameter: Age (day) Value: 35
  misc_feature: MA Experiment 20001906 PARAMETER Experiment Name: At_Drought_Reproduction_P Parameter: Organism Value: A. thaliana
  misc_feature: MA Experiment 20001906 PARAMETER Experiment Name: At_Drought_Reproduction_P Parameter: Plant Line Value: WS
  misc_feature: MA Experiment 20001906 PARAMETER Experiment Name: At_Drought_Reproduction_P Parameter: Timepoint (day) Value: 5
  misc_feature: MA Experiment 20001906 PARAMETER Experiment Name: At_Drought_Reproduction_P Parameter: Tissue Value: Siliques
  misc_feature: MA Experiment 20001906 PARAMETER Experiment Name: At_Drought_Reproduction_P Parameter: Treatment Value: Drought vs. No Drought
  misc_feature: MA Experiment ID: 20001907 Result: Down-regulated in Transcription
  misc_feature: MA Experiment 20001907 PARAMETER Experiment Name: At_Drought_Reproduction_P Parameter: Age (day) Value: 37
  misc_feature: MA Experiment 20001907 PARAMETER Experiment Name: At_Drought_Reproduction_P Parameter: Organism Value: A. thaliana
  misc_feature: MA Experiment 20001907 PARAMETER Experiment Name: At_Drought_Reproduction_P Parameter: Plant Line Value: WS
  misc_feature: MA Experiment 20001907 PARAMETER Experiment Name: At_Drought_Reproduction_P Parameter: Timepoint (day) Value: 7
  misc_feature: MA Experiment 20001907 PARAMETER Experiment Name: At_Drought_Reproduction_P Parameter: Tissue Value: Siliques
  misc_feature: MA Experiment 20001907 PARAMETER Experiment Name: At_Drought_Reproduction_P Parameter: Treatment Value: Drought vs. No Drought
  misc_feature: MA Experiment ID: 20001908 Result: Down-regulated in Transcription
  misc_feature: MA Experiment 20001908 PARAMETER Experiment Name: At_Drought_Reproduction_P Parameter: Age (day) Value: 40
  misc_feature: MA Experiment 20001908 PARAMETER Experiment Name: At_Drought_Reproduction_P Parameter: Organism Value: A. thaliana
  misc_feature: MA Experiment 20001908 PARAMETER Experiment Name: At_Drought_Reproduction_P Parameter: Plant Line Value: WS
  misc_feature: MA Experiment 20001908 PARAMETER Experiment Name: At_Drought_Reproduction_P Parameter: Timepoint (day) Value: 10
  misc_feature: MA Experiment 20001908 PARAMETER Experiment Name: At_Drought_Reproduction_P Parameter: Tissue Value: Siliques
  misc_feature: MA Experiment 20001908 PARAMETER Experiment Name: At_Drought_Reproduction_P Parameter: Treatment Value: Drought vs. No Drought

SEQ ID NO: 31130 - protein, 355 aa, Arabidopsis thaliana; identical to SEQ ID NO: 27540
  peptide (1)..(355): Ceres Seq. ID no. 13489932
  misc_feature (56)..(103): Pfam Name: B-box zinc finger Pfam Description: B-box zinc finger
  misc_feature (18)..(178): Homolog of NCBI NO: 7488604 NR Description: CONSTANS protein homolog COL1 - radish
  misc_feature (17)..(173): Homolog of NCBI NO: 21553854 NR Description: zinc finger protein constans-like 8 [Arabidopsis
  misc_feature (17)..(173): Homolog of NCBI NO: 15224620 NR Description: CONSTANS B-box zinc finger family protein
  misc_feature (184)..(355): Homolog of NCBI NO: 21553854 NR Description: zinc finger protein constans-like 8 [Arabidopsis
  misc_feature (184)..(355): Homolog of NCBI NO: 15224620 NR Description: CONSTANS B-box zinc finger family protein
  misc_feature (18)..(355): Homolog of NCBI NO: 4091804 NR Description: CONSTANS-like protein 1 [Malus x domestica]
  misc_feature (18)..(355): Homolog of NCBI NO: 4091806 NR Description: CONSTANS-like protein 2 [Malus x domestica]
  misc_feature (1)..(355): Homolog of NCBI NO: 17433047 NR Description: Zinc finger protein constans-like 15
  misc_feature (1)..(355): Homolog of NCBI NO: 21594050 NR Description: CONSTANS-like B-box zinc finger protein-like
  misc_feature (1)..(355): Homolog of NCBI NO: 18424009 NR Description: CONSTANS B-box zinc finger family protein

SEQ ID NO: 31131 - protein, 216 aa, Arabidopsis thaliana; identical to SEQ ID NO: 27541
  peptide (1)..(216): Ceres Seq. ID no. 13489933
  misc_feature (151)..(190): Pfam Name: CCT motif Pfam Description: CCT motif
  misc_feature (1)..(39): Homolog of NCBI NO: 7488604 NR Description: CONSTANS protein homolog COL1 - radish
  misc_feature (1)..(34): Homolog of NCBI NO: 21553854 NR Description: zinc finger protein constans-like 8 [Arabidopsis
  misc_feature (1)..(34): Homolog of NCBI NO: 15224620 NR Description: CONSTANS B-box zinc finger family protein
  misc_feature (45)..(216): Homolog of NCBI NO: 21553854 NR Description: zinc finger protein constans-like 8 [Arabidopsis
  misc_feature (45)..(216): Homolog of NCBI NO: 15224620 NR Description: CONSTANS B-box zinc finger family protein
  misc_feature (1)..(216): Homolog of NCBI NO: 4091804 NR Description: CONSTANS-like protein 1 [Malus x domestica]
  misc_feature (1)..(216): Homolog of NCBI NO: 4091806 NR Description: CONSTANS-like protein 2 [Malus x domestica]
  misc_feature (1)..(216): Homolog of NCBI NO: 17433047 NR Description: Zinc finger protein constans-like 15
  misc_feature (1)..(216): Homolog of NCBI NO: 21594050 NR Description: CONSTANS-like B-box zinc finger protein-like
  misc_feature (1)..(216): Homolog of NCBI NO: 18424009 NR Description: CONSTANS B-box zinc finger family protein

SEQ ID NO: 31132 - protein, 188 aa, Arabidopsis thaliana; identical to SEQ ID NO: 27542
  peptide (1)..(188): Ceres Seq. ID no. 13489934
  misc_feature (123)..(162): Pfam Name: CCT motif Pfam Description: CCT motif
  misc_feature (1)..(188): Homolog of NCBI NO: 18424009 NR Description: CONSTANS B-box zinc finger family protein
  misc_feature (4)..(188): Homolog of NCBI NO: 4557093 NR Description: zinc finger protein [Pinus radiata]
  misc_feature (28)..(188): Homolog of NCBI NO: 7488604 NR Description: CONSTANS protein homolog COL1 - radish
  misc_feature (1)..(11): Homolog of NCBI NO: 7488604 NR Description: CONSTANS protein homolog COL1 - radish
  misc_feature (17)..(188): Homolog of NCBI NO: 21553854 NR Description: zinc finger protein constans-like 8 [Arabidopsis
  misc_feature (17)..(188): Homolog of NCBI NO: 15224620 NR Description: CONSTANS B-box zinc finger family protein
  misc_feature (1)..(188): Homolog of NCBI NO: 4091804 NR Description: CONSTANS-like protein 1 [Malus x domestica]
  misc_feature (1)..(188): Homolog of NCBI NO: 4091806 NR Description: CONSTANS-like protein 2 [Malus x domestica]
  misc_feature (1)..(188): Homolog of NCBI NO: 17433047 NR Description: Zinc finger protein constans-like 15
  misc_feature (1)..(188): Homolog of NCBI NO: 21594050 NR Description: CONSTANS-like B-box zinc finger protein-like

SEQ ID NO: 31133 - DNA, 1145 bp, Arabidopsis thaliana; identical to SEQ ID NO: 27543
  misc_feature (1)..(1145): Ceres Seq. ID no. 12340318
  misc_feature: MA Experiment ID: 108433 Result: Down-regulated in Transcription
  misc_feature: MA Experiment 108433 PARAMETER Experiment Name: At_rhl_Mutant2_cDNA_P Parameter: Age (day) Value: 7
  misc_feature: MA Experiment 108433 PARAMETER Experiment Name: At_rhl_Mutant2_cDNA_P Parameter: Organism Value: A. thaliana
  misc_feature: MA Experiment 108433 PARAMETER Experiment Name: At_rhl_Mutant2_cDNA_P Parameter: Plant Line Value: rhl Mutant vs. wt landsburg
  misc_feature: MA Experiment 108433 PARAMETER Experiment Name: At_rhl_Mutant2_cDNA_P Parameter: Tissue Value: Roots
  misc_feature: MA Experiment ID: 108434 Result: Down-regulated in Transcription
  misc_feature: MA Experiment 108434 PARAMETER Experiment Name: At_Root_Tips_cDNA_P Parameter: Tissue Value: Root Tips
  misc_feature: MA Experiment ID: 108473 Result: Down-regulated in Transcription
  misc_feature: MA Experiment 108473 PARAMETER Experiment Name: At_Drought_Flowers_cDNA_P Parameter: Timepoint (hr) Value: 7 d
  misc_feature: MA Experiment 108473 PARAMETER Experiment Name: At_Drought_Flowers_cDNA_P Parameter: Tissue Value: Flower
  misc_feature: MA Experiment 108473 PARAMETER Experiment Name: At_Drought_Flowers_cDNA_P Parameter: Treatment Value: Drought vs. No Drought
  misc_feature: MA Experiment ID: 108488 Result: Down-regulated in Transcription
  misc_feature: MA Experiment ID: 108572 Result: Down-regulated in Transcription
  misc_feature: MA Experiment 108572 PARAMETER Experiment Name: At_Drought_cDNA_P Parameter: Timepoint (hr) Value: 1
  misc_feature: MA Experiment 108572 PARAMETER Experiment Name: At_Drought_cDNA_P Parameter: Tissue Value: Aerial
  misc_feature: MA Experiment 108572 PARAMETER Experiment Name: At_Drought_cDNA_P Parameter: Treatment Value: Drought vs. No Drought
  misc_feature: MA Experiment ID: 108577 Result: Down-regulated in Transcription
  misc_feature: MA Experiment 108577 PARAMETER Experiment Name: At_42deg_Heat_cDNA_P Parameter: Temperature (deg C) Value: 42 vs. 22
  misc_feature: MA Experiment 108577 PARAMETER Experiment Name: At_42deg_Heat_cDNA_P Parameter: Timepoint (hr) Value: 6
  misc_feature: MA Experiment 108577 PARAMETER Experiment Name: At_42deg_Heat_cDNA_P Parameter: Tissue Value: Aerial
  misc_feature: MA Experiment ID: 108594 Result: Up-regulated in Transcription
  misc_feature: MA Experiment 108594 PARAMETER Experiment Name: At_Ler-rhl_Root_cDNA_P Parameter: Plant Line Value: null
  misc_feature: MA Experiment ID: 108595 Result: Up-regulated in Transcription
  misc_feature: MA Experiment 108595 PARAMETER Experiment Name: At_Ler-pi_Ovule_cDNA_P Parameter: Plant Line Value: null
  misc_feature: MA Experiment ID: 108667 Result: Up-regulated in Transcription
  misc_feature: MA Experiment 108667 PARAMETER Experiment Name: At_2mM_SA_cDNA_P Parameter: Plant Line Value: WS
  misc_feature: MA Experiment 108667 PARAMETER Experiment Name: At_2mM_SA_cDNA_P Parameter: Timepoint (hr) Value: 1
  misc_feature: MA Experiment 108667 PARAMETER Experiment Name: At_2mM_SA_cDNA_P Parameter: Treatment Value: 2mM SA vs. No Treatment
  misc_feature: MA Experiment ID: 108668 Result: Down-regulated in Transcription
  misc_feature: MA Experiment 108668 PARAMETER Experiment Name: At_2mM_SA_cDNA_P Parameter: Plant Line Value: WS
  misc_feature: MA Experiment 108668 PARAMETER Experiment Name: At_2mM_SA_cDNA_P Parameter: Timepoint (hr) Value: 6
  misc_feature: MA Experiment 108668 PARAMETER Experiment Name: At_2mM_SA_cDNA_P Parameter: Treatment Value: 2mM SA vs. No Treatment
  misc_feature: MA Experiment ID: 20000068 Result: Down-regulated in Transcription
  misc_feature: MA Experiment ID: 20000069 Result: Down-regulated in Transcription
  misc_feature: MA Experiment 20000069 PARAMETER Experiment Name: At_100uM_ABA_Mutants_cDNA_P Parameter: Plant Line Value: CS23
  misc_feature: MA Experiment 20000069 PARAMETER Experiment Name: At_100uM_ABA_Mutants_cDNA_P Parameter: Timepoint (hr) Value: 6
  misc_feature: MA Experiment 20000069 PARAMETER Experiment Name: At_100uM_ABA_Mutants_cDNA_P Parameter: Tissue Value: Aerial
  misc_feature: MA Experiment 20000069 PARAMETER Experiment Name: At_100uM_ABA_Mutants_cDNA_P Parameter: Treatment Value: 100uM ABA vs. No Treatment
  misc_feature: MA Experiment ID: 20000089 Result: Down-regulated in Transcription
  misc_feature: MA Experiment ID: 20000090 Result: Down-regulated in Transcription
  misc_feature: MA Experiment ID: 20000113 Result: Up-regulated in Transcription
  misc_feature: MA Experiment 20000113 PARAMETER Experiment Name: At_42deg_Heat_cDNA_P Parameter: Temperature (deg C) Value: 42 vs. 22
  misc_feature: MA Experiment 20000113 PARAMETER Experiment Name: At_42deg_Heat_cDNA_P Parameter: Timepoint (hr) Value: 8
  misc_feature: MA Experiment 20000113 PARAMETER Experiment Name: At_42deg_Heat_cDNA_P Parameter: Tissue Value: Aerial
  misc_feature: MA Experiment ID: 20000180 Result: Down-regulated in Transcription
  misc_feature: MA Experiment 20000180 PARAMETER Experiment Name: At_Germinating_Seeds_P Parameter: Age (hr) Value: 24 vs. 0
  misc_feature: MA Experiment 20000180 PARAMETER Experiment Name: At_Germinating_Seeds_P Parameter: Tissue Value: Germinating Seeds
  misc_feature: MA Experiment ID: 20000224 Result: Down-regulated in Transcription
  misc_feature: MA Experiment ID: 20000268 Result: Down-regulated in Transcription
  misc_feature: MA Experiment 20000268 PARAMETER Experiment Name: At_100mM_NaCl__P Parameter: Age (day) Value: 14
  misc_feature: MA Experiment 20000268 PARAMETER Experiment Name: At_100mM_NaCl__P Parameter: Organism Value: A. thaliana
  misc_feature: MA Experiment 20000268 PARAMETER Experiment Name: At_100mM_NaCl__P Parameter: Plant Line Value: WS
  misc_feature: MA Experiment 20000268 PARAMETER Experiment Name: At_100mM_NaCl__P Parameter: Timepoint (hr) Value: 6
  misc_feature: MA Experiment 20000268 PARAMETER Experiment Name: At_100mM_NaCl__P Parameter: Tissue Value: Whole Plant
  misc_feature: MA Experiment 20000268 PARAMETER Experiment Name: At_100mM_NaCl__P Parameter: Treatment Value: 100mM NaCl vs. No Treatment
  misc_feature: MA Experiment ID: 20000308 Result: Down-regulated in Transcription
  misc_feature: MA Experiment 20000308 PARAMETER Experiment Name: At_100mM_NaCl__P Parameter: Age (day) Value: 17
  misc_feature: MA Experiment 20000308 PARAMETER Experiment Name: At_100mM_NaCl__P Parameter: Organism Value: A. thaliana
  misc_feature: MA Experiment 20000308 PARAMETER Experiment Name: At_100mM_NaCl__P Parameter: Plant Line Value: WS
  misc_feature: MA Experiment 20000308 PARAMETER Experiment Name: At_100mM_NaCl__P Parameter: Timepoint (hr) Value: 72
  misc_feature: MA Experiment 20000308 PARAMETER Experiment Name: At_100mM_NaCl__P Parameter: Tissue Value: Whole Plant
  misc_feature: MA Experiment 20000308 PARAMETER Experiment Name: At_100mM_NaCl__P Parameter: Treatment Value: 100mM NaCl vs. No Treatment
  misc_feature: MA Experiment ID: 20000437 Result: Down-regulated in Transcription
  misc_feature: MA Experiment 20000437 PARAMETER Experiment Name: At_Drought_P Parameter: Age (day) Value: 8
  misc_feature: MA Experiment 20000437 PARAMETER Experiment Name: At_Drought_P Parameter: Organism Value: A. thaliana
  misc_feature: MA Experiment 20000437 PARAMETER Experiment Name: At_Drought_P Parameter: Plant Line Value: WS
  misc_feature: MA Experiment 20000437 PARAMETER Experiment Name: At_Drought_P Parameter: Timepoint (hr) Value: 24
  misc_feature: MA Experiment 20000437 PARAMETER Experiment Name: At_Drought_P Parameter: Tissue Value: Whole Plant
  misc_feature: MA Experiment 20000437 PARAMETER Experiment Name: At_Drought_P Parameter: Treatment Value: Drought vs. No Drought
  misc_feature: MA Experiment ID: 20000439 Result: Down-regulated in Transcription
  misc_feature: MA Experiment 20000439 PARAMETER Experiment Name: At_Roots__P Parameter: Age (day) Value: 14 vs. 21
  misc_feature: MA Experiment 20000439 PARAMETER Experiment Name: At_Roots__P Parameter: Organism Value: A. thaliana
  misc_feature: MA Experiment 20000439 PARAMETER Experiment Name: At_Roots__P Parameter: Tissue Value: Roots vs. Whole Plant
  misc_feature: MA Experiment ID: 20000441 Result: Up-regulated in Transcription
  misc_feature: MA Experiment 20000441 PARAMETER Experiment Name: At_1uM_BR-BRZ__P Parameter: Tissue Value: Shoot Apices
  misc_feature: MA Experiment 20000441 PARAMETER Experiment Name: At_1uM_BR-BRZ__P Parameter: Treatment Value: 1uM BR vs. No Treatment
  misc_feature: MA Experiment ID: 20000443 Result: Up-regulated in Transcription
  misc_feature: MA Experiment 20000443 PARAMETER Experiment Name: At_1uM_BR-BRZ__P Parameter: Tissue Value: Shoot Apices
  misc_feature: MA Experiment 20000443 PARAMETER Experiment Name: At_1uM_BR-BRZ__P Parameter: Treatment Value: 1uM BRZ vs. No Treatment
  misc_feature: MA Experiment ID: 20000452 Result: Down-regulated in Transcription
  misc_feature: MA Experiment 20000452 PARAMETER Experiment Name: At_CS6879_Shoots-Roots_P Parameter: Age (day) Value: 14
  misc_feature: MA Experiment 20000452 PARAMETER Experiment Name: At_CS6879_Shoots-Roots_P Parameter: Organism Value: A. thaliana
  misc_feature: MA Experiment 20000452 PARAMETER Experiment Name: At_CS6879_Shoots-Roots_P Parameter: Plant Line Value: CS6879 vs. WS
  misc_feature: MA Experiment 20000452 PARAMETER Experiment Name: At_CS6879_Shoots-Roots_P Parameter: Tissue Value: Shoots
  misc_feature: MA Experiment ID: 20000460 Result: Up-regulated in Transcription
  misc_feature: MA Experiment 20000460 PARAMETER Experiment Name: At_10percent_PEG_P Parameter: Age (day) Value: 12
  misc_feature: MA Experiment 20000460 PARAMETER Experiment Name: At_10percent_PEG_P Parameter: Organism Value: A. thaliana
  misc_feature: MA Experiment 20000460 PARAMETER Experiment Name: At_10percent_PEG_P Parameter: Plant Line Value: WS
  misc_feature: MA Experiment 20000460 PARAMETER Experiment Name: At_10percent_PEG_P Parameter: Timepoint (day) Value: 12
  misc_feature: MA Experiment 20000460 PARAMETER Experiment Name: At_10percent_PEG_P Parameter: Tissue Value: Whole Plant
  misc_feature: MA Experiment 20000460 PARAMETER Experiment Name: At_10percent_PEG_P Parameter: Treatment Value: 10percent PEG vs. No Treatment
  misc_feature: MA Experiment ID: 20000527 Result: Up-regulated in Transcription
  misc_feature: MA Experiment 20000527 PARAMETER Experiment Name: At_10percent_PEG_P Parameter: Age (day) Value: 20
  misc_feature: MA Experiment 20000527 PARAMETER Experiment Name: At_10percent_PEG_P Parameter: Organism Value: A. thaliana
  misc_feature: MA Experiment 20000527 PARAMETER Experiment Name: At_10percent_PEG_P Parameter: Plant Line Value: WS
  misc_feature: MA Experiment 20000527 PARAMETER Experiment Name: At_10percent_PEG_P Parameter: Timepoint (day) Value: 20
  misc_feature: MA Experiment 20000527 PARAMETER Experiment Name: At_10percent_PEG_P Parameter: Tissue Value: Whole Plant
  misc_feature: MA Experiment 20000527 PARAMETER Experiment Name: At_10percent_PEG_P Parameter: Treatment Value: 10percent PEG vs. No Treatment
  misc_feature: MA Experiment ID: 20000606 Result: Up-regulated in Transcription
  misc_feature: MA Experiment 20000606 PARAMETER Experiment Name: At_CS8548_Mutant_P Parameter: Age (day) Value: 14
  misc_feature: MA Experiment 20000606 PARAMETER Experiment Name: At_CS8548_Mutant_P Parameter: Plant Line Value: CS8548 vs. wt
  misc_feature: MA Experiment 20000606 PARAMETER Experiment Name: At_CS8548_Mutant_P Parameter: Tissue Value: Whole Plant
  misc_feature: MA Experiment ID: 20000794 Result: Down-regulated in Transcription
  misc_feature: MA Experiment 20000794 PARAMETER Experiment Name: At_Petals_P Parameter: Age (day) Value: 23-25 days
  misc_feature: MA Experiment 20000794 PARAMETER Experiment Name: At_Petals_P Parameter: Plant Line Value: WS
  misc_feature: MA Experiment 20000794 PARAMETER Experiment Name: At_Petals_P Parameter: Tissue Value: Petals vs. Whole plant
  misc_feature: MA Experiment ID: 20001247 Result: Up-regulated in Transcription
  misc_feature: MA Experiment 20001247 PARAMETER Experiment Name: At_Far-red-induction_P Parameter: Age (day) Value: 7
  misc_feature: MA Experiment 20001247 PARAMETER Experiment Name: At_Far-red-induction_P Parameter: Light Value: Far-red vs. White
  misc_feature: MA Experiment 20001247 PARAMETER Experiment Name: At_Far-red-induction_P Parameter: Organism Value: A. thaliana
  misc_feature: MA Experiment 20001247 PARAMETER Experiment Name: At_Far-red-induction_P Parameter: Plant Line Value: Columbia
  misc_feature: MA Experiment 20001247 PARAMETER Experiment Name: At_Far-red-induction_P Parameter: Timepoint (hr) Value: 1
  misc_feature: MA Experiment 20001247 PARAMETER Experiment Name: At_Far-red-induction_P Parameter: Tissue Value: Whole Plant
  misc_feature: MA Experiment ID: 20001450 Result: Up-regulated in Transcription
  misc_feature: MA Experiment 20001450 PARAMETER Experiment Name: At_Far-red-induction_P Parameter: Age (day) Value: 7
  misc_feature: MA Experiment 20001450 PARAMETER Experiment Name: At_Far-red-induction_P Parameter: Light Value: Far-red vs. White
  misc_feature: MA Experiment 20001450 PARAMETER Experiment Name: At_Far-red-induction_P Parameter: Organism Value: A. thaliana
  misc_feature: MA Experiment 20001450 PARAMETER Experiment Name: At_Far-red-induction_P Parameter: Plant Line Value: Columbia
  misc_feature: MA Experiment 20001450 PARAMETER Experiment Name: At_Far-red-induction_P Parameter: Timepoint (hr) Value: 8
  misc_feature: MA Experiment 20001450 PARAMETER Experiment Name: At_Far-red-induction_P Parameter: Tissue Value: Whole Plant
  misc_feature: MA Experiment ID: 20001555 Result: Down-regulated in Transcription
  misc_feature: MA Experiment 20001555 PARAMETER Experiment Name: At_Drought_Soil_Dry_P Parameter: Age (day) Value: 24
  misc_feature: MA Experiment 20001555 PARAMETER Experiment Name: At_Drought_Soil_Dry_P Parameter: Organism Value: A. thaliana
  misc_feature: MA Experiment 20001555 PARAMETER Experiment Name: At_Drought_Soil_Dry_P Parameter: Plant Line Value: WS
  misc_feature: MA Experiment 20001555 PARAMETER Experiment Name: At_Drought_Soil_Dry_P Parameter: Post Timepoint (hr) Value: None
  misc_feature: MA Experiment 20001555 PARAMETER Experiment Name: At_Drought_Soil_Dry_P Parameter: Post-Treatment Value: None
  misc_feature: MA Experiment 20001555 PARAMETER Experiment Name: At_Drought_Soil_Dry_P Parameter: Timepoint (day) Value: 10
  misc_feature: MA Experiment 20001555 PARAMETER Experiment Name: At_Drought_Soil_Dry_P Parameter: Treatment Value: Drought vs. No Drought
  misc_feature: MA Experiment ID: 20001556 Result: Down-regulated in Transcription
  misc_feature: MA Experiment 20001556 PARAMETER Experiment Name: At_Drought_Soil_Dry_P Parameter: Age (day) Value: 26
  misc_feature: MA Experiment 20001556 PARAMETER Experiment Name: At_Drought_Soil_Dry_P Parameter: Organism Value: A. thaliana
  misc_feature: MA Experiment 20001556 PARAMETER Experiment Name: At_Drought_Soil_Dry_P Parameter: Plant Line Value: WS
  misc_feature: MA Experiment 20001556 PARAMETER Experiment Name: At_Drought_Soil_Dry_P Parameter: Post Timepoint (hr) Value: None
  misc_feature: MA Experiment 20001556 PARAMETER Experiment Name: At_Drought_Soil_Dry_P Parameter: Post-Treatment Value: None
  misc_feature: MA Experiment 20001556 PARAMETER Experiment Name: At_Drought_Soil_Dry_P Parameter: Timepoint (day) Value: 12
  misc_feature: MA Experiment 20001556 PARAMETER Experiment Name: At_Drought_Soil_Dry_P Parameter: Treatment Value: Drought vs. No Drought
  misc_feature: MA Experiment ID: 20001557 Result: Up-regulated in Transcription
  misc_feature: MA Experiment 20001557 PARAMETER Experiment Name: At_Drought_Soil_Dry_P Parameter: Age (day) Value: 27
  misc_feature: MA Experiment 20001557 PARAMETER Experiment Name: At_Drought_Soil_Dry_P Parameter: Organism Value: A. thaliana
  misc_feature: MA Experiment 20001557 PARAMETER Experiment Name: At_Drought_Soil_Dry_P Parameter: Plant Line Value: WS
  misc_feature: MA Experiment 20001557 PARAMETER Experiment Name: At_Drought_Soil_Dry_P Parameter: Post Timepoint (hr) Value: 3
  misc_feature: MA Experiment 20001557 PARAMETER Experiment Name: At_Drought_Soil_Dry_P Parameter: Post-Treatment Value: Re-Water vs. No Drought
  misc_feature: MA Experiment 20001557 PARAMETER Experiment Name: At_Drought_Soil_Dry_P Parameter: Timepoint (day) Value: 13
  misc_feature: MA Experiment 20001557 PARAMETER Experiment Name: At_Drought_Soil_Dry_P Parameter: Treatment Value: Drought vs. No Drought
  misc_feature: MA Experiment ID: 20001558 Result: Up-regulated in Transcription
  misc_feature: MA Experiment 20001558 PARAMETER Experiment Name: At_Drought_Soil_Dry_P Parameter: Age (day) Value: 27
  misc_feature: MA Experiment 20001558 PARAMETER Experiment Name: At_Drought_Soil_Dry_P Parameter: Organism Value: A. thaliana
  misc_feature: MA Experiment 20001558 PARAMETER Experiment Name: At_Drought_Soil_Dry_P Parameter: Plant Line Value: WS
  misc_feature: MA Experiment 20001558 PARAMETER Experiment Name: At_Drought_Soil_Dry_P Parameter: Post Timepoint (hr) Value: 6
  misc_feature: MA Experiment 20001558 PARAMETER Experiment Name: At_Drought_Soil_Dry_P Parameter: Post-Treatment Value: Re-Water vs. No Drought
  misc_feature: MA Experiment 20001558 PARAMETER Experiment Name: At_Drought_Soil_Dry_P Parameter: Timepoint (day) Value: 13
  misc_feature: MA Experiment 20001558 PARAMETER Experiment Name: At_Drought_Soil_Dry_P Parameter: Treatment Value: Drought vs. No Drought
  misc_feature: MA Experiment ID: 20001560 Result: Up-regulated in Transcription
  misc_feature: MA Experiment 20001560 PARAMETER Experiment Name: At_Drought_Soil_Dry_P Parameter: Age (day) Value: 28
  misc_feature: MA Experiment 20001560 PARAMETER Experiment Name: At_Drought_Soil_Dry_P Parameter: Organism Value: A. thaliana
  misc_feature: MA Experiment 20001560 PARAMETER Experiment Name: At_Drought_Soil_Dry_P Parameter: Plant Line Value: WS
  misc_feature: MA Experiment 20001560 PARAMETER Experiment Name: At_Drought_Soil_Dry_P Parameter: Post Timepoint (hr) Value: None
  misc_feature: MA Experiment 20001560 PARAMETER Experiment Name: At_Drought_Soil_Dry_P Parameter: Post-Treatment Value: None
  misc_feature: MA Experiment 20001560 PARAMETER Experiment Name: At_Drought_Soil_Dry_P Parameter: Timepoint (day) Value: 14
  misc_feature: MA Experiment 20001560 PARAMETER Experiment Name: At_Drought_Soil_Dry_P Parameter: Treatment Value: Drought vs. No Drought
  misc_feature: MA Experiment ID: 20001904 Result: Down-regulated in Transcription
  misc_feature: MA Experiment 20001904 PARAMETER Experiment Name: At_Drought_Reproduction_P Parameter: Age (day) Value: 37
  misc_feature: MA Experiment 20001904 PARAMETER Experiment Name: At_Drought_Reproduction_P Parameter: Organism Value: A. thaliana
  misc_feature: MA Experiment 20001904 PARAMETER Experiment Name: At_Drought_Reproduction_P Parameter: Plant Line Value: WS
  misc_feature: MA Experiment 20001904 PARAMETER Experiment Name: At_Drought_Reproduction_P Parameter: Timepoint (day) Value: 7
  misc_feature: MA Experiment 20001904 PARAMETER Experiment Name: At_Drought_Reproduction_P Parameter: Tissue Value: Rosettes
  misc_feature: MA Experiment 20001904 PARAMETER Experiment Name: At_Drought_Reproduction_P Parameter: Treatment Value: Drought vs. No Drought
  misc_feature: MA Experiment ID: 20001906 Result: Down-regulated in Transcription
  misc_feature: MA Experiment 20001906 PARAMETER Experiment Name: At_Drought_Reproduction_P Parameter: Age (day) Value: 35
  misc_feature: MA Experiment 20001906 PARAMETER Experiment Name: At_Drought_Reproduction_P Parameter: Organism Value: A. thaliana
  misc_feature: MA Experiment 20001906 PARAMETER Experiment Name: At_Drought_Reproduction_P Parameter: Plant Line Value: WS
  misc_feature: MA Experiment 20001906 PARAMETER Experiment Name: At_Drought_Reproduction_P Parameter: Timepoint (day) Value: 5
  misc_feature: MA Experiment 20001906 PARAMETER Experiment Name: At_Drought_Reproduction_P Parameter: Tissue Value: Siliques
  misc_feature: MA Experiment 20001906 PARAMETER Experiment Name: At_Drought_Reproduction_P Parameter: Treatment Value: Drought vs. No Drought
  misc_feature: MA Experiment ID: 20001907 Result: Down-regulated in Transcription
  misc_feature: MA Experiment 20001907 PARAMETER Experiment Name: At_Drought_Reproduction_P Parameter: Age (day) Value: 37
  misc_feature: MA Experiment 20001907 PARAMETER Experiment Name: At_Drought_Reproduction_P Parameter: Organism Value: A. thaliana
  misc_feature: MA Experiment 20001907 PARAMETER Experiment Name: At_Drought_Reproduction_P Parameter: Plant Line Value: WS
  misc_feature: MA Experiment 20001907 PARAMETER Experiment Name: At_Drought_Reproduction_P Parameter: Timepoint (day) Value: 7
  misc_feature: MA Experiment 20001907 PARAMETER Experiment Name: At_Drought_Reproduction_P Parameter: Tissue Value: Siliques
  misc_feature: MA Experiment 20001907 PARAMETER Experiment Name: At_Drought_Reproduction_P Parameter: Treatment Value: Drought vs. No Drought
  misc_feature: MA Experiment ID: 20001910 Result: Down-regulated in Transcription
  misc_feature: MA Experiment 20001910 PARAMETER Experiment Name: At_Drought_Reproduction_P Parameter: Age (day) Value: 37
  misc_feature: MA Experiment 20001910 PARAMETER Experiment Name: At_Drought_Reproduction_P Parameter: Organism Value: A. thaliana
  misc_feature: MA Experiment 20001910 PARAMETER Experiment Name: At_Drought_Reproduction_P Parameter: Plant Line Value: WS
  misc_feature: MA Experiment 20001910 PARAMETER Experiment Name: At_Drought_Reproduction_P Parameter: Timepoint (day) Value: 7
  misc_feature: MA Experiment 20001910 PARAMETER Experiment Name: At_Drought_Reproduction_P Parameter: Tissue Value: Flowers
  misc_feature: MA Experiment 20001910 PARAMETER Experiment Name: At_Drought_Reproduction_P Parameter: Treatment Value: Drought vs. No Drought
  misc_feature: MA Experiment ID: 20001911 Result: Down-regulated in Transcription
  misc_feature: MA Experiment 20001911 PARAMETER Experiment Name: At_Drought_Reproduction_P Parameter: Age (day) Value: 40
  misc_feature: MA Experiment 20001911 PARAMETER Experiment Name: At_Drought_Reproduction_P Parameter: Organism Value: A. thaliana
  misc_feature: MA Experiment 20001911 PARAMETER Experiment Name: At_Drought_Reproduction_P Parameter: Plant Line Value: WS
  misc_feature: MA Experiment 20001911 PARAMETER Experiment Name: At_Drought_Reproduction_P Parameter: Timepoint (day) Value: 10
  misc_feature: MA Experiment 20001911 PARAMETER Experiment Name: At_Drought_Reproduction_P Parameter: Tissue Value: Flowers
  misc_feature: MA Experiment 20001911 PARAMETER Experiment Name: At_Drought_Reproduction_P Parameter: Treatment Value: Drought vs. No Drought

SEQ ID NO: 31134 - protein, 314 aa, Arabidopsis thaliana; identical to SEQ ID NO: 27544
  peptide (1)..(314): Ceres Seq. ID no. 12340319
  misc_feature (35)..(314): Pfam Name: Phosphate-induced protein 1 conserved region Pfam Description: Phosphate-induced protein 1 conserved region
  misc_feature (35)..(313): Homolog of NCBI NO: 37533672 NR Description: putative phosphate-induced protein
  misc_feature (137)..(313): Homolog of NCBI NO: 13194680 NR Description: phosphate-induced protein 1-like protein
  misc_feature (43)..(314): Homolog of NCBI NO: 15242420 NR Description: putative protein
  misc_feature (85)..(314): Homolog of NCBI NO: 31074969 NR Description: erg-1 [Solanum tuberosum]
  misc_feature (1)..(245): Homolog of NCBI NO: 11762144 NR Description: At1g35140 [Arabidopsis thaliana]
  misc_feature (6)..(314): Homolog of NCBI NO: 15237656 NR Description: phi-1-like protein
  misc_feature (1)..(313): Homolog of NCBI NO: 15219504 NR Description: phosphate-induced (phi-1) protein, putative
  misc_feature (5)..(314): Homolog of NCBI NO: 3759184 NR Description: phi-1 [Nicotiana tabacum]
  misc_feature (1)..(314): Homolog of NCBI NO: 15236667 NR Description: putative phi-1-like phosphate-induced protein
  misc_feature (1)..(314): Homolog of NCBI NO: 21593043 NR Description: putative phi-1-like phosphate-induced protein

SEQ ID NO: 31135 - DNA, 1353 bp, Arabidopsis thaliana; identical to SEQ ID NO: 27545
  misc_feature (1)..(1353): Ceres Seq. ID no. 13622031
  misc_feature: MA Experiment ID: 108577 Result: Down-regulated in Transcription
  misc_feature: MA Experiment 108577 PARAMETER Experiment Name: At_42deg_Heat_cDNA_P Parameter: Temperature (deg C) Value: 42 vs. 22
  misc_feature: MA Experiment 108577 PARAMETER Experiment Name: At_42deg_Heat_cDNA_P Parameter: Timepoint (hr) Value: 6
  misc_feature: MA Experiment 108577 PARAMETER Experiment Name: At_42deg_Heat_cDNA_P Parameter: Tissue Value: Aerial
  misc_feature: MA Experiment ID: 108595 Result: Down-regulated in Transcription
  misc_feature: MA Experiment 108595 PARAMETER Experiment Name: At_Ler-pi_Ovule_cDNA_P Parameter: Plant Line Value: null
  misc_feature: MA Experiment ID: 20000224 Result: Down-regulated in Transcription
  misc_feature: MA Experiment ID: 20000306 Result: Up-regulated in Transcription
  misc_feature: MA Experiment 20000306 PARAMETER Experiment Name: At_Germinating_Seeds_Sub_P Parameter: Age (hr) Value: 6 vs. 0
  misc_feature: MA Experiment 20000306 PARAMETER Experiment Name: At_Germinating_Seeds_Sub_P Parameter: Organism Value: A. thaliana
  misc_feature: MA Experiment 20000306 PARAMETER Experiment Name: At_Germinating_Seeds_Sub_P Parameter: Plant Line Value: WS
  misc_feature: MA Experiment 20000306 PARAMETER Experiment Name: At_Germinating_Seeds_Sub_P Parameter: Tissue Value: Germinating Seeds
  misc_feature: MA Experiment ID: 20000307 Result: Up-regulated in Transcription
  misc_feature: MA Experiment 20000307 PARAMETER Experiment Name: At_Germinating_Seeds_Sub_P Parameter: Age (hr) Value: 24 vs. 0
  misc_feature: MA Experiment 20000307 PARAMETER Experiment Name: At_Germinating_Seeds_Sub_P Parameter: Organism Value: A. thaliana
  misc_feature: MA Experiment 20000307 PARAMETER Experiment Name: At_Germinating_Seeds_Sub_P Parameter: Plant Line Value: WS
  misc_feature: MA Experiment 20000307 PARAMETER Experiment Name: At_Germinating_Seeds_Sub_P Parameter: Tissue Value: Germinating Seeds

SEQ ID NO: 31136 - protein, 337 aa, Arabidopsis thaliana; identical to SEQ ID NO: 27546
  peptide (1)..(337): Ceres Seq. ID no. 13622032
  misc_feature (15)..(137): Pfam Name: Putative GTPase activating protein for Arf Pfam Description: Putative GTPase activating protein for Arf
  misc_feature (1)..(121): Homolog of NCBI NO: 25411567 NR Description: hypothetical protein At2g14490 [imported] -
  misc_feature (9)..(337): Homolog of NCBI NO: 19386828 NR Description: putative zinc finger and C2 domain protein
  misc_feature (17)..(337): Homolog of NCBI NO: 30680493 NR Description: zinc finger and C2 domain protein, putative
  misc_feature (17)..(337): Homolog of NCBI NO: 6648206 NR Description: putative GTPase activating protein [Arabidopsis
  misc_feature (1)..(337): Homolog of NCBI NO: 25407332 NR Description: hypothetical protein AT4g05330 [imported] -
  misc_feature (1)..(337): Homolog of NCBI NO: 18412932 NR Description: zinc finger and C2 domain protein, putative
  misc_feature (1)..(41): Homolog of NCBI NO: 7486586 NR Description: hypothetical protein F7J7.100 - Arabidopsis
  misc_feature (40)..(337): Homolog of NCBI NO: 7486586 NR Description: hypothetical protein F7J7.100 - Arabidopsis
  misc_feature (1)..(337): Homolog of NCBI NO: 21594052 NR Description: putative GTPase activating protein [Arabidopsis
  misc_feature (1)..(337): Homolog of NCBI NO: 18415638 NR Description: zinc finger and C2 domain protein (ZAC)

SEQ ID NO: 31137 - protein, 255 aa, Arabidopsis thaliana; identical to SEQ ID NO: 27547
  peptide (1)..(255): Ceres Seq. ID no. 13622033
  misc_feature (1)..(55): Pfam Name: Putative GTPase activating protein for Arf Pfam Description: Putative GTPase activating protein for Arf
  misc_feature (1)..(28): Homolog of NCBI NO: 15225946 NR Description: ARF GTPase-activating domain-containing protein
  misc_feature (1)..(39): Homolog of NCBI NO: 25411567 NR Description: hypothetical protein At2g14490 [imported] -
  misc_feature (1)..(255): Homolog of NCBI NO: 19386828 NR Description: putative zinc finger and C2 domain protein
  misc_feature (1)..(255): Homolog of NCBI NO: 30680493 NR Description: zinc finger and C2 domain protein, putative
  misc_feature (1)..(255): Homolog of NCBI NO: 6648206 NR Description: putative GTPase activating protein [Arabidopsis
  misc_feature (1)..(255): Homolog of NCBI NO: 25407332 NR Description: hypothetical protein AT4g05330 [imported] -
  misc_feature (1)..(255): Homolog of NCBI NO: 18412932 NR Description: zinc finger and C2 domain protein, putative
  misc_feature (1)..(255): Homolog of NCBI NO: 7486586 NR Description: hypothetical protein F7J7.100 - Arabidopsis
  misc_feature (1)..(255): Homolog of NCBI NO: 21594052 NR Description: putative GTPase activating protein [Arabidopsis
  misc_feature (1)..(255): Homolog of NCBI NO: 18415638 NR Description: zinc finger and C2 domain protein (ZAC)

SEQ ID NO: 31138 - protein, 221 aa, Arabidopsis thaliana; identical to SEQ ID NO: 27548
  peptide (1)..(221): Ceres Seq. ID no. 13622034
  misc_feature (67)..(146): Pfam Name: C2 domain Pfam Description: C2 domain
  misc_feature (1)..(39): Homolog of NCBI NO: 28850396 NR Description: similar to Arabidopsis thaliana (Mouse-ear
  misc_feature (64)..(219): Homolog of NCBI NO: 33146442 NR Description: zinc finger and C2 domain protein-like
  misc_feature (1)..(221): Homolog of NCBI NO: 19386828 NR Description: putative zinc finger and C2 domain protein
  misc_feature (1)..(221): Homolog of NCBI NO: 30680493 NR Description: zinc finger and C2 domain protein, putative
  misc_feature (1)..(221): Homolog of NCBI NO: 6648206 NR Description: putative GTPase activating protein [Arabidopsis
  misc_feature (1)..(221): Homolog of NCBI NO: 25407332 NR Description: hypothetical protein AT4g05330 [imported] -
  misc_feature (1)..(221): Homolog of NCBI NO: 18412932 NR Description: zinc finger and C2 domain protein, putative
  misc_feature (1)..(221): Homolog of NCBI NO: 7486586 NR Description: hypothetical protein F7J7.100 - Arabidopsis
  misc_feature (1)..(221): Homolog of NCBI NO: 21594052 NR Description: putative GTPase activating protein [Arabidopsis
  misc_feature (1)..(221): Homolog of NCBI NO: 18415638 NR Description: zinc finger and C2 domain protein (ZAC)

SEQ ID NO: 31139 - DNA, 1573 bp, Arabidopsis thaliana; identical to SEQ ID NO: 27549
  misc_feature (1)..(1573): Ceres Seq. ID no. 13489743
  misc_feature: MA Experiment ID: 108461 Result: Up-regulated in Transcription
  misc_feature: MA Experiment 108461 PARAMETER Experiment Name: At_Germinating_Seeds_cDNA_P Parameter: Age (day) Value: 1 vs. 0
  misc_feature: MA Experiment 108461 PARAMETER Experiment Name: At_Germinating_Seeds_cDNA_P Parameter: Tissue Value: Germinating Seeds
  misc_feature: MA Experiment ID: 108573 Result: Up-regulated in Transcription
  misc_feature: MA Experiment 108573 PARAMETER Experiment Name: At_Drought_cDNA_P Parameter: Timepoint (hr) Value: 6
  misc_feature: MA Experiment 108573 PARAMETER Experiment Name: At_Drought_cDNA_P Parameter: Tissue Value: Aerial
  misc_feature: MA Experiment 108573 PARAMETER Experiment Name: At_Drought_cDNA_P Parameter: Treatment Value: Drought vs. No Drought
  misc_feature: MA Experiment ID: 108576 Result: Down-regulated in Transcription
  misc_feature: MA Experiment 108576 PARAMETER Experiment Name: At_42deg_Heat_cDNA_P Parameter: Temperature (deg C) Value: 42 vs. 22
  misc_feature: MA Experiment 108576 PARAMETER Experiment Name: At_42deg_Heat_cDNA_P Parameter: Timepoint (hr) Value: 1
  misc_feature: MA Experiment 108576 PARAMETER Experiment Name: At_42deg_Heat_cDNA_P Parameter: Tissue Value: Aerial
  misc_feature: MA Experiment ID: 20000111 Result: Down-regulated in Transcription
  misc_feature: MA Experiment 20000111 PARAMETER Experiment Name: At_42deg_Heat_cDNA_P Parameter: Temperature (deg C) Value: 42 vs. 22
  misc_feature: MA Experiment 20000111 PARAMETER Experiment Name: At_42deg_Heat_cDNA_P Parameter: Timepoint (hr) Value: 6
  misc_feature: MA Experiment 20000111 PARAMETER Experiment Name: At_42deg_Heat_cDNA_P Parameter: Tissue Value: Aerial
  misc_feature: MA Experiment ID: 20000113 Result: Down-regulated in Transcription
  misc_feature: MA Experiment 20000113 PARAMETER Experiment Name: At_42deg_Heat_cDNA_P Parameter: Temperature (deg C) Value: 42 vs. 22
  misc_feature: MA Experiment 20000113 PARAMETER Experiment Name: At_42deg_Heat_cDNA_P Parameter: Timepoint (hr) Value: 8
  misc_feature: MA Experiment 20000113 PARAMETER Experiment Name: At_42deg_Heat_cDNA_P Parameter: Tissue Value: Aerial

SEQ ID NO: 31140 - protein, 358 aa, Arabidopsis thaliana; identical to SEQ ID NO: 27550
  peptide (1)..(358): Ceres Seq. ID no. 13489744
  misc_feature (39)..(338): Homolog of NCBI NO: 22330795 NR Description: expressed protein [Arabidopsis thaliana]
  misc_feature (8)..(175): Homolog of NCBI NO: 34903224 NR Description: unnamed protein product [Oryza sativa (japonica
  misc_feature (56)..(132): Homolog of NCBI NO: 25371351 NR Description: hypothetical protein At2g25260 [imported] -
  misc_feature (188)..(339): Homolog of NCBI NO: 25371351 NR Description: hypothetical protein At2g25260 [imported] -
  misc_feature (56)..(132): Homolog of NCBI NO: 30682704 NR Description: expressed protein [Arabidopsis thaliana]
  misc_feature (188)..(357): Homolog of NCBI NO: 30682704 NR Description: expressed protein [Arabidopsis thaliana]
  misc_feature (2)..(357): Homolog of NCBI NO: 24413996 NR Description: hypothetical protein~similar to Arabidopsis
  misc_feature (1)..(355): Homolog of NCBI NO: 22327055 NR Description: expressed protein [Arabidopsis thaliana]
  misc_feature (1)..(358): Homolog of NCBI NO: 15240642 NR Description: expressed protein [Arabidopsis thaliana]

SEQ ID NO: 31141 - protein, 310 aa, Arabidopsis thaliana; identical to SEQ ID NO: 27551
  peptide (1)..(310): Ceres Seq. ID no. 13489745
  misc_feature (1)..(290): Homolog of NCBI NO: 22330795 NR Description: expressed protein [Arabidopsis thaliana]
  misc_feature (1)..(127): Homolog of NCBI NO: 34903224 NR Description: unnamed protein product [Oryza sativa (japonica
  misc_feature (8)..(84): Homolog of NCBI NO: 25371351 NR Description: hypothetical protein At2g25260 [imported] -
  misc_feature (140)..(291): Homolog of NCBI NO: 25371351 NR Description: hypothetical protein At2g25260 [imported] -
  misc_feature (8)..(84): Homolog of NCBI NO: 30682704 NR Description: expressed protein [Arabidopsis thaliana]
  misc_feature (140)..(309): Homolog of NCBI NO: 30682704 NR Description: expressed protein [Arabidopsis thaliana]
  misc_feature (1)..(309): Homolog of NCBI NO: 24413996 NR Description: hypothetical protein~similar to Arabidopsis
  misc_feature (1)..(307): Homolog of NCBI NO: 22327055 NR Description: expressed protein [Arabidopsis thaliana]
  misc_feature (1)..(310): Homolog of NCBI NO: 15240642 NR Description: expressed protein [Arabidopsis thaliana]

SEQ ID NO: 31142 - protein, 277 aa, Arabidopsis thaliana; identical to SEQ ID NO: 27552
  peptide (1)..(277): Ceres Seq. ID no. 13489746
  misc_feature (1)..(257): Homolog of NCBI NO: 22330795 NR Description: expressed protein [Arabidopsis thaliana]
  misc_feature (1)..(94): Homolog of NCBI NO: 34903224 NR Description: unnamed protein product [Oryza sativa (japonica
  misc_feature (1)..(51): Homolog of NCBI NO: 25371351 NR Description: hypothetical protein At2g25260 [imported] -
  misc_feature (107)..(258): Homolog of NCBI NO: 25371351 NR Description: hypothetical protein At2g25260 [imported] -
  misc_feature (1)..(51): Homolog of NCBI NO: 30682704 NR Description: expressed protein [Arabidopsis thaliana]
  misc_feature (107)..(276): Homolog of NCBI NO: 30682704 NR Description: expressed protein [Arabidopsis thaliana]
  misc_feature (1)..(276): Homolog of NCBI NO: 24413996 NR Description: hypothetical protein~similar to Arabidopsis
  misc_feature (1)..(274): Homolog of NCBI NO: 22327055 NR Description: expressed protein [Arabidopsis thaliana]
  misc_feature (1)..(277): Homolog of NCBI NO: 15240642 NR Description: expressed protein [Arabidopsis thaliana]

SEQ ID NO: 31143 - DNA, 1347 bp, Arabidopsis thaliana; identical to SEQ ID NO: 27553
  misc_feature (1)..(1347): Ceres Seq. ID no. 12357669
  misc_feature: MA Experiment ID: 108461 Result: Up-regulated in Transcription
  misc_feature: MA Experiment 108461 PARAMETER Experiment Name: At_Germinating_Seeds_cDNA_P Parameter: Age (day) Value: 1 vs. 0
  misc_feature: MA Experiment 108461 PARAMETER Experiment Name: At_Germinating_Seeds_cDNA_P Parameter: Tissue Value: Germinating Seeds
  misc_feature: MA Experiment ID: 108462 Result: Up-regulated in Transcription
  misc_feature: MA Experiment 108462 PARAMETER Experiment Name: At_Germinating_Seeds_cDNA_P Parameter: Age (day) Value: 2 vs. 0
  misc_feature: MA Experiment 108462 PARAMETER Experiment Name: At_Germinating_Seeds_cDNA_P Parameter: Tissue Value: Germinating Seeds
  misc_feature: MA Experiment ID: 108463 Result: Up-regulated in Transcription
  misc_feature: MA Experiment 108463 PARAMETER Experiment Name: At_Germinating_Seeds_cDNA_P Parameter: Age (day) Value: 3 vs. 0
  misc_feature: MA Experiment 108463 PARAMETER Experiment Name: At_Germinating_Seeds_cDNA_P Parameter: Tissue Value: Germinating Seeds
  misc_feature: MA Experiment ID: 108464 Result: Up-regulated in Transcription
  misc_feature: MA Experiment 108464 PARAMETER Experiment Name: At_Germinating_Seeds_cDNA_P Parameter: Age (day) Value: 4 vs. 0
  misc_feature: MA Experiment 108464 PARAMETER Experiment Name: At_Germinating_Seeds_cDNA_P Parameter: Tissue Value: Germinating Seeds
  misc_feature: MA Experiment ID: 108469 Result: Down-regulated in Transcription
  misc_feature: MA Experiment ID: 108501 Result: Up-regulated in Transcription
  misc_feature: MA Experiment 108501 PARAMETER Experiment Name: At_ap2_floral_buds_cDNA_P Parameter: Plant Line Value: ap2 (Ler.)
  misc_feature: MA Experiment 108501 PARAMETER Experiment Name: At_ap2_floral_buds_cDNA_P Parameter: Tissue Value: Closed Flower
  misc_feature: MA Experiment ID: 108561 Result: Down-regulated in Transcription
  misc_feature: MA Experiment 108561 PARAMETER Experiment Name: At_100uM_ABA_cDNA_P Parameter: Timepoint (hr) Value: 6
  misc_feature: MA Experiment 108561 PARAMETER Experiment Name: At_100uM_ABA_cDNA_P Parameter: Tissue Value: Aerial
  misc_feature: MA Experiment 108561 PARAMETER Experiment Name: At_100uM_ABA_cDNA_P Parameter: Treatment Value: 100uM ABA vs. No Treatment
  misc_feature: MA Experiment ID: 108573 Result: Down-regulated in Transcription
  misc_feature: MA Experiment 108573 PARAMETER Experiment Name: At_Drought_cDNA_P Parameter: Timepoint (hr) Value: 6
  misc_feature: MA Experiment 108573 PARAMETER Experiment Name: At_Drought_cDNA_P Parameter: Tissue Value: Aerial
  misc_feature: MA Experiment 108573 PARAMETER Experiment Name: At_Drought_cDNA_P Parameter: Treatment Value: Drought vs. No Drought
  misc_feature: MA Experiment ID: 108576 Result: Down-regulated in Transcription
  misc_feature: MA Experiment 108576 PARAMETER Experiment Name: At_42deg_Heat_cDNA_P Parameter: Temperature (deg C) Value: 42 vs. 22
  misc_feature: MA Experiment 108576 PARAMETER Experiment Name: At_42deg_Heat_cDNA_P Parameter: Timepoint (hr) Value: 1
  misc_feature: MA Experiment 108576 PARAMETER Experiment Name: At_42deg_Heat_cDNA_P Parameter: Tissue Value: Aerial
  misc_feature: MA Experiment ID: 108577 Result: Down-regulated in Transcription
  misc_feature: MA Experiment 108577 PARAMETER Experiment Name: At_42deg_Heat_cDNA_P Parameter: Temperature (deg C) Value: 42 vs. 22
  misc_feature: MA Experiment 108577 PARAMETER Experiment Name: At_42deg_Heat_cDNA_P Parameter: Timepoint (hr) Value: 6
  misc_feature: MA Experiment 108577 PARAMETER Experiment Name: At_42deg_Heat_cDNA_P Parameter: Tissue Value: Aerial
  misc_feature: MA Experiment ID: 108579 Result: Up-regulated in Transcription
  misc_feature: MA Experiment 108579 PARAMETER Experiment Name: At_4deg_Cold_cDNA_P Parameter: Temperature (deg C) Value: 4 vs. 22
  misc_feature: MA Experiment 108579 PARAMETER Experiment Name: At_4deg_Cold_cDNA_P Parameter: Timepoint (hr) Value: 6
  misc_feature: MA Experiment 108579 PARAMETER Experiment Name: At_4deg_Cold_cDNA_P Parameter: Tissue Value: Aerial
  misc_feature: MA Experiment ID: 108585 Result: Down-regulated in Transcription
  misc_feature: MA Experiment 108585 PARAMETER Experiment Name: At_5mM_NaNP_cDNA_P Parameter: Timepoint (hr) Value: 6
  misc_feature: MA Experiment 108585 PARAMETER Experiment Name: At_5mM_NaNP_cDNA_P Parameter: Tissue Value: Aerial
  misc_feature: MA Experiment 108585 PARAMETER Experiment Name: At_5mM_NaNP_cDNA_P Parameter: Treatment Value: null
  misc_feature: MA Experiment ID: 108595 Result: Down-regulated in Transcription
  misc_feature: MA Experiment 108595 PARAMETER Experiment Name: At_Ler-pi_Ovule_cDNA_P Parameter: Plant Line Value: null
  misc_feature: MA Experiment ID: 108605 Result: Down-regulated in Transcription
  misc_feature: MA Experiment 108605 PARAMETER Experiment Name: At_100uM_ABA_cDNA_P Parameter: Timepoint (hr) Value: 6
  misc_feature: MA Experiment 108605 PARAMETER Experiment Name: At_100uM_ABA_cDNA_P Parameter: Tissue Value: Aerial
  misc_feature: MA Experiment 108605 PARAMETER Experiment Name: At_100uM_ABA_cDNA_P Parameter: Treatment Value: 100uM ABA vs. No Treatment
  misc_feature: MA Experiment ID: 108607 Result: Down-regulated in Transcription
  misc_feature: MA Experiment 108607 PARAMETER Experiment Name: At_100uM_ABA_cDNA_P Parameter: Timepoint (hr) Value: 4
  misc_feature: MA Experiment 108607 PARAMETER Experiment Name: At_100uM_ABA_cDNA_P Parameter: Tissue Value: Aerial
  misc_feature: MA Experiment 108607 PARAMETER Experiment Name: At_100uM_ABA_cDNA_P Parameter: Treatment Value: 100uM ABA vs. No Treatment
  misc_feature: MA Experiment ID: 108668 Result: Down-regulated in Transcription
  misc_feature: MA Experiment 108668 PARAMETER Experiment Name: At_2mM_SA_cDNA_P Parameter: Plant Line Value: WS
  misc_feature: MA Experiment 108668 PARAMETER Experiment Name: At_2mM_SA_cDNA_P Parameter: Timepoint (hr) Value: 6
  misc_feature: MA Experiment 108668 PARAMETER Experiment Name: At_2mM_SA_cDNA_P Parameter: Treatment Value: 2mM SA vs. No Treatment
  misc_feature: MA Experiment ID: 20000069 Result: Down-regulated in Transcription
  misc_feature: MA Experiment 20000069 PARAMETER Experiment Name: At_100uM_ABA_Mutants_cDNA_P Parameter: Plant Line Value: CS23
  misc_feature: MA Experiment 20000069 PARAMETER Experiment Name: At_100uM_ABA_Mutants_cDNA_P Parameter: Timepoint (hr) Value: 6
  misc_feature: MA Experiment 20000069 PARAMETER Experiment Name: At_100uM_ABA_Mutants_cDNA_P Parameter: Tissue Value: Aerial
  misc_feature: MA Experiment 20000069 PARAMETER Experiment Name: At_100uM_ABA_Mutants_cDNA_P Parameter: Treatment Value: 100uM ABA vs. No Treatment
  misc_feature: MA Experiment ID: 20000070 Result: Down-regulated in Transcription
  misc_feature: MA Experiment 20000070 PARAMETER Experiment Name: At_100uM_ABA_Mutants_cDNA_P Parameter: Plant Line Value: CS24
  misc_feature: MA Experiment 20000070 PARAMETER Experiment Name: At_100uM_ABA_Mutants_cDNA_P Parameter: Timepoint (hr) Value: 6
  misc_feature: MA Experiment 20000070 PARAMETER Experiment Name: At_100uM_ABA_Mutants_cDNA_P Parameter: Tissue Value: Aerial
  misc_feature: MA Experiment 20000070 PARAMETER Experiment Name: At_100uM_ABA_Mutants_cDNA_P Parameter: Treatment Value: 100uM ABA vs. No Treatment
  misc_feature: MA Experiment ID: 20000071 Result: Down-regulated in Transcription
  misc_feature: MA Experiment 20000071 PARAMETER Experiment Name: At_100uM_ABA_Mutants_cDNA_P Parameter: Plant Line Value: CS8104
  misc_feature: MA Experiment 20000071 PARAMETER Experiment Name: At_100uM_ABA_Mutants_cDNA_P Parameter: Timepoint (hr) Value: 6
  misc_feature: MA Experiment 20000071 PARAMETER Experiment Name: At_100uM_ABA_Mutants_cDNA_P Parameter: Tissue Value: Aerial
  misc_feature: MA Experiment 20000071 PARAMETER Experiment Name: At_100uM_ABA_Mutants_cDNA_P Parameter: Treatment Value: 100uM ABA vs. No Treatment
  misc_feature: MA Experiment ID: 20000072 Result: Down-regulated in Transcription
  misc_feature: MA Experiment 20000072 PARAMETER Experiment Name: At_100uM_ABA_Mutants_cDNA_P Parameter: Plant Line Value: CS8105
  misc_feature: MA Experiment 20000072 PARAMETER Experiment Name: At_100uM_ABA_Mutants_cDNA_P Parameter: Timepoint (hr) Value: 6
  misc_feature: MA Experiment 20000072 PARAMETER Experiment Name: At_100uM_ABA_Mutants_cDNA_P Parameter: Tissue Value: Aerial
  misc_feature: MA Experiment 20000072 PARAMETER Experiment Name: At_100uM_ABA_Mutants_cDNA_P Parameter: Treatment Value: 100uM ABA vs. No Treatment
  misc_feature: MA Experiment ID: 20000086 Result: Down-regulated in Transcription
  misc_feature: MA Experiment 20000086 PARAMETER Experiment Name: At_100uM_ABA_Mutants_cDNA_P Parameter: Plant Line Value: CS22
  misc_feature: MA Experiment 20000086 PARAMETER Experiment Name: At_100uM_ABA_Mutants_cDNA_P Parameter: Timepoint (hr) Value: 6
  misc_feature: MA Experiment 20000086 PARAMETER Experiment Name: At_100uM_ABA_Mutants_cDNA_P Parameter: Tissue Value: Aerial
  misc_feature: MA Experiment 20000086 PARAMETER Experiment Name: At_100uM_ABA_Mutants_cDNA_P Parameter: Treatment Value: 100uM ABA vs. No Treatment
  misc_feature: MA Experiment ID: 20000087 Result: Down-regulated in Transcription
  misc_feature: MA Experiment 20000087 PARAMETER Experiment Name: At_100uM_ABA_Mutants_cDNA_P Parameter: Plant Line Value: WS
  misc_feature: MA Experiment 20000087 PARAMETER Experiment Name: At_100uM_ABA_Mutants_cDNA_P Parameter: Timepoint (hr) Value: 6
  misc_feature: MA Experiment 20000087 PARAMETER Experiment Name: At_100uM_ABA_Mutants_cDNA_P Parameter: Tissue Value: Aerial
  misc_feature: MA Experiment 20000087 PARAMETER Experiment Name: At_100uM_ABA_Mutants_cDNA_P Parameter: Treatment Value: 100uM ABA vs. No Treatment
  misc_feature: MA Experiment ID: 20000088 Result: Down-regulated in Transcription
  misc_feature: MA Experiment 20000088 PARAMETER Experiment Name: At_100uM_ABA_Mutants_cDNA_P Parameter: Plant Line Value: Landsberg
  misc_feature: MA Experiment 20000088 PARAMETER Experiment Name: At_100uM_ABA_Mutants_cDNA_P Parameter: Timepoint (hr) Value: 6
  misc_feature: MA Experiment 20000088 PARAMETER Experiment Name: At_100uM_ABA_Mutants_cDNA_P Parameter: Tissue Value: Aerial
  misc_feature: MA Experiment 20000088 PARAMETER Experiment Name: At_100uM_ABA_Mutants_cDNA_P Parameter: Treatment Value: 100uM ABA vs. No Treatment
  misc_feature: MA Experiment ID: 20000089 Result: Down-regulated in Transcription
  misc_feature: MA Experiment ID: 20000090 Result: Down-regulated in Transcription
  misc_feature: MA Experiment ID: 20000111 Result: Down-regulated in Transcription
  misc_feature: MA Experiment 20000111 PARAMETER Experiment Name: At_42deg_Heat_cDNA_P Parameter: Temperature (deg C) Value: 42 vs. 22
  misc_feature: MA Experiment 20000111 PARAMETER Experiment Name: At_42deg_Heat_cDNA_P Parameter: Timepoint (hr) Value: 6
  misc_feature: MA Experiment 20000111 PARAMETER Experiment Name: At_42deg_Heat_cDNA_P Parameter: Tissue Value: Aerial
  misc_feature: MA Experiment ID: 20000113 Result: Down-regulated in Transcription
  misc_feature: MA Experiment 20000113 PARAMETER Experiment Name: At_42deg_Heat_cDNA_P Parameter: Temperature (deg C) Value: 42 vs. 22
  misc_feature: MA Experiment 20000113 PARAMETER Experiment Name: At_42deg_Heat_cDNA_P Parameter: Timepoint (hr) Value: 8
  misc_feature: MA Experiment 20000113 PARAMETER Experiment Name: At_42deg_Heat_cDNA_P Parameter: Tissue Value: Aerial
  misc_feature: MA Experiment ID: 20000117 Result: Down-regulated in Transcription
  misc_feature: MA Experiment 20000117 PARAMETER Experiment Name: At_100uM_ABA_Mutants_cDNA_P Parameter: Plant Line Value: Columbia
  misc_feature: MA Experiment 20000117 PARAMETER Experiment Name: At_100uM_ABA_Mutants_cDNA_P Parameter: Timepoint (hr) Value: 6
  misc_feature: MA Experiment 20000117 PARAMETER Experiment Name: At_100uM_ABA_Mutants_cDNA_P Parameter: Tissue Value: Aerial
  misc_feature: MA Experiment 20000117 PARAMETER Experiment Name: At_100uM_ABA_Mutants_cDNA_P Parameter: Treatment Value: 100uM ABA vs. No Treatment
  misc_feature: MA Experiment ID: 20000144 Result: Down-regulated in Transcription
  misc_feature: MA Experiment 20000144 PARAMETER Experiment Name: At_42deg_Heat_cDNA_P Parameter: Temperature (deg C) Value: 42 vs. 22
  misc_feature: MA Experiment 20000144 PARAMETER Experiment Name: At_42deg_Heat_cDNA_P Parameter: Timepoint (hr) Value: 1
  misc_feature: MA Experiment 20000144 PARAMETER Experiment Name: At_42deg_Heat_cDNA_P Parameter: Tissue Value: Aerial
  misc_feature: MA Experiment ID: 20000169 Result: Down-regulated in Transcription
  misc_feature: MA Experiment 20000169 PARAMETER Experiment Name: At_100uM_ABA_P Parameter: Age (day) Value: 14
  misc_feature: MA Experiment 20000169 PARAMETER Experiment Name: At_100uM_ABA_P Parameter: Organism Value: A. thaliana
  misc_feature: MA Experiment 20000169 PARAMETER Experiment Name: At_100uM_ABA_P Parameter: Plant Line Value: WS
  misc_feature: MA Experiment 20000169 PARAMETER Experiment Name: At_100uM_ABA_P Parameter: Timepoint (hr) Value: 6
  misc_feature: MA Experiment 20000169 PARAMETER Experiment Name: At_100uM_ABA_P Parameter: Tissue Value: Aerial
  misc_feature: MA Experiment 20000169 PARAMETER Experiment Name: At_100uM_ABA_P Parameter: Treatment Value: 100uM ABA vs. No Treatment
  misc_feature: MA Experiment ID: 20000171 Result: Down-regulated in Transcription
  misc_feature: MA Experiment 20000171 PARAMETER Experiment Name: At_42deg_Heat_P Parameter: Age (day) Value: 14
  misc_feature: MA Experiment 20000171 PARAMETER Experiment Name: At_42deg_Heat_P Parameter: Organism Value: A. thaliana
  misc_feature: MA Experiment 20000171 PARAMETER Experiment Name: At_42deg_Heat_P Parameter: Plant Line Value: WS
  misc_feature: MA Experiment 20000171 PARAMETER Experiment Name: At_42deg_Heat_P Parameter: Temperature (deg C) Value: 42 vs. 22
  misc_feature: MA Experiment 20000171 PARAMETER Experiment Name: At_42deg_Heat_P Parameter: Timepoint (hr) Value: 1
  misc_feature: MA Experiment 20000171 PARAMETER Experiment Name: At_42deg_Heat_P Parameter: Tissue Value: Aerial
  misc_feature: MA Experiment ID: 20000173 Result: Down-regulated in Transcription
  misc_feature: MA Experiment 20000173 PARAMETER Experiment Name: At_42deg_Heat_P Parameter: Age (day) Value: 14
  misc_feature: MA Experiment 20000173 PARAMETER Experiment Name: At_42deg_Heat_P Parameter: Organism Value: A. thaliana
  misc_feature: MA Experiment 20000173 PARAMETER Experiment Name: At_42deg_Heat_P Parameter: Plant Line Value: WS
  misc_feature: MA Experiment 20000173 PARAMETER Experiment Name: At_42deg_Heat_P Parameter: Temperature (deg C) Value: 42 vs. 22
  misc_feature: MA Experiment 20000173 PARAMETER Experiment Name: At_42deg_Heat_P Parameter: Timepoint (hr) Value: 6
  misc_feature: MA Experiment 20000173 PARAMETER Experiment Name: At_42deg_Heat_P Parameter: Tissue Value: Aerial
  misc_feature: MA Experiment ID: 20000180 Result: Up-regulated in Transcription
  misc_feature: MA Experiment 20000180 PARAMETER Experiment Name: At_Germinating_Seeds_P Parameter: Age (hr) Value: 24 vs. 0
  misc_feature: MA Experiment 20000180 PARAMETER Experiment Name: At_Germinating_Seeds_P Parameter: Tissue Value: Germinating Seeds
  misc_feature: MA Experiment ID: 20000182 Result: Down-regulated in Transcription
  misc_feature: MA Experiment 20000182 PARAMETER Experiment Name: At_2mM_SA_P Parameter: Age (day) Value: 14
  misc_feature: MA Experiment 20000182 PARAMETER Experiment Name: At_2mM_SA_P Parameter: Organism Value: A. thaliana
  misc_feature: MA Experiment 20000182 PARAMETER Experiment Name: At_2mM_SA_P Parameter: Plant Line Value: WS
  misc_feature: MA Experiment 20000182 PARAMETER Experiment Name: At_2mM_SA_P Parameter: Timepoint (hr) Value: 6
  misc_feature: MA Experiment 20000182 PARAMETER Experiment Name: At_2mM_SA_P Parameter: Tissue Value: Aerial
  misc_feature: MA Experiment 20000182 PARAMETER Experiment Name: At_2mM_SA_P Parameter: Treatment Value: 2mM SA vs. No Treatment
  misc_feature: MA Experiment ID: 20000184 Result: Up-regulated in Transcription
  misc_feature: MA Experiment 20000184 PARAMETER Experiment Name: At_Shoots__P Parameter: Age (day) Value: 7
  misc_feature: MA Experiment 20000184 PARAMETER Experiment Name: At_Shoots__P Parameter: Tissue Value: Shoots vs. Whole Plant
  misc_feature: MA Experiment ID: 20000185 Result: Down-regulated in Transcription
  misc_feature: MA Experiment 20000185 PARAMETER Experiment Name: At_Roots__P Parameter: Age (day) Value: 7 vs. 21
  misc_feature: MA Experiment 20000185 PARAMETER Experiment Name: At_Roots__P Parameter: Organism Value: A. thaliana
  misc_feature: MA Experiment 20000185 PARAMETER Experiment Name: At_Roots__P Parameter: Tissue Value: Roots vs. Whole Plant
  misc_feature: MA Experiment ID: 20000235 Result: Up-regulated in Transcription
  misc_feature: MA Experiment 20000235 PARAMETER Experiment Name: At_Siliques_P Parameter: Age (day) Value: 21
  misc_feature: MA Experiment 20000235 PARAMETER Experiment Name: At_Siliques_P Parameter: Organism Value: A. thaliana
  misc_feature: MA Experiment 20000235 PARAMETER Experiment Name: At_Siliques_P Parameter: Plant Line Value: WS
  misc_feature: MA Experiment 20000235 PARAMETER Experiment Name: At_Siliques_P Parameter: Tissue Value: 5-10mm Siliques vs. Whole Plant
  misc_feature: MA Experiment ID: 20000265 Result: Down-regulated in Transcription
  misc_feature: MA Experiment 20000265 PARAMETER Experiment Name: At_Open_Flower_P Parameter: Age (day) Value: 21
  misc_feature: MA Experiment 20000265 PARAMETER Experiment Name: At_Open_Flower_P Parameter: Plant Line Value: WS
  misc_feature: MA Experiment 20000265 PARAMETER Experiment Name: At_Open_Flower_P Parameter: Tissue Value: Closed Flower vs. Whole Plant
  misc_feature: MA Experiment ID: 20000267 Result: Down-regulated in Transcription
  misc_feature: MA Experiment 20000267 PARAMETER Experiment Name: At_Drought_P Parameter: Age (day) Value: 7
  misc_feature: MA Experiment 20000267 PARAMETER Experiment Name: At_Drought_P Parameter: Organism Value: A. thaliana
  misc_feature: MA Experiment 20000267 PARAMETER Experiment Name: At_Drought_P Parameter: Plant Line Value: WS
  misc_feature: MA Experiment 20000267 PARAMETER Experiment Name: At_Drought_P Parameter: Timepoint (hr) Value: 6
  misc_feature: MA Experiment 20000267 PARAMETER Experiment Name: At_Drought_P Parameter: Tissue Value: Whole Plant
  misc_feature: MA Experiment 20000267 PARAMETER Experiment Name: At_Drought_P Parameter: Treatment Value: Drought vs. No Drought
  misc_feature: MA Experiment ID: 20000268 Result: Down-regulated in Transcription
  misc_feature: MA Experiment 20000268 PARAMETER Experiment Name: At_100mM_NaCl__P Parameter: Age (day) Value: 14
  misc_feature: MA Experiment 20000268 PARAMETER Experiment Name: At_100mM_NaCl__P Parameter: Organism Value: A. thaliana
  misc_feature: MA Experiment 20000268 PARAMETER Experiment Name: At_100mM_NaCl__P Parameter: Plant Line Value: WS
  misc_feature: MA Experiment 20000268 PARAMETER Experiment Name: At_100mM_NaCl__P Parameter: Timepoint (hr) Value: 6
  misc_feature: MA Experiment 20000268 PARAMETER Experiment Name: At_100mM_NaCl__P Parameter: Tissue Value: Whole Plant
  misc_feature: MA Experiment 20000268 PARAMETER Experiment Name: At_100mM_NaCl__P Parameter: Treatment Value: 100mM NaCl vs. No Treatment
  misc_feature: MA Experiment ID: 20000286 Result: Down-regulated in Transcription
  misc_feature: MA Experiment 20000286 PARAMETER Experiment Name: At_Open_Flower_P Parameter: Age (day) Value: 21
  misc_feature: MA Experiment 20000286 PARAMETER Experiment Name: At_Open_Flower_P Parameter: Plant Line Value: WS
  misc_feature: MA Experiment 20000286 PARAMETER Experiment Name: At_Open_Flower_P Parameter: Tissue Value: Half Open vs. Whole Plant
  misc_feature: MA Experiment ID: 20000436 Result: Down-regulated in Transcription
  misc_feature: MA Experiment 20000436 PARAMETER Experiment Name: At_Drought_P Parameter: Age (day) Value: 7
  misc_feature: MA Experiment 20000436 PARAMETER Experiment Name: At_Drought_P Parameter: Organism Value: A. thaliana
  misc_feature: MA Experiment 20000436 PARAMETER Experiment Name: At_Drought_P Parameter: Plant Line Value: WS
  misc_feature: MA Experiment 20000436 PARAMETER Experiment Name: At_Drought_P Parameter: Timepoint (hr) Value: 12
  misc_feature: MA Experiment 20000436 PARAMETER Experiment Name: At_Drought_P Parameter: Tissue Value: Whole Plant
  misc_feature: MA Experiment 20000436 PARAMETER Experiment Name: At_Drought_P Parameter: Treatment Value: Drought vs. No Drought
  misc_feature: MA Experiment ID: 20000437 Result: Down-regulated in Transcription
  misc_feature: MA Experiment 20000437 PARAMETER Experiment Name: At_Drought_P Parameter: Age (day) Value: 8
  misc_feature: MA Experiment 20000437 PARAMETER Experiment Name: At_Drought_P Parameter: Organism Value: A. thaliana
  misc_feature: MA Experiment 20000437 PARAMETER Experiment Name: At_Drought_P Parameter: Plant Line Value: WS
  misc_feature: MA Experiment 20000437 PARAMETER Experiment Name: At_Drought_P Parameter: Timepoint (hr) Value: 24
  misc_feature: MA Experiment 20000437 PARAMETER Experiment Name: At_Drought_P Parameter: Tissue Value: Whole Plant
  misc_feature: MA Experiment 20000437 PARAMETER Experiment Name: At_Drought_P Parameter: Treatment Value: Drought vs. No Drought
  misc_feature: MA Experiment ID: 20000438 Result: Up-regulated in Transcription
  misc_feature: MA Experiment 20000438 PARAMETER Experiment Name: At_Shoots__P Parameter: Age (day) Value: 14
  misc_feature: MA Experiment 20000438 PARAMETER Experiment Name: At_Shoots__P Parameter: Tissue Value: Shoots vs. Whole Plant
  misc_feature: MA Experiment ID: 20000439 Result: Down-regulated in Transcription
  misc_feature: MA Experiment 20000439 PARAMETER Experiment Name: At_Roots__P Parameter: Age (day) Value: 14 vs. 21
  misc_feature: MA Experiment 20000439 PARAMETER Experiment Name: At_Roots__P Parameter: Organism Value: A. thaliana
  misc_feature: MA Experiment 20000439 PARAMETER Experiment Name: At_Roots__P Parameter: Tissue Value: Roots vs. Whole Plant
  misc_feature: MA Experiment ID: 20000445 Result: Down-regulated in Transcription
  misc_feature: MA Experiment 20000445 PARAMETER Experiment Name: At_100uM_NAA__P Parameter: Age (day) Value: 14
  misc_feature: MA Experiment 20000445 PARAMETER Experiment Name: At_100uM_NAA__P Parameter: Organism Value: A. thaliana
  misc_feature: MA Experiment 20000445 PARAMETER Experiment Name: At_100uM_NAA__P Parameter: Plant Line Value: WS
  misc_feature: MA Experiment 20000445 PARAMETER Experiment Name: At_100uM_NAA__P Parameter: Timepoint (hr) Value: 6
  misc_feature: MA Experiment 20000445 PARAMETER Experiment Name: At_100uM_NAA__P Parameter: Tissue Value: Aerial
  misc_feature: MA Experiment 20000445 PARAMETER Experiment Name: At_100uM_NAA__P Parameter: Treatment Value: 100uM NAA vs. No Treatment
  misc_feature: MA Experiment ID: 20000451 Result: Up-regulated in Transcription
  misc_feature: MA Experiment 20000451 PARAMETER Experiment Name: At_CS6879_Shoots-Roots_P Parameter: Age (day) Value: 14
  misc_feature: MA Experiment 20000451 PARAMETER Experiment Name: At_CS6879_Shoots-Roots_P Parameter: Organism Value: A. thaliana
  misc_feature: MA Experiment 20000451 PARAMETER Experiment Name: At_CS6879_Shoots-Roots_P Parameter: Plant Line Value: CS6879 vs. WS
  misc_feature: MA Experiment 20000451 PARAMETER Experiment Name: At_CS6879_Shoots-Roots_P Parameter: Tissue Value: Roots
  misc_feature: MA Experiment ID: 20000573 Result: Down-regulated in Transcription
  misc_feature: MA Experiment 20000573 PARAMETER Experiment Name: At_100uM_ABA_Mutants__P Parameter: Organism Value: A. thaliana
  misc_feature: MA Experiment 20000573 PARAMETER Experiment Name: At_100uM_ABA_Mutants__P Parameter: Plant Line Value: CS22 vs. Ler wt
  misc_feature: MA Experiment 20000573 PARAMETER Experiment Name: At_100uM_ABA_Mutants__P Parameter: Timepoint (hr) Value: N/A
  misc_feature: MA Experiment 20000573 PARAMETER Experiment Name: At_100uM_ABA_Mutants__P Parameter: Tissue Value: Whole Plant
  misc_feature: MA Experiment 20000573 PARAMETER Experiment Name: At_100uM_ABA_Mutants__P Parameter: Treatment Value: None
  misc_feature: MA Experiment ID: 20000574 Result: Down-regulated in Transcription
  misc_feature: MA Experiment 20000574 PARAMETER Experiment Name: At_100uM_ABA_Mutants__P Parameter: Organism Value: A. thaliana
  misc_feature: MA Experiment 20000574 PARAMETER Experiment Name: At_100uM_ABA_Mutants__P Parameter: Plant Line Value: CS23 vs. Ler wt
  misc_feature: MA Experiment 20000574 PARAMETER Experiment Name: At_100uM_ABA_Mutants__P Parameter: Timepoint (hr) Value: N/A
  misc_feature: MA Experiment 20000574 PARAMETER Experiment Name: At_100uM_ABA_Mutants__P Parameter: Tissue Value: Whole Plant
  misc_feature: MA Experiment 20000574 PARAMETER Experiment Name: At_100uM_ABA_Mutants__P Parameter: Treatment Value: None
  misc_feature: MA Experiment ID: 20000794 Result: Down-regulated in Transcription
  misc_feature: MA Experiment 20000794 PARAMETER Experiment Name: At_Petals_P Parameter: Age (day) Value: 23-25 days
  misc_feature: MA Experiment 20000794 PARAMETER Experiment Name: At_Petals_P Parameter: Plant Line Value: WS
  misc_feature: MA Experiment 20000794 PARAMETER Experiment Name: At_Petals_P Parameter: Tissue Value: Petals vs. Whole plant
  misc_feature: MA Experiment ID: 20001248 Result: Down-regulated in Transcription
  misc_feature: MA Experiment 20001248 PARAMETER Experiment Name: At_Far-red-induction_P Parameter: Age (day) Value: 7
  misc_feature: MA Experiment 20001248 PARAMETER Experiment Name: At_Far-red-induction_P Parameter: Light Value: Far-red vs. White
  misc_feature: MA Experiment 20001248 PARAMETER Experiment Name: At_Far-red-induction_P Parameter: Organism Value: A. thaliana
  misc_feature: MA Experiment 20001248 PARAMETER Experiment Name: At_Far-red-induction_P Parameter: Plant Line Value: Columbia
  misc_feature: MA Experiment 20001248 PARAMETER Experiment Name: At_Far-red-induction_P Parameter: Timepoint (hr) Value: 4
  misc_feature: MA Experiment 20001248 PARAMETER Experiment Name: At_Far-red-induction_P Parameter: Tissue Value: Whole Plant
  misc_feature: MA Experiment ID: 20001554 Result: Down-regulated in Transcription
  misc_feature: MA Experiment 20001554 PARAMETER Experiment Name: At_Drought_Soil_Dry_P Parameter: Age (day) Value: 21
  misc_feature: MA Experiment 20001554 PARAMETER Experiment Name: At_Drought_Soil_Dry_P Parameter: Organism Value: A. thaliana
  misc_feature: MA Experiment 20001554 PARAMETER Experiment Name: At_Drought_Soil_Dry_P Parameter: Plant Line Value: WS
  misc_feature: MA Experiment 20001554 PARAMETER Experiment Name: At_Drought_Soil_Dry_P Parameter: Post Timepoint (hr) Value: None
  misc_feature: MA Experiment 20001554 PARAMETER Experiment Name: At_Drought_Soil_Dry_P Parameter: Post-Treatment Value: None
  misc_feature: MA Experiment 20001554 PARAMETER Experiment Name: At_Drought_Soil_Dry_P Parameter: Timepoint (day) Value: 7
  misc_feature: MA Experiment 20001554 PARAMETER Experiment Name: At_Drought_Soil_Dry_P Parameter: Treatment Value: Drought vs. No Drought
  misc_feature: MA Experiment ID: 20001555 Result: Down-regulated in Transcription
  misc_feature: MA Experiment 20001555 PARAMETER Experiment Name: At_Drought_Soil_Dry_P Parameter: Age (day) Value: 24
  misc_feature: MA Experiment 20001555 PARAMETER Experiment Name: At_Drought_Soil_Dry_P Parameter: Organism Value: A. thaliana
  misc_feature: MA Experiment 20001555 PARAMETER Experiment Name: At_Drought_Soil_Dry_P Parameter: Plant Line Value: WS
  misc_feature: MA Experiment 20001555 PARAMETER Experiment Name: At_Drought_Soil_Dry_P Parameter: Post Timepoint (hr) Value: None
  misc_feature: MA Experiment 20001555 PARAMETER Experiment Name: At_Drought_Soil_Dry_P Parameter: Post-Treatment Value: None
  misc_feature: MA Experiment 20001555 PARAMETER Experiment Name: At_Drought_Soil_Dry_P Parameter: Timepoint (day) Value: 10
  misc_feature: MA Experiment 20001555 PARAMETER Experiment Name: At_Drought_Soil_Dry_P Parameter: Treatment Value: Drought vs. No Drought
  misc_feature: MA Experiment ID: 20001556 Result: Down-regulated in Transcription
  misc_feature: MA Experiment 20001556 PARAMETER Experiment Name: At_Drought_Soil_Dry_P Parameter: Age (day) Value: 26
  misc_feature: MA Experiment 20001556 PARAMETER Experiment Name: At_Drought_Soil_Dry_P Parameter: Organism Value: A. thaliana
  misc_feature: MA Experiment 20001556 PARAMETER Experiment Name: At_Drought_Soil_Dry_P Parameter: Plant Line Value: WS
  misc_feature: MA Experiment 20001556 PARAMETER Experiment Name: At_Drought_Soil_Dry_P Parameter: Post Timepoint (hr) Value: None
  misc_feature: MA Experiment 20001556 PARAMETER Experiment Name: At_Drought_Soil_Dry_P Parameter: Post-Treatment Value: None
  misc_feature: MA Experiment 20001556 PARAMETER Experiment Name: At_Drought_Soil_Dry_P Parameter: Timepoint (day) Value: 12
  misc_feature: MA Experiment 20001556 PARAMETER Experiment Name: At_Drought_Soil_Dry_P Parameter: Treatment Value: Drought vs. No Drought
  misc_feature: MA Experiment ID: 20001558 Result: Up-regulated in Transcription
  misc_feature: MA Experiment 20001558 PARAMETER Experiment Name: At_Drought_Soil_Dry_P Parameter: Age (day) Value: 27
  misc_feature: MA Experiment 20001558 PARAMETER Experiment Name: At_Drought_Soil_Dry_P Parameter: Organism Value: A. thaliana
  misc_feature: MA Experiment 20001558 PARAMETER Experiment Name: At_Drought_Soil_Dry_P Parameter: Plant Line Value: WS
  misc_feature: MA Experiment 20001558 PARAMETER Experiment Name: At_Drought_Soil_Dry_P Parameter: Post Timepoint (hr) Value: 6
  misc_feature: MA Experiment 20001558 PARAMETER Experiment Name: At_Drought_Soil_Dry_P Parameter: Post-Treatment Value: Re-Water vs. No Drought
  misc_feature: MA Experiment 20001558 PARAMETER Experiment Name: At_Drought_Soil_Dry_P Parameter: Timepoint (day) Value: 13
  misc_feature: MA Experiment 20001558 PARAMETER Experiment Name: At_Drought_Soil_Dry_P Parameter: Treatment Value: Drought vs. No Drought
  misc_feature: MA Experiment ID: 20001560 Result: Up-regulated in Transcription
  misc_feature: MA Experiment 20001560 PARAMETER Experiment Name: At_Drought_Soil_Dry_P Parameter: Age (day) Value: 28
  misc_feature: MA Experiment 20001560 PARAMETER Experiment Name: At_Drought_Soil_Dry_P Parameter: Organism Value: A. thaliana
  misc_feature: MA Experiment 20001560 PARAMETER Experiment Name: At_Drought_Soil_Dry_P Parameter: Plant Line Value: WS
  misc_feature: MA Experiment 20001560 PARAMETER Experiment Name: At_Drought_Soil_Dry_P Parameter: Post Timepoint (hr) Value: None
  misc_feature: MA Experiment 20001560 PARAMETER Experiment Name: At_Drought_Soil_Dry_P Parameter: Post-Treatment Value: None
  misc_feature: MA Experiment 20001560 PARAMETER Experiment Name: At_Drought_Soil_Dry_P Parameter: Timepoint (day) Value: 14
  misc_feature: MA Experiment 20001560 PARAMETER Experiment Name: At_Drought_Soil_Dry_P Parameter: Treatment Value: Drought vs. No Drought
  misc_feature: MA Experiment ID: 20001904 Result: Down-regulated in Transcription
  misc_feature: MA Experiment 20001904 PARAMETER Experiment Name: At_Drought_Reproduction_P Parameter: Age (day) Value: 37
  misc_feature: MA Experiment 20001904 PARAMETER Experiment Name: At_Drought_Reproduction_P Parameter: Organism Value: A. thaliana
  misc_feature: MA Experiment 20001904 PARAMETER Experiment Name: At_Drought_Reproduction_P Parameter: Plant Line Value: WS
  misc_feature: MA Experiment 20001904 PARAMETER Experiment Name: At_Drought_Reproduction_P Parameter: Timepoint (day) Value: 7
  misc_feature: MA Experiment 20001904 PARAMETER Experiment Name: At_Drought_Reproduction_P Parameter: Tissue Value: Rosettes
  misc_feature: MA Experiment 20001904 PARAMETER Experiment Name: At_Drought_Reproduction_P Parameter: Treatment Value: Drought vs. No Drought
  misc_feature: MA Experiment ID: 20001905 Result: Down-regulated in Transcription
  misc_feature: MA Experiment 20001905 PARAMETER Experiment Name: At_Drought_Reproduction_P Parameter: Age (day) Value: 40
  misc_feature: MA Experiment 20001905 PARAMETER Experiment Name: At_Drought_Reproduction_P Parameter: Organism Value: A. thaliana
  misc_feature: MA Experiment 20001905 PARAMETER Experiment Name: At_Drought_Reproduction_P Parameter: Plant Line Value: WS
  misc_feature: MA Experiment 20001905 PARAMETER Experiment Name: At_Drought_Reproduction_P Parameter: Timepoint (day) Value: 10
  misc_feature: MA Experiment 20001905 PARAMETER Experiment Name: At_Drought_Reproduction_P Parameter: Tissue Value: Rosettes
  misc_feature: MA Experiment 20001905 PARAMETER Experiment Name: At_Drought_Reproduction_P Parameter: Treatment Value: Drought vs. No Drought
  misc_feature: MA Experiment ID: 20001906 Result: Down-regulated in Transcription
  misc_feature: MA Experiment 20001906 PARAMETER Experiment Name: At_Drought_Reproduction_P Parameter: Age (day) Value: 35
  misc_feature: MA Experiment 20001906 PARAMETER Experiment Name: At_Drought_Reproduction_P Parameter: Organism Value: A. thaliana
  misc_feature: MA Experiment 20001906 PARAMETER Experiment Name: At_Drought_Reproduction_P Parameter: Plant Line Value: WS
  misc_feature: MA Experiment 20001906 PARAMETER Experiment Name: At_Drought_Reproduction_P Parameter: Timepoint (day) Value: 5
  misc_feature: MA Experiment 20001906 PARAMETER Experiment Name: At_Drought_Reproduction_P Parameter: Tissue Value: Siliques
  misc_feature: MA Experiment 20001906 PARAMETER Experiment Name: At_Drought_Reproduction_P Parameter: Treatment Value: Drought vs. No Drought
  misc_feature: MA Experiment ID: 20001911 Result: Down-regulated in Transcription
  misc_feature: MA Experiment 20001911 PARAMETER Experiment Name: At_Drought_Reproduction_P Parameter: Age (day) Value: 40
  misc_feature: MA Experiment 20001911 PARAMETER Experiment Name: At_Drought_Reproduction_P Parameter: Organism Value: A. thaliana
  misc_feature: MA Experiment 20001911 PARAMETER Experiment Name: At_Drought_Reproduction_P Parameter: Plant Line Value: WS
  misc_feature: MA Experiment 20001911 PARAMETER Experiment Name: At_Drought_Reproduction_P Parameter: Timepoint (day) Value: 10
  misc_feature: MA Experiment 20001911 PARAMETER Experiment Name: At_Drought_Reproduction_P Parameter: Tissue Value: Flowers
  misc_feature: MA Experiment 20001911 PARAMETER Experiment Name: At_Drought_Reproduction_P Parameter: Treatment Value: Drought vs. No Drought

SEQ ID NO: 31144 - protein, 364 aa, Arabidopsis thaliana; identical to SEQ ID NO: 27554
  peptide (1)..(364): Ceres Seq. ID no. 12357670
  misc_feature (33)..(344): Pfam Name: GDSL-like Lipase/Acylhydrolase Pfam Description: GDSL-like Lipase/Acylhydrolase
  misc_feature (11)..(364): Homolog of NCBI NO: 21618199 NR Description: GDSL-motif lipase/hydrolase-like protein
  misc_feature (11)..(364): Homolog of NCBI NO: 18415211 NR Description: Expressed protein
  misc_feature (1)..(364): Homolog of NCBI NO: 7485419 NR Description: hypothetical protein F13C5.140 - Arabidopsis
  misc_feature (1)..(364): Homolog of NCBI NO: 21592417 NR Description: lipase/hydrolase, putative [Arabidopsis thaliana]
  misc_feature (10)..(364): Homolog of NCBI NO: 21553940 NR Description: GDSL-motif lipase/hydrolase-like protein
  misc_feature (10)..(364): Homolog of NCBI NO: 15242458 NR Description: GDSL-motif lipase/hydrolase-like protein
  misc_feature (34)..(351): Homolog of NCBI NO: 30693137 NR Description: lipase family [Arabidopsis thaliana]
  misc_feature (1)..(364): Homolog of NCBI NO: 15220514 NR Description: lipase/hydrolase, putative
  misc_feature (1)..(364): Homolog of NCBI NO: 21594055 NR Description: lipase/hydrolase, putative [Arabidopsis thaliana]
  misc_feature (1)..(364): Homolog of NCBI NO: 15220512 NR Description: lipase/hydrolase, putative

SEQ ID NO: 31145 - protein, 199 aa, Arabidopsis thaliana; identical to SEQ ID NO: 27555
  peptide (1)..(199): Ceres Seq. ID no. 12357671
  misc_feature (1)..(179): Pfam Name: GDSL-like Lipase/Acylhydrolase Pfam Description: GDSL-like Lipase/Acylhydrolase
  misc_feature (1)..(186): Homolog of NCBI NO: 30693137 NR Description: lipase family [Arabidopsis thaliana]
  misc_feature (1)..(199): Homolog of NCBI NO: 21553940 NR Description: GDSL-motif lipase/hydrolase-like protein
  misc_feature (1)..(199): Homolog of NCBI NO: 15242458 NR Description: GDSL-motif lipase/hydrolase-like protein
  misc_feature (1)..(199): Homolog of NCBI NO: 21618199 NR Description: GDSL-motif lipase/hydrolase-like protein
  misc_feature (1)..(199): Homolog of NCBI NO: 18415211 NR Description: Expressed protein
  misc_feature (1)..(199): Homolog of NCBI NO: 7485419 NR Description: hypothetical protein F13C5.140 - Arabidopsis
  misc_feature (1)..(199): Homolog of NCBI NO: 21592417 NR Description: lipase/hydrolase, putative [Arabidopsis thaliana]
  misc_feature (1)..(199): Homolog of NCBI NO: 15220514 NR Description: lipase/hydrolase, putative
  misc_feature (1)..(199): Homolog of NCBI NO: 21594055 NR Description: lipase/hydrolase, putative [Arabidopsis thaliana]
  misc_feature (1)..(199): Homolog of NCBI NO: 15220512 NR Description: lipase/hydrolase, putative

SEQ ID NO: 31146 - protein, 188 aa, Arabidopsis thaliana; identical to SEQ ID NO: 27556
  peptide (1)..(188): Ceres Seq. ID no. 12357672
  misc_feature (1)..(168): Pfam Name: GDSL-like Lipase/Acylhydrolase Pfam Description: GDSL-like Lipase/Acylhydrolase
  misc_feature (1)..(175): Homolog of NCBI NO: 30693137 NR Description: lipase family [Arabidopsis thaliana]
  misc_feature (1)..(188): Homolog of NCBI NO: 21553940 NR Description: GDSL-motif lipase/hydrolase-like protein
  misc_feature (1)..(188): Homolog of NCBI NO: 15242458 NR Description: GDSL-motif lipase/hydrolase-like protein
  misc_feature (1)..(188): Homolog of NCBI NO: 21618199 NR Description: GDSL-motif lipase/hydrolase-like protein
  misc_feature (1)..(188): Homolog of NCBI NO: 18415211 NR Description: Expressed protein
  misc_feature (1)..(188): Homolog of NCBI NO: 7485419 NR Description: hypothetical protein F13C5.140 - Arabidopsis
  misc_feature (1)..(188): Homolog of NCBI NO: 21592417 NR Description: lipase/hydrolase, putative [Arabidopsis thaliana]
  misc_feature (1)..(188): Homolog of NCBI NO: 15220514 NR Description: lipase/hydrolase, putative
  misc_feature (1)..(188): Homolog of NCBI NO: 21594055 NR Description: lipase/hydrolase, putative [Arabidopsis thaliana]
  misc_feature (1)..(188): Homolog of NCBI NO: 15220512 NR Description: lipase/hydrolase, putative

SEQ ID NO: 31147 - DNA, 1208 bp, Arabidopsis thaliana; identical to SEQ ID NO: 27557
  misc_feature (1)..(1208): Ceres Seq. ID no. 12348436
  misc_feature: MA Experiment ID: 108577 Result: Up-regulated in Transcription
  misc_feature: MA Experiment 108577 PARAMETER Experiment Name: At_42deg_Heat_cDNA_P Parameter: Temperature (deg C) Value: 42 vs. 22
  misc_feature: MA Experiment 108577 PARAMETER Experiment Name: At_42deg_Heat_cDNA_P Parameter: Timepoint (hr) Value: 6
  misc_feature: MA Experiment 108577 PARAMETER Experiment Name: At_42deg_Heat_cDNA_P Parameter: Tissue Value: Aerial
  misc_feature: Phenotype: ROSETTE LEAVES Disorganized Rosette-Disorganized Rosette
  misc_feature: Phenotype: ROSETTE LEAVES Shape-Lanceolate
  misc_feature: Phenotype: WHOLE PLANT Size-Small
  misc_feature: Phenotype: INFLORESCENCE Flowering Time-Late Flowering
  misc_feature: Phenotype: ROSETTE LEAVES Shape-Serrate
  misc_feature: Phenotype: WHOLE PLANT Size-Small
  misc_feature: Phenotype: WHOLE PLANT Size-Small
  misc_feature: Phenotype: WHOLE PLANT Size-Small

SEQ ID NO: 31148 - protein, 172 aa, Arabidopsis thaliana; identical to SEQ ID NO: 27558
  peptide (1)..(172): Ceres Seq. ID no. 12348437
  misc_feature (1)..(145): Pfam Name: TatD related DNase Pfam Description: TatD related DNase
  misc_feature (1)..(59): Homolog of NCBI NO: 16077107 NR Description: similar to hypothetical proteins [Bacillus
  misc_feature (1)..(56): Homolog of NCBI NO: 23028677 NR Description: hypothetical protein [Microbulbifer degradans
  misc_feature (1)..(64): Homolog of NCBI NO: 22537921 NR Description: deoxyribonuclease, TatD family [Streptococcus
  misc_feature (1)..(64): Homolog of NCBI NO: 23055931 NR Description: hypothetical protein [Geobacter metallireducens]
  misc_feature (1)..(85): Homolog of NCBI NO: 39998376 NR Description: hydrolase, TatD family [Geobacter sulfurreducens
  misc_feature (85)..(154): Homolog of NCBI NO: 15228573 NR Description: unknown protein; protein id: At3g03500.1
  misc_feature (1)..(86): Homolog of NCBI NO: 15228573 NR Description: unknown protein; protein id: At3g03500.1
  misc_feature (1)..(150): Homolog of NCBI NO: 38345538 NR Description: OSJNBa0020J04.13 [Oryza sativa (japonica
  misc_feature (1)..(172): Homolog of NCBI NO: 11357936 NR Description: hypothetical protein K10A8_50 - Arabidopsis
  misc_feature (1)..(172): Homolog of NCBI NO: 18418353 NR Description: putative protein

SEQ ID NO: 31149 - protein, 162 aa, Arabidopsis thaliana; identical to SEQ ID NO: 27559
  peptide (1)..(162): Ceres Seq. ID no. 12348438
  misc_feature (1)..(135): Pfam Name: TatD related DNase Pfam Description: TatD related DNase
  misc_feature (1)..(49): Homolog of NCBI NO: 16077107 NR Description: similar to hypothetical proteins [Bacillus
  misc_feature (1)..(46): Homolog of NCBI NO: 23028677 NR Description: hypothetical protein [Microbulbifer degradans
  misc_feature (1)..(54): Homolog of NCBI NO: 22537921 NR Description: deoxyribonuclease, TatD family [Streptococcus
  misc_feature (1)..(54): Homolog of NCBI NO: 23055931 NR Description: hypothetical protein [Geobacter metallireducens]
  misc_feature (1)..(75): Homolog of NCBI NO: 39998376 NR Description: hydrolase, TatD family [Geobacter sulfurreducens
  misc_feature (75)..(144): Homolog of NCBI NO: 15228573 NR Description: unknown protein; protein id: At3g03500.1
  misc_feature (1)..(76): Homolog of NCBI NO: 15228573 NR Description: unknown protein; protein id: At3g03500.1
  misc_feature (1)..(140): Homolog of NCBI NO: 38345538 NR Description: OSJNBa0020J04.13 [Oryza sativa (japonica
  misc_feature (1)..(162): Homolog of NCBI NO: 11357936 NR Description: hypothetical protein K10A8_50 - Arabidopsis
  misc_feature (1)..(162): Homolog of NCBI NO: 18418353 NR Description: putative protein

SEQ ID NO: 31150 - protein, 144 aa, Arabidopsis thaliana; identical to SEQ ID NO: 27560
  peptide (1)..(144): Ceres Seq. ID no. 12348439
  misc_feature (1)..(117): Pfam Name: TatD related DNase Pfam Description: TatD related DNase
  misc_feature (1)..(31): Homolog of NCBI NO: 16077107 NR Description: similar to hypothetical proteins [Bacillus
  misc_feature (1)..(28): Homolog of NCBI NO: 23028677 NR Description: hypothetical protein [Microbulbifer degradans
  misc_feature (1)..(36): Homolog of NCBI NO: 22537921 NR Description: deoxyribonuclease, TatD family [Streptococcus
  misc_feature (1)..(36): Homolog of NCBI NO: 23055931 NR Description: hypothetical protein [Geobacter metallireducens]
  misc_feature (1)..(57): Homolog of NCBI NO: 39998376 NR Description: hydrolase, TatD family [Geobacter sulfurreducens
  misc_feature (57)..(126): Homolog of NCBI NO: 15228573 NR Description: unknown protein; protein id: At3g03500.1
  misc_feature (1)..(58): Homolog of NCBI NO: 15228573 NR Description: unknown protein; protein id: At3g03500.1
  misc_feature (1)..(122): Homolog of NCBI NO: 38345538 NR Description: OSJNBa0020J04.13 [Oryza sativa (japonica
  misc_feature (1)..(144): Homolog of NCBI NO: 11357936 NR Description: hypothetical protein K10A8_50 - Arabidopsis
  misc_feature (1)..(144): Homolog of NCBI NO: 18418353 NR Description: putative protein

SEQ ID NO: 31151 - DNA, 1518 bp, Arabidopsis thaliana; identical to SEQ ID NO: 27561
  misc_feature (1)..(1518): Ceres Seq. ID no. 12466440
  misc_feature: MA Experiment ID: 108435 Result: Down-regulated in Transcription
  misc_feature: MA Experiment 108435 PARAMETER Experiment Name: At_stm_Mutants_cDNA_P Parameter: Plant Line Value: wt Landsburg vs stm
  misc_feature: MA Experiment 108435 PARAMETER Experiment Name: At_stm_Mutants_cDNA_P Parameter: Tissue Value: Shoot Apical Meristem Region
  misc_feature: MA Experiment ID: 108462 Result: Up-regulated in Transcription
  misc_feature: MA Experiment 108462 PARAMETER Experiment Name: At_Germinating_Seeds_cDNA_P Parameter: Age (day) Value: 2 vs. 0
  misc_feature: MA Experiment 108462 PARAMETER Experiment Name: At_Germinating_Seeds_cDNA_P Parameter: Tissue Value: Germinating Seeds
  misc_feature: MA Experiment ID: 108463 Result: Up-regulated in Transcription
  misc_feature: MA Experiment 108463 PARAMETER Experiment Name: At_Germinating_Seeds_cDNA_P Parameter: Age (day) Value: 3 vs. 0
  misc_feature: MA Experiment 108463 PARAMETER Experiment Name: At_Germinating_Seeds_cDNA_P Parameter: Tissue Value: Germinating Seeds
  misc_feature: MA Experiment ID: 108464 Result: Up-regulated in Transcription
  misc_feature: MA Experiment 108464 PARAMETER Experiment Name: At_Germinating_Seeds_cDNA_P Parameter: Age (day) Value: 4 vs. 0
  misc_feature: MA Experiment 108464 PARAMETER Experiment Name: At_Germinating_Seeds_cDNA_P Parameter: Tissue Value: Germinating Seeds
  misc_feature: MA Experiment ID: 108488 Result: Up-regulated in Transcription
  misc_feature: MA Experiment ID: 108594 Result: Down-regulated in Transcription
  misc_feature: MA Experiment 108594 PARAMETER Experiment Name: At_Ler-rhl_Root_cDNA_P Parameter: Plant Line Value: null
  misc_feature: MA Experiment ID: 108595 Result: Down-regulated in Transcription
  misc_feature: MA Experiment 108595 PARAMETER Experiment Name: At_Ler-pi_Ovule_cDNA_P Parameter: Plant Line Value: null
  misc_feature: MA Experiment ID: 20000030 Result: Down-regulated in Transcription
  misc_feature: MA Experiment 20000030 PARAMETER Experiment Name: At_CS6630_Roots_cDNA_P Parameter: Plant Line Value: CS6630 vs. WS
  misc_feature: MA Experiment 20000030 PARAMETER Experiment Name: At_CS6630_Roots_cDNA_P Parameter: Tissue Value: Roots
  misc_feature: MA Experiment ID: 20000087 Result: Down-regulated in Transcription
  misc_feature: MA Experiment 20000087 PARAMETER Experiment Name: At_100uM_ABA_Mutants_cDNA_P Parameter: Plant Line Value: WS
  misc_feature: MA Experiment 20000087 PARAMETER Experiment Name: At_100uM_ABA_Mutants_cDNA_P Parameter: Timepoint (hr) Value: 6
  misc_feature: MA Experiment 20000087 PARAMETER Experiment Name: At_100uM_ABA_Mutants_cDNA_P Parameter: Tissue Value: Aerial
  misc_feature: MA Experiment 20000087 PARAMETER Experiment Name: At_100uM_ABA_Mutants_cDNA_P Parameter: Treatment Value: 100uM ABA vs. No Treatment
  misc_feature: MA Experiment ID: 20000117 Result: Down-regulated in Transcription
  misc_feature: MA Experiment 20000117 PARAMETER Experiment Name: At_100uM_ABA_Mutants_cDNA_P Parameter: Plant Line Value: Columbia
  misc_feature: MA Experiment 20000117 PARAMETER Experiment Name: At_100uM_ABA_Mutants_cDNA_P Parameter: Timepoint (hr) Value: 6
  misc_feature: MA Experiment 20000117 PARAMETER Experiment Name: At_100uM_ABA_Mutants_cDNA_P Parameter: Tissue Value: Aerial
  misc_feature: MA Experiment 20000117 PARAMETER Experiment Name: At_100uM_ABA_Mutants_cDNA_P Parameter: Treatment Value: 100uM ABA vs. No Treatment
  misc_feature: MA Experiment ID: 20000179 Result: Up-regulated in Transcription
  misc_feature: MA Experiment 20000179 PARAMETER Experiment Name: At_Germinating_Seeds_P Parameter: Age (hr) Value: 6 vs. 0
  misc_feature: MA Experiment 20000179 PARAMETER Experiment Name: At_Germinating_Seeds_P Parameter: Tissue Value: Germinating Seeds
  misc_feature: MA Experiment ID: 20000180 Result: Up-regulated in Transcription
  misc_feature: MA Experiment 20000180 PARAMETER Experiment Name: At_Germinating_Seeds_P Parameter: Age (hr) Value: 24 vs. 0
  misc_feature: MA Experiment 20000180 PARAMETER Experiment Name: At_Germinating_Seeds_P Parameter: Tissue Value: Germinating Seeds
  misc_feature: MA Experiment ID: 20000185 Result: Down-regulated in Transcription
  misc_feature: MA Experiment 20000185 PARAMETER Experiment Name: At_Roots__P Parameter: Age (day) Value: 7 vs. 21
  misc_feature: MA Experiment 20000185 PARAMETER Experiment Name: At_Roots__P Parameter: Organism Value: A. thaliana
  misc_feature: MA Experiment 20000185 PARAMETER Experiment Name: At_Roots__P Parameter: Tissue Value: Roots vs. Whole Plant
  misc_feature: MA Experiment ID: 20000227 Result: Down-regulated in Transcription
  misc_feature: MA Experiment 20000227 PARAMETER Experiment Name: At_Root-Tips-vs-Tops_P Parameter: Tissue Value: Root Tips vs. Root Tops
  misc_feature: MA Experiment ID: 20000269 Result: Down-regulated in Transcription
  misc_feature: MA Experiment 20000269 PARAMETER Experiment Name: At_1mM_KNO3_L-vs-H_Roots_P Parameter: Age (day) Value: 7,10,12
  misc_feature: MA Experiment 20000269 PARAMETER Experiment Name: At_1mM_KNO3_L-vs-H_Roots_P Parameter: Organism Value: A. thaliana
  misc_feature: MA Experiment 20000269 PARAMETER Experiment Name: At_1mM_KNO3_L-vs-H_Roots_P Parameter: Plant Line Value: WS
  misc_feature: MA Experiment 20000269 PARAMETER Experiment Name: At_1mM_KNO3_L-vs-H_Roots_P Parameter: Timepoint (day) Value: 7,10,12
  misc_feature: MA Experiment 20000269 PARAMETER Experiment Name: At_1mM_KNO3_L-vs-H_Roots_P Parameter: Tissue Value: Roots
  misc_feature: MA Experiment 20000269 PARAMETER Experiment Name: At_1mM_KNO3_L-vs-H_Roots_P Parameter: Treatment Value: 1mM KNO3 vs. 50mM KNO3
  misc_feature: MA Experiment ID: 20000437 Result: Down-regulated in Transcription
  misc_feature: MA Experiment 20000437 PARAMETER Experiment Name: At_Drought_P Parameter: Age (day) Value: 8
  misc_feature: MA Experiment 20000437 PARAMETER Experiment Name: At_Drought_P Parameter: Organism Value: A. thaliana
  misc_feature: MA Experiment 20000437 PARAMETER Experiment Name: At_Drought_P Parameter: Plant Line Value: WS
  misc_feature: MA Experiment 20000437 PARAMETER Experiment Name: At_Drought_P Parameter: Timepoint (hr) Value: 24
  misc_feature: MA Experiment 20000437 PARAMETER Experiment Name: At_Drought_P Parameter: Tissue Value: Whole Plant
  misc_feature: MA Experiment 20000437 PARAMETER Experiment Name: At_Drought_P Parameter: Treatment Value: Drought vs. No Drought
  misc_feature: MA Experiment ID: 20000438 Result: Up-regulated in Transcription
  misc_feature: MA Experiment 20000438 PARAMETER Experiment Name: At_Shoots__P Parameter: Age (day) Value: 14
  misc_feature: MA Experiment 20000438 PARAMETER Experiment Name: At_Shoots__P Parameter: Tissue Value: Shoots vs. Whole Plant
  misc_feature: MA Experiment ID: 20000439 Result: Down-regulated in Transcription
  misc_feature: MA Experiment 20000439 PARAMETER Experiment Name: At_Roots__P Parameter: Age (day) Value: 14 vs. 21
  misc_feature: MA Experiment 20000439 PARAMETER Experiment Name: At_Roots__P Parameter: Organism Value: A. thaliana
  misc_feature: MA Experiment 20000439 PARAMETER Experiment Name: At_Roots__P Parameter: Tissue Value: Roots vs. Whole Plant
  misc_feature: MA Experiment ID: 20000451 Result: Down-regulated in Transcription
  misc_feature: MA Experiment 20000451 PARAMETER Experiment Name: At_CS6879_Shoots-Roots_P Parameter: Age (day) Value: 14
  misc_feature: MA Experiment 20000451 PARAMETER Experiment Name: At_CS6879_Shoots-Roots_P Parameter: Organism Value: A. thaliana
  misc_feature: MA Experiment 20000451 PARAMETER Experiment Name: At_CS6879_Shoots-Roots_P Parameter: Plant Line Value: CS6879 vs. WS
  misc_feature: MA Experiment 20000451 PARAMETER Experiment Name: At_CS6879_Shoots-Roots_P Parameter: Tissue Value: Roots
  misc_feature: MA Experiment ID: 20000496 Result: Down-regulated in Transcription
  misc_feature: MA Experiment 20000496 PARAMETER Experiment Name: At_Guard_Cells_P Parameter: Harvest Date Value: 7/19/2002
  misc_feature: MA Experiment 20000496 PARAMETER Experiment Name: At_Guard_Cells_P Parameter: Organism Value: Canola
  misc_feature: MA Experiment 20000496 PARAMETER Experiment Name: At_Guard_Cells_P Parameter: Tissue Value: Guard Cells vs. Leaves
  misc_feature: MA Experiment ID: 20000794 Result: Down-regulated in Transcription
  misc_feature: MA Experiment 20000794 PARAMETER Experiment Name: At_Petals_P Parameter: Age (day) Value: 23-25 days
  misc_feature: MA Experiment 20000794 PARAMETER Experiment Name: At_Petals_P Parameter: Plant Line Value: WS
  misc_feature: MA Experiment 20000794 PARAMETER Experiment Name: At_Petals_P Parameter: Tissue Value: Petals vs. Whole plant
  misc_feature: MA Experiment ID: 20001248 Result: Down-regulated in Transcription
  misc_feature: MA Experiment 20001248 PARAMETER Experiment Name: At_Far-red-induction_P Parameter: Age (day) Value: 7
  misc_feature: MA Experiment 20001248 PARAMETER Experiment Name: At_Far-red-induction_P Parameter: Light Value: Far-red vs. White
  misc_feature: MA Experiment 20001248 PARAMETER Experiment Name: At_Far-red-induction_P Parameter: Organism Value: A. thaliana
  misc_feature: MA Experiment 20001248 PARAMETER Experiment Name: At_Far-red-induction_P Parameter: Plant Line Value: Columbia
  misc_feature: MA Experiment 20001248 PARAMETER Experiment Name: At_Far-red-induction_P Parameter: Timepoint (hr) Value: 4
  misc_feature: MA Experiment 20001248 PARAMETER Experiment Name: At_Far-red-induction_P Parameter: Tissue Value: Whole Plant
  misc_feature: MA Experiment ID: 20001450 Result: Down-regulated in Transcription
  misc_feature: MA Experiment 20001450 PARAMETER Experiment Name: At_Far-red-induction_P Parameter: Age (day) Value: 7
  misc_feature: MA Experiment 20001450 PARAMETER Experiment Name: At_Far-red-induction_P Parameter: Light Value: Far-red vs. White
  misc_feature: MA Experiment 20001450 PARAMETER Experiment Name: At_Far-red-induction_P Parameter: Organism Value: A. thaliana
  misc_feature: MA Experiment 20001450 PARAMETER Experiment Name: At_Far-red-induction_P Parameter: Plant Line Value: Columbia
  misc_feature: MA Experiment 20001450 PARAMETER Experiment Name: At_Far-red-induction_P Parameter: Timepoint (hr) Value: 8
  misc_feature: MA Experiment 20001450 PARAMETER Experiment Name: At_Far-red-induction_P Parameter: Tissue Value: Whole Plant
  misc_feature: MA Experiment ID: 20001451 Result: Down-regulated in Transcription
  misc_feature: MA Experiment 20001451 PARAMETER Experiment Name: At_Far-red-induction_P Parameter: Age (day) Value: 7
  misc_feature: MA Experiment 20001451 PARAMETER Experiment Name: At_Far-red-induction_P Parameter: Light Value: Far-red vs. White
  misc_feature: MA Experiment 20001451 PARAMETER Experiment Name: At_Far-red-induction_P Parameter: Organism Value: A. thaliana
  misc_feature: MA Experiment 20001451 PARAMETER Experiment Name: At_Far-red-induction_P Parameter: Plant Line Value: Columbia
  misc_feature: MA Experiment 20001451 PARAMETER Experiment Name: At_Far-red-induction_P Parameter: Timepoint (hr) Value: 24
  misc_feature: MA Experiment 20001451 PARAMETER Experiment Name: At_Far-red-induction_P Parameter: Tissue Value: Whole Plant
  misc_feature: MA Experiment ID: 20001757 Result: Up-regulated in Transcription
  misc_feature: MA Experiment 20001757 PARAMETER Experiment Name: At_50mM_NH4NO3_L-to-H_P Parameter: Timepoint (hr) Value: 6
  misc_feature: MA Experiment 20001757 PARAMETER Experiment Name: At_50mM_NH4NO3_L-to-H_P Parameter: Tissue Value: Leaf
  misc_feature: MA Experiment 20001757 PARAMETER Experiment Name: At_50mM_NH4NO3_L-to-H_P Parameter: Treatment Value: 50mM NH4NO3 vs 100mM Mannitol
  misc_feature: MA Experiment ID: 20001904 Result: Down-regulated in Transcription
  misc_feature: MA Experiment 20001904 PARAMETER Experiment Name: At_Drought_Reproduction_P Parameter: Age (day) Value: 37
  misc_feature: MA Experiment 20001904 PARAMETER Experiment Name: At_Drought_Reproduction_P Parameter: Organism Value: A. thaliana
  misc_feature: MA Experiment 20001904 PARAMETER Experiment Name: At_Drought_Reproduction_P Parameter: Plant Line Value: WS
  misc_feature: MA Experiment 20001904 PARAMETER Experiment Name: At_Drought_Reproduction_P Parameter: Timepoint (day) Value: 7
  misc_feature: MA Experiment 20001904 PARAMETER Experiment Name: At_Drought_Reproduction_P Parameter: Tissue Value: Rosettes
  misc_feature: MA Experiment 20001904 PARAMETER Experiment Name: At_Drought_Reproduction_P Parameter: Treatment Value: Drought vs. No Drought
  misc_feature: MA Experiment ID: 20001905 Result: Down-regulated in Transcription
  misc_feature: MA Experiment 20001905 PARAMETER Experiment Name: At_Drought_Reproduction_P Parameter: Age (day) Value: 40
  misc_feature: MA Experiment 20001905 PARAMETER Experiment Name: At_Drought_Reproduction_P Parameter: Organism Value: A. thaliana
  misc_feature: MA Experiment 20001905 PARAMETER Experiment Name: At_Drought_Reproduction_P Parameter: Plant Line Value: WS
  misc_feature: MA Experiment 20001905 PARAMETER Experiment Name: At_Drought_Reproduction_P Parameter: Timepoint (day) Value: 10
  misc_feature: MA Experiment 20001905 PARAMETER Experiment Name: At_Drought_Reproduction_P Parameter: Tissue Value: Rosettes
  misc_feature: MA Experiment 20001905 PARAMETER Experiment Name: At_Drought_Reproduction_P Parameter: Treatment Value: Drought vs. No Drought
  misc_feature: MA Experiment ID: 20001906 Result: Down-regulated in Transcription
  misc_feature: MA Experiment 20001906 PARAMETER Experiment Name: At_Drought_Reproduction_P Parameter: Age (day) Value: 35
  misc_feature: MA Experiment 20001906 PARAMETER Experiment Name: At_Drought_Reproduction_P Parameter: Organism Value: A. thaliana
  misc_feature: MA Experiment 20001906 PARAMETER Experiment Name: At_Drought_Reproduction_P Parameter: Plant Line Value: WS
  misc_feature: MA Experiment 20001906 PARAMETER Experiment Name: At_Drought_Reproduction_P Parameter: Timepoint (day) Value: 5
  misc_feature: MA Experiment 20001906 PARAMETER Experiment Name: At_Drought_Reproduction_P Parameter: Tissue Value: Siliques
  misc_feature: MA Experiment 20001906 PARAMETER Experiment Name: At_Drought_Reproduction_P Parameter: Treatment Value: Drought vs. No Drought

SEQ ID NO: 31152 - protein, 373 aa, Arabidopsis thaliana; identical to SEQ ID NO: 27562
  peptide (1)..(373): Ceres Seq. ID no. 12466441
  misc_feature (51)..(372): Pfam Name: ATP synthase Pfam Description: ATP synthase
  misc_feature (40)..(371): Homolog of NCBI NO: 228698 NR Description: CF1 ATP synthase:SUBUNIT=gamma
  misc_feature (40)..(371): Homolog of NCBI NO: 114638 NR Description: ATP synthase gamma chain, chloroplast precursor
  misc_feature (5)..(371): Homolog of NCBI NO: 15218281 NR Description: ATP synthase gamma-subunit, putative
  misc_feature (1)..(371): Homolog of NCBI NO: 27818005 NR Description: OSJNBb0041J06.11 [Oryza sativa (japonica
  misc_feature (47)..(373): Homolog of NCBI NO: 755801 NR Description: ATP synthase [Spinacia oleracea]
  misc_feature (23)..(373): Homolog of NCBI NO: 114643 NR Description: ATP synthase gamma chain, chloroplast precursor
  misc_feature (1)..(368): Homolog of NCBI NO: 114640 NR Description: ATP synthase gamma chain, chloroplast precursor
  misc_feature (73)..(373): Homolog of NCBI NO: 5708095 NR Description: ATP synthase gamma chain, chloroplast precursor
  misc_feature (1)..(373): Homolog of NCBI NO: 231610 NR Description: ATP synthase gamma chain, chloroplast precursor
  misc_feature (1)..(373): Homolog of NCBI NO: 18412632 NR Description: coded for by A. thaliana cDNA AA041141

SEQ ID NO: 31153 - protein, 365 aa, Arabidopsis thaliana; identical to SEQ ID NO: 27563
  peptide (1)..(365): Ceres Seq. ID no. 12466442
  misc_feature (43)..(364): Pfam Name: ATP synthase Pfam Description: ATP synthase
  misc_feature (32)..(363): Homolog of NCBI NO: 228698 NR Description: CF1 ATP synthase:SUBUNIT=gamma
  misc_feature (32)..(363): Homolog of NCBI NO: 114638 NR Description: ATP synthase gamma chain, chloroplast precursor
  misc_feature (1)..(363): Homolog of NCBI NO: 15218281 NR Description: ATP synthase gamma-subunit, putative
  misc_feature (1)..(363): Homolog of NCBI NO: 27818005 NR Description: OSJNBb0041J06.11 [Oryza sativa (japonica
  misc_feature (39)..(365): Homolog of NCBI NO: 755801 NR Description: ATP synthase [Spinacia oleracea]
  misc_feature (15)..(365): Homolog of NCBI NO: 114643 NR Description: ATP synthase gamma chain, chloroplast precursor
  misc_feature (1)..(360): Homolog of NCBI NO: 114640 NR Description: ATP synthase gamma chain, chloroplast precursor
  misc_feature (65)..(365): Homolog of NCBI NO: 5708095 NR Description: ATP synthase gamma chain, chloroplast precursor
  misc_feature (1)..(365): Homolog of NCBI NO: 231610 NR Description: ATP synthase gamma chain, chloroplast precursor
  misc_feature (1)..(365): Homolog of NCBI NO: 18412632 NR Description: coded for by A. thaliana cDNA AA041141

SEQ ID NO: 31154 - protein, 301 aa, Arabidopsis thaliana; identical to SEQ ID NO: 27564
  peptide (1)..(301): Ceres Seq. ID no. 12466443
  misc_feature (1)..(300): Pfam Name: ATP synthase Pfam Description: ATP synthase
  misc_feature (1)..(299): Homolog of NCBI NO: 228698 NR Description: CF1 ATP synthase:SUBUNIT=gamma
  misc_feature (1)..(299): Homolog of NCBI NO: 114638 NR Description: ATP synthase gamma chain, chloroplast precursor
  misc_feature (1)..(299): Homolog of NCBI NO: 15218281 NR Description: ATP synthase gamma-subunit, putative
  misc_feature (1)..(299): Homolog of NCBI NO: 27818005 NR Description: OSJNBb0041J06.11 [Oryza sativa (japonica
  misc_feature (1)..(301): Homolog of NCBI NO: 755801 NR Description: ATP synthase [Spinacia oleracea]
  misc_feature (1)..(301): Homolog of NCBI NO: 114643 NR Description: ATP synthase gamma chain, chloroplast precursor
  misc_feature (1)..(296): Homolog of NCBI NO: 114640 NR Description: ATP synthase gamma chain, chloroplast precursor
  misc_feature (1)..(301): Homolog of NCBI NO: 5708095 NR Description: ATP synthase gamma chain, chloroplast precursor
  misc_feature (1)..(301): Homolog of NCBI NO: 231610 NR Description: ATP synthase gamma chain, chloroplast precursor
  misc_feature (1)..(301): Homolog of NCBI NO: 18412632 NR Description: coded for by A. thaliana cDNA AA041141

SEQ ID NO: 31155 - DNA, 1234 bp, Arabidopsis thaliana; identical to SEQ ID NO: 27565
  misc_feature (1)..(1234): Ceres Seq. ID no. 12581463
  misc_feature: MA Experiment ID: 108434 Result: Down-regulated in Transcription
  misc_feature: MA Experiment 108434 PARAMETER Experiment Name: At_Root_Tips_cDNA_P Parameter: Tissue Value: Root Tips
  misc_feature: MA Experiment ID: 108462 Result: Up-regulated in Transcription
  misc_feature: MA Experiment 108462 PARAMETER Experiment Name: At_Germinating_Seeds_cDNA_P Parameter: Age (day) Value: 2 vs. 0
  misc_feature: MA Experiment 108462 PARAMETER Experiment Name: At_Germinating_Seeds_cDNA_P Parameter: Tissue Value: Germinating Seeds
  misc_feature: MA Experiment ID: 108463 Result: Up-regulated in Transcription
  misc_feature: MA Experiment 108463 PARAMETER Experiment Name: At_Germinating_Seeds_cDNA_P Parameter: Age (day) Value: 3 vs. 0
  misc_feature: MA Experiment 108463 PARAMETER Experiment Name: At_Germinating_Seeds_cDNA_P Parameter: Tissue Value: Germinating Seeds
  misc_feature: MA Experiment ID: 108464 Result: Up-regulated in Transcription
  misc_feature: MA Experiment 108464 PARAMETER Experiment Name: At_Germinating_Seeds_cDNA_P Parameter: Age (day) Value: 4 vs. 0
  misc_feature: MA Experiment 108464 PARAMETER Experiment Name: At_Germinating_Seeds_cDNA_P Parameter: Tissue Value: Germinating Seeds
  misc_feature: MA Experiment ID: 108561 Result: Up-regulated in Transcription
  misc_feature: MA Experiment 108561 PARAMETER Experiment Name: At_100uM_ABA_cDNA_P Parameter: Timepoint (hr) Value: 6
  misc_feature: MA Experiment 108561 PARAMETER Experiment Name: At_100uM_ABA_cDNA_P Parameter: Tissue Value: Aerial
  misc_feature: MA Experiment 108561 PARAMETER Experiment Name: At_100uM_ABA_cDNA_P Parameter: Treatment Value: 100uM ABA vs. No Treatment
  misc_feature: MA Experiment ID: 108569 Result: Up-regulated in Transcription
  misc_feature: MA Experiment 108569 PARAMETER Experiment Name: At_0.001%_MeJA__cDNA_P Parameter: Timepoint (hr) Value: 6
  misc_feature: MA Experiment 108569 PARAMETER Experiment Name: At_0.001%_MeJA__cDNA_P Parameter: Tissue Value: Aerial
  misc_feature: MA Experiment 108569 PARAMETER Experiment Name: At_0.001%_MeJA__cDNA_P Parameter: Treatment Value: 0.001% MeJA vs. No Treatment
  misc_feature: MA Experiment ID: 108572 Result: Up-regulated in Transcription
  misc_feature: MA Experiment 108572 PARAMETER Experiment Name: At_Drought_cDNA_P Parameter: Timepoint (hr) Value: 1
  misc_feature: MA Experiment 108572 PARAMETER Experiment Name: At_Drought_cDNA_P Parameter: Tissue Value: Aerial
  misc_feature: MA Experiment 108572 PARAMETER Experiment Name: At_Drought_cDNA_P Parameter: Treatment Value: Drought vs. No Drought
  misc_feature: MA Experiment ID: 108573 Result: Up-regulated in Transcription
  misc_feature: MA Experiment 108573 PARAMETER Experiment Name: At_Drought_cDNA_P Parameter: Timepoint (hr) Value: 6
  misc_feature: MA Experiment 108573 PARAMETER Experiment Name: At_Drought_cDNA_P Parameter: Tissue Value: Aerial
  misc_feature: MA Experiment 108573 PARAMETER Experiment Name: At_Drought_cDNA_P Parameter: Treatment Value: Drought vs. No Drought
  misc_feature: MA Experiment ID: 108577 Result: Up-regulated in Transcription
  misc_feature: MA Experiment 108577 PARAMETER Experiment Name: At_42deg_Heat_cDNA_P Parameter: Temperature (deg C) Value: 42 vs. 22
  misc_feature: MA Experiment 108577 PARAMETER Experiment Name: At_42deg_Heat_cDNA_P Parameter: Timepoint (hr) Value: 6
  misc_feature: MA Experiment 108577 PARAMETER Experiment Name: At_42deg_Heat_cDNA_P Parameter: Tissue Value: Aerial
  misc_feature: MA Experiment ID: 108594 Result: Down-regulated in Transcription
  misc_feature: MA Experiment 108594 PARAMETER Experiment Name: At_Ler-rhl_Root_cDNA_P Parameter: Plant Line Value: null
  misc_feature: MA Experiment ID: 108595 Result: Down-regulated in Transcription
  misc_feature: MA Experiment 108595 PARAMETER Experiment Name: At_Ler-pi_Ovule_cDNA_P Parameter: Plant Line Value: null
  misc_feature: MA Experiment ID: 108668 Result: Up-regulated in Transcription
  misc_feature: MA Experiment 108668 PARAMETER Experiment Name: At_2mM_SA_cDNA_P Parameter: Plant Line Value: WS
  misc_feature: MA Experiment 108668 PARAMETER Experiment Name: At_2mM_SA_cDNA_P Parameter: Timepoint (hr) Value: 6
  misc_feature: MA Experiment 108668 PARAMETER Experiment Name: At_2mM_SA_cDNA_P Parameter: Treatment Value: 2mM SA vs. No Treatment
  misc_feature: MA Experiment ID: 20000089 Result: Down-regulated in Transcription
  misc_feature: MA Experiment ID: 20000113 Result: Up-regulated in Transcription
  misc_feature: MA Experiment 20000113 PARAMETER Experiment Name: At_42deg_Heat_cDNA_P Parameter: Temperature (deg C) Value: 42 vs. 22
  misc_feature: MA Experiment 20000113 PARAMETER Experiment Name: At_42deg_Heat_cDNA_P Parameter: Timepoint (hr) Value: 8
  misc_feature: MA Experiment 20000113 PARAMETER Experiment Name: At_42deg_Heat_cDNA_P Parameter: Tissue Value: Aerial
  misc_feature: MA Experiment ID: 20000169 Result: Up-regulated in Transcription
  misc_feature: MA Experiment 20000169 PARAMETER Experiment Name: At_100uM_ABA_P Parameter: Age (day) Value: 14
  misc_feature: MA Experiment 20000169 PARAMETER Experiment Name: At_100uM_ABA_P Parameter: Organism Value: A. thaliana
  misc_feature: MA Experiment 20000169 PARAMETER Experiment Name: At_100uM_ABA_P Parameter: Plant Line Value: WS
  misc_feature: MA Experiment 20000169 PARAMETER Experiment Name: At_100uM_ABA_P Parameter: Timepoint (hr) Value: 6
  misc_feature: MA Experiment 20000169 PARAMETER Experiment Name: At_100uM_ABA_P Parameter: Tissue Value: Aerial
  misc_feature: MA Experiment 20000169 PARAMETER Experiment Name: At_100uM_ABA_P Parameter: Treatment Value: 100uM ABA vs. No Treatment
  misc_feature: MA Experiment ID: 20000180 Result: Up-regulated in Transcription
  misc_feature: MA Experiment 20000180 PARAMETER Experiment Name: At_Germinating_Seeds_P Parameter: Age (hr) Value: 24 vs. 0
  misc_feature: MA Experiment 20000180 PARAMETER Experiment Name: At_Germinating_Seeds_P Parameter: Tissue Value: Germinating Seeds
  misc_feature: MA Experiment ID: 20000182 Result: Up-regulated in Transcription
  misc_feature: MA Experiment 20000182 PARAMETER Experiment Name: At_2mM_SA_P Parameter: Age (day) Value: 14
  misc_feature: MA Experiment 20000182 PARAMETER Experiment Name: At_2mM_SA_P Parameter: Organism Value: A. thaliana
  misc_feature: MA Experiment 20000182 PARAMETER Experiment Name: At_2mM_SA_P Parameter: Plant Line Value: WS
  misc_feature: MA Experiment 20000182 PARAMETER Experiment Name: At_2mM_SA_P Parameter: Timepoint (hr) Value: 6
  misc_feature: MA Experiment 20000182 PARAMETER Experiment Name: At_2mM_SA_P Parameter: Tissue Value: Aerial
  misc_feature: MA Experiment 20000182 PARAMETER Experiment Name: At_2mM_SA_P Parameter: Treatment Value: 2mM SA vs. No Treatment
  misc_feature: MA Experiment ID: 20000234 Result: Down-regulated in Transcription
  misc_feature: MA Experiment 20000234 PARAMETER Experiment Name: At_Siliques_P Parameter: Age (day) Value: 21
  misc_feature: MA Experiment 20000234 PARAMETER Experiment Name: At_Siliques_P Parameter: Organism Value: A. thaliana
  misc_feature: MA Experiment 20000234 PARAMETER Experiment Name: At_Siliques_P Parameter: Plant Line Value: WS
  misc_feature: MA Experiment 20000234 PARAMETER Experiment Name: At_Siliques_P Parameter: Tissue Value: Less Than 5mm Siliques vs. Whole Plant
  misc_feature: MA Experiment ID: 20000451 Result: Down-regulated in Transcription
  misc_feature: MA Experiment 20000451 PARAMETER Experiment Name: At_CS6879_Shoots-Roots_P Parameter: Age (day) Value: 14
  misc_feature: MA Experiment 20000451 PARAMETER Experiment Name: At_CS6879_Shoots-Roots_P Parameter: Organism Value: A. thaliana
  misc_feature: MA Experiment 20000451 PARAMETER Experiment Name: At_CS6879_Shoots-Roots_P Parameter: Plant Line Value: CS6879 vs. WS
  misc_feature: MA Experiment 20000451 PARAMETER Experiment Name: At_CS6879_Shoots-Roots_P Parameter: Tissue Value: Roots
  misc_feature: MA Experiment ID: 20000506 Result: Up-regulated in Transcription
  misc_feature: MA Experiment 20000506 PARAMETER Experiment Name: At_Wounding_P Parameter: Organism Value: A. thaliana
  misc_feature: MA Experiment 20000506 PARAMETER Experiment Name: At_Wounding_P Parameter: Plant Line Value: WS
  misc_feature: MA Experiment 20000506 PARAMETER Experiment Name: At_Wounding_P Parameter: Timepoint (hr) Value: 6
  misc_feature: MA Experiment 20000506 PARAMETER Experiment Name: At_Wounding_P Parameter: Tissue Value: Aerial
  misc_feature: MA Experiment 20000506 PARAMETER Experiment Name: At_Wounding_P Parameter: Treatment Value: Wounding vs. No Wounding
  misc_feature: MA Experiment ID: 20001247 Result: Up-regulated in Transcription
  misc_feature: MA Experiment 20001247 PARAMETER Experiment Name: At_Far-red-induction_P Parameter: Age (day) Value: 7
  misc_feature: MA Experiment 20001247 PARAMETER Experiment Name: At_Far-red-induction_P Parameter: Light Value: Far-red vs. White
  misc_feature: MA Experiment 20001247 PARAMETER Experiment Name: At_Far-red-induction_P Parameter: Organism Value: A. thaliana
  misc_feature: MA Experiment 20001247 PARAMETER Experiment Name: At_Far-red-induction_P Parameter: Plant Line Value: Columbia
  misc_feature: MA Experiment 20001247 PARAMETER Experiment Name: At_Far-red-induction_P Parameter: Timepoint (hr) Value: 1
  misc_feature: MA Experiment 20001247 PARAMETER Experiment Name: At_Far-red-induction_P Parameter: Tissue Value: Whole Plant
  misc_feature: MA Experiment ID: 20001450 Result: Up-regulated in Transcription
  misc_feature: MA Experiment 20001450 PARAMETER Experiment Name: At_Far-red-induction_P Parameter: Age (day) Value: 7
  misc_feature: MA Experiment 20001450 PARAMETER Experiment Name: At_Far-red-induction_P Parameter: Light Value: Far-red vs. White
  misc_feature: MA Experiment 20001450 PARAMETER Experiment Name: At_Far-red-induction_P Parameter: Organism Value: A. thaliana
  misc_feature: MA Experiment 20001450 PARAMETER Experiment Name: At_Far-red-induction_P Parameter: Plant Line Value: Columbia
  misc_feature: MA Experiment 20001450 PARAMETER Experiment Name: At_Far-red-induction_P Parameter: Timepoint (hr) Value: 8
  misc_feature: MA Experiment 20001450 PARAMETER Experiment Name: At_Far-red-induction_P Parameter: Tissue Value: Whole Plant
  misc_feature: MA Experiment ID: 20001556 Result: Down-regulated in Transcription
  misc_feature: MA Experiment 20001556 PARAMETER Experiment Name: At_Drought_Soil_Dry_P Parameter: Age (day) Value: 26
  misc_feature: MA Experiment 20001556 PARAMETER Experiment Name: At_Drought_Soil_Dry_P Parameter: Organism Value: A. thaliana
  misc_feature: MA Experiment 20001556 PARAMETER Experiment Name: At_Drought_Soil_Dry_P Parameter: Plant Line Value: WS
  misc_feature: MA Experiment 20001556 PARAMETER Experiment Name: At_Drought_Soil_Dry_P Parameter: Post Timepoint (hr) Value: None
  misc_feature: MA Experiment 20001556 PARAMETER Experiment Name: At_Drought_Soil_Dry_P Parameter: Post-Treatment Value: None
  misc_feature: MA Experiment 20001556 PARAMETER Experiment Name: At_Drought_Soil_Dry_P Parameter: Timepoint (day) Value: 12
  misc_feature: MA Experiment 20001556 PARAMETER Experiment Name: At_Drought_Soil_Dry_P Parameter: Treatment Value: Drought vs. No Drought
  misc_feature: MA Experiment ID: 20001559 Result: Down-regulated in Transcription
  misc_feature: MA Experiment 20001559 PARAMETER Experiment Name: At_Drought_Soil_Dry_P Parameter: Age (day) Value: 28
  misc_feature: MA Experiment 20001559 PARAMETER Experiment Name: At_Drought_Soil_Dry_P Parameter: Organism Value: A. thaliana
  misc_feature: MA Experiment 20001559 PARAMETER Experiment Name: At_Drought_Soil_Dry_P Parameter: Plant Line Value: WS
  misc_feature: MA Experiment 20001559 PARAMETER Experiment Name: At_Drought_Soil_Dry_P Parameter: Post Timepoint (hr) Value: 29
  misc_feature: MA Experiment 20001559 PARAMETER Experiment Name: At_Drought_Soil_Dry_P Parameter: Post-Treatment Value: Re-Water vs. No Drought
  misc_feature: MA Experiment 20001559 PARAMETER Experiment Name: At_Drought_Soil_Dry_P Parameter: Timepoint (day) Value: 14
  misc_feature: MA Experiment 20001559 PARAMETER Experiment Name: At_Drought_Soil_Dry_P Parameter: Treatment Value: Drought vs. No Drought
  misc_feature: MA Experiment ID: 20001905 Result: Down-regulated in Transcription
  misc_feature: MA Experiment 20001905 PARAMETER Experiment Name: At_Drought_Reproduction_P Parameter: Age (day) Value: 40
  misc_feature: MA Experiment 20001905 PARAMETER Experiment Name: At_Drought_Reproduction_P Parameter: Organism Value: A. thaliana
  misc_feature: MA Experiment 20001905 PARAMETER Experiment Name: At_Drought_Reproduction_P Parameter: Plant Line Value: WS
  misc_feature: MA Experiment 20001905 PARAMETER Experiment Name: At_Drought_Reproduction_P Parameter: Timepoint (day) Value: 10
  misc_feature: MA Experiment 20001905 PARAMETER Experiment Name: At_Drought_Reproduction_P Parameter: Tissue Value: Rosettes
  misc_feature: MA Experiment 20001905 PARAMETER Experiment Name: At_Drought_Reproduction_P Parameter: Treatment Value: Drought vs. No Drought
  misc_feature: MA Experiment ID: 20001907 Result: Down-regulated in Transcription
  misc_feature: MA Experiment 20001907 PARAMETER Experiment Name: At_Drought_Reproduction_P Parameter: Age (day) Value: 37
  misc_feature: MA Experiment 20001907 PARAMETER Experiment Name: At_Drought_Reproduction_P Parameter: Organism Value: A. thaliana
  misc_feature: MA Experiment 20001907 PARAMETER Experiment Name: At_Drought_Reproduction_P Parameter: Plant Line Value: WS
  misc_feature: MA Experiment 20001907 PARAMETER Experiment Name: At_Drought_Reproduction_P Parameter: Timepoint (day) Value: 7
  misc_feature: MA Experiment 20001907 PARAMETER Experiment Name: At_Drought_Reproduction_P Parameter: Tissue Value: Siliques
  misc_feature: MA Experiment 20001907 PARAMETER Experiment Name: At_Drought_Reproduction_P Parameter: Treatment Value: Drought vs. No Drought
  misc_feature: MA Experiment ID: 20001908 Result: Down-regulated in Transcription
  misc_feature: MA Experiment 20001908 PARAMETER Experiment Name: At_Drought_Reproduction_P Parameter: Age (day) Value: 40
  misc_feature: MA Experiment 20001908 PARAMETER Experiment Name: At_Drought_Reproduction_P Parameter: Organism Value: A. thaliana
  misc_feature: MA Experiment 20001908 PARAMETER Experiment Name: At_Drought_Reproduction_P Parameter: Plant Line Value: WS
  misc_feature: MA Experiment 20001908 PARAMETER Experiment Name: At_Drought_Reproduction_P Parameter: Timepoint (day) Value: 10
  misc_feature: MA Experiment 20001908 PARAMETER Experiment Name: At_Drought_Reproduction_P Parameter: Tissue Value: Siliques
  misc_feature: MA Experiment 20001908 PARAMETER Experiment Name: At_Drought_Reproduction_P Parameter: Treatment Value: Drought vs. No Drought

SEQ ID NO: 31156 - protein, 286 aa, Arabidopsis thaliana; identical to SEQ ID NO: 27566
  peptide (1)..(286): Ceres Seq. ID no. 12581464
  misc_feature (44)..(273): Pfam Name: Major intrinsic protein Pfam Description: Major intrinsic protein
  misc_feature (1)..(286): Homolog of NCBI NO: 7209556 NR Description: plasma membrane aquaporin 1b [Raphanus sativus]
  misc_feature (1)..(286): Homolog of NCBI NO: 4467357 NR Description: PIP1b protein [Arabidopsis thaliana]
  misc_feature (1)..(286): Homolog of NCBI NO: 1199804 NR Description: transmembrane channel protein [Brassica oleracea]
  misc_feature (1)..(286): Homolog of NCBI NO: 10799095 NR Description: aquaporin PIP1b2 [Brassica oleracea]
  misc_feature (1)..(286): Homolog of NCBI NO: 15225913 NR Description: aquaporin (plasma membrane intrinsic protein 1B)
  misc_feature (1)..(286): Homolog of NCBI NO: 10799093 NR Description: aquaporin PIP1b1 [Brassica oleracea]
  misc_feature (1)..(286): Homolog of NCBI NO: 3551131 NR Description: plasma membrane aquaporin (PAQ1) [Raphanus
  misc_feature (1)..(286): Homolog of NCBI NO: 21594059 NR Description: plasma membrane intrinsic protein 1a [Arabidopsis
  misc_feature (1)..(286): Homolog of NCBI NO: 472873 NR Description: plasma membrane intrinsic protein 1a [Arabidopsis
  misc_feature (1)..(286): Homolog of NCBI NO: 15233109 NR Description: plasma membrane intrinsic protein 1a

SEQ ID NO: 31157 - protein, 214 aa, Arabidopsis thaliana; identical to SEQ ID NO: 27567
  peptide (1)..(214): Ceres Seq. ID no. 12581465
  misc_feature (1)..(201): Pfam Name: Major intrinsic protein Pfam Description: Major intrinsic protein
  misc_feature (1)..(214): Homolog of NCBI NO: 7209556 NR Description: plasma membrane aquaporin 1b [Raphanus sativus]
  misc_feature (1)..(214): Homolog of NCBI NO: 4467357 NR Description: PIP1b protein [Arabidopsis thaliana]
  misc_feature (1)..(214): Homolog of NCBI NO: 1199804 NR Description: transmembrane channel protein [Brassica oleracea]
  misc_feature (1)..(214): Homolog of NCBI NO: 10799095 NR Description: aquaporin PIP1b2 [Brassica oleracea]
  misc_feature (1)..(214): Homolog of NCBI NO: 15225913 NR Description: aquaporin (plasma membrane intrinsic protein 1B)
  misc_feature (1)..(214): Homolog of NCBI NO: 10799093 NR Description: aquaporin PIP1b1 [Brassica oleracea]
  misc_feature (1)..(214): Homolog of NCBI NO: 3551131 NR Description: plasma membrane aquaporin (PAQ1) [Raphanus
  misc_feature (1)..(214): Homolog of NCBI NO: 21594059 NR Description: plasma membrane intrinsic protein 1a [Arabidopsis
  misc_feature (1)..(214): Homolog of NCBI NO: 472873 NR Description: plasma membrane intrinsic protein 1a [Arabidopsis
  misc_feature (1)..(214): Homolog of NCBI NO: 15233109 NR Description: plasma membrane intrinsic protein 1a

SEQ ID NO: 31158 - protein, 206 aa, Arabidopsis thaliana; identical to SEQ ID NO: 27568
  peptide (1)..(206): Ceres Seq. ID no. 12581466
  misc_feature (1)..(193): Pfam Name: Major intrinsic protein Pfam Description: Major intrinsic protein
  misc_feature (1)..(206): Homolog of NCBI NO: 7209556 NR Description: plasma membrane aquaporin 1b [Raphanus sativus]
  misc_feature (1)..(206): Homolog of NCBI NO: 4467357 NR Description: PIP1b protein [Arabidopsis thaliana]
  misc_feature (1)..(206): Homolog of NCBI NO: 1199804 NR Description: transmembrane channel protein [Brassica oleracea]
  misc_feature (1)..(206): Homolog of NCBI NO: 10799095 NR Description: aquaporin PIP1b2 [Brassica oleracea]
  misc_feature (1)..(206): Homolog of NCBI NO: 15225913 NR Description: aquaporin (plasma membrane intrinsic protein 1B)
  misc_feature (1)..(206): Homolog of NCBI NO: 10799093 NR Description: aquaporin PIP1b1 [Brassica oleracea]
  misc_feature (1)..(206): Homolog of NCBI NO: 3551131 NR Description: plasma membrane aquaporin (PAQ1) [Raphanus
  misc_feature (1)..(206): Homolog of NCBI NO: 21594059 NR Description: plasma membrane intrinsic protein 1a [Arabidopsis
  misc_feature (1)..(206): Homolog of NCBI NO: 472873 NR Description: plasma membrane intrinsic protein 1a [Arabidopsis
  misc_feature (1)..(206): Homolog of NCBI NO: 15233109 NR Description: plasma membrane intrinsic protein 1a

SEQ ID NO: 31159 - DNA, 1061 bp, Arabidopsis thaliana; identical to SEQ ID NO: 27569
  misc_feature (1)..(1061): Ceres Seq. ID no. 13489980
  misc_feature: MA Experiment ID: 108461 Result: Up-regulated in Transcription
  misc_feature: MA Experiment 108461 PARAMETER Experiment Name: At_Germinating_Seeds_cDNA_P Parameter: Age (day) Value: 1 vs. 0
  misc_feature: MA Experiment 108461 PARAMETER Experiment Name: At_Germinating_Seeds_cDNA_P Parameter: Tissue Value: Germinating Seeds
  misc_feature: MA Experiment ID: 108462 Result: Up-regulated in Transcription
  misc_feature: MA Experiment 108462 PARAMETER Experiment Name: At_Germinating_Seeds_cDNA_P Parameter: Age (day) Value: 2 vs. 0
  misc_feature: MA Experiment 108462 PARAMETER Experiment Name: At_Germinating_Seeds_cDNA_P Parameter: Tissue Value: Germinating Seeds
  misc_feature: MA Experiment ID: 108464 Result: Up-regulated in Transcription
  misc_feature: MA Experiment 108464 PARAMETER Experiment Name: At_Germinating_Seeds_cDNA_P Parameter: Age (day) Value: 4 vs. 0
  misc_feature: MA Experiment 108464 PARAMETER Experiment Name: At_Germinating_Seeds_cDNA_P Parameter: Tissue Value: Germinating Seeds
  misc_feature: MA Experiment ID: 108573 Result: Up-regulated in Transcription
  misc_feature: MA Experiment 108573 PARAMETER Experiment Name: At_Drought_cDNA_P Parameter: Timepoint (hr) Value: 6
  misc_feature: MA Experiment 108573 PARAMETER Experiment Name: At_Drought_cDNA_P Parameter: Tissue Value: Aerial
  misc_feature: MA Experiment 108573 PARAMETER Experiment Name: At_Drought_cDNA_P Parameter: Treatment Value: Drought vs. No Drought
  misc_feature: MA Experiment ID: 108579 Result: Down-regulated in Transcription
  misc_feature: MA Experiment 108579 PARAMETER Experiment Name: At_4deg_Cold_cDNA_P Parameter: Temperature (deg C) Value: 4 vs. 22
  misc_feature: MA Experiment 108579 PARAMETER Experiment Name: At_4deg_Cold_cDNA_P Parameter: Timepoint (hr) Value: 6
  misc_feature: MA Experiment 108579 PARAMETER Experiment Name: At_4deg_Cold_cDNA_P Parameter: Tissue Value: Aerial
  misc_feature: MA Experiment ID: 20000180 Result: Up-regulated in Transcription
  misc_feature: MA Experiment 20000180 PARAMETER Experiment Name: At_Germinating_Seeds_P Parameter: Age (hr) Value: 24 vs. 0
  misc_feature: MA Experiment 20000180 PARAMETER Experiment Name: At_Germinating_Seeds_P Parameter: Tissue Value: Germinating Seeds
  misc_feature: MA Experiment ID: 20000214 Result: Down-regulated in Transcription
  misc_feature: MA Experiment 20000214 PARAMETER Experiment Name: At_4deg_Cold_P Parameter: Timepoint (hr) Value: 6
  misc_feature: MA Experiment ID: 20000224 Result: Down-regulated in Transcription
  misc_feature: MA Experiment ID: 20000495 Result: Up-regulated in Transcription
  misc_feature: MA Experiment 20000495 PARAMETER Experiment Name: At_Guard_Cells_P Parameter: Harvest Date Value: 8/2/2002
  misc_feature: MA Experiment 20000495 PARAMETER Experiment Name: At_Guard_Cells_P Parameter: Organism Value: A. thaliana
  misc_feature: MA Experiment 20000495 PARAMETER Experiment Name: At_Guard_Cells_P Parameter: Tissue Value: Guard Cells vs. Leaves
  misc_feature: MA Experiment ID: 20001451 Result: Up-regulated in Transcription
  misc_feature: MA Experiment 20001451 PARAMETER Experiment Name: At_Far-red-induction_P Parameter: Age (day) Value: 7
  misc_feature: MA Experiment 20001451 PARAMETER Experiment Name: At_Far-red-induction_P Parameter: Light Value: Far-red vs. White
  misc_feature: MA Experiment 20001451 PARAMETER Experiment Name: At_Far-red-induction_P Parameter: Organism Value: A. thaliana
  misc_feature: MA Experiment 20001451 PARAMETER Experiment Name: At_Far-red-induction_P Parameter: Plant Line Value: Columbia
  misc_feature: MA Experiment 20001451 PARAMETER Experiment Name: At_Far-red-induction_P Parameter: Timepoint (hr) Value: 24
  misc_feature: MA Experiment 20001451 PARAMETER Experiment Name: At_Far-red-induction_P Parameter: Tissue Value: Whole Plant
  misc_feature: MA Experiment ID: 20001911 Result: Down-regulated in Transcription
  misc_feature: MA Experiment 20001911 PARAMETER Experiment Name: At_Drought_Reproduction_P Parameter: Age (day) Value: 40
  misc_feature: MA Experiment 20001911 PARAMETER Experiment Name: At_Drought_Reproduction_P Parameter: Organism Value: A. thaliana
  misc_feature: MA Experiment 20001911 PARAMETER Experiment Name: At_Drought_Reproduction_P Parameter: Plant Line Value: WS
  misc_feature: MA Experiment 20001911 PARAMETER Experiment Name: At_Drought_Reproduction_P Parameter: Timepoint (day) Value: 10
  misc_feature: MA Experiment 20001911 PARAMETER Experiment Name: At_Drought_Reproduction_P Parameter: Tissue Value: Flowers
  misc_feature: MA Experiment 20001911 PARAMETER Experiment Name: At_Drought_Reproduction_P Parameter: Treatment Value: Drought vs. No Drought

SEQ ID NO: 31160 - protein, 252 aa, Arabidopsis thaliana; identical to SEQ ID NO: 27570
  peptide (1)..(252): Ceres Seq. ID no. 13489981
  misc_feature (100)..(180): Pfam Name: NC domain Pfam Description: NC domain
  misc_feature (32)..(232): Homolog of NCBI NO: 9758417 NR Description: gb|AAF32477.1~gene_id:MHF15.11~similar to unknown
  misc_feature (1)..(236): Homolog of NCBI NO: 22328196 NR Description: expressed protein [Arabidopsis thaliana]
  misc_feature (1)..(250): Homolog of NCBI NO: 21592684 NR Description: unknown [Arabidopsis thaliana]
  misc_feature (1)..(250): Homolog of NCBI NO: 18378812 NR Description: expressed protein [Arabidopsis thaliana]
  misc_feature (1)..(232): Homolog of NCBI NO: 18415178 NR Description: expressed protein [Arabidopsis thaliana]
  misc_feature (1)..(233): Homolog of NCBI NO: 15237327 NR Description: hypothetical protein [Arabidopsis thaliana]
  misc_feature (179)..(245): Homolog of NCBI NO: 15237330 NR Description: expressed protein [Arabidopsis thaliana]
  misc_feature (1)..(187): Homolog of NCBI NO: 15237330 NR Description: expressed protein [Arabidopsis thaliana]
  misc_feature (1)..(252): Homolog of NCBI NO: 21594170 NR Description: unknown [Arabidopsis thaliana]
  misc_feature (1)..(252): Homolog of NCBI NO: 18396282 NR Description: expressed protein [Arabidopsis thaliana]

SEQ ID NO: 31161 - DNA, 1952 bp, Arabidopsis thaliana; identical to SEQ ID NO: 27571
  misc_feature (1)..(1952): Ceres Seq. ID no. 12370661
  misc_feature: MA Experiment ID: 108501 Result: Up-regulated in Transcription
  misc_feature: MA Experiment 108501 PARAMETER Experiment Name: At_ap2_floral_buds_cDNA_P Parameter: Plant Line Value: ap2 (Ler.)
  misc_feature: MA Experiment 108501 PARAMETER Experiment Name: At_ap2_floral_buds_cDNA_P Parameter: Tissue Value: Closed Flower
  misc_feature: MA Experiment ID: 20000111 Result: Up-regulated in Transcription
  misc_feature: MA Experiment 20000111 PARAMETER Experiment Name: At_42deg_Heat_cDNA_P Parameter: Temperature (deg C) Value: 42 vs. 22
  misc_feature: MA Experiment 20000111 PARAMETER Experiment Name: At_42deg_Heat_cDNA_P Parameter: Timepoint (hr) Value: 6
  misc_feature: MA Experiment 20000111 PARAMETER Experiment Name: At_42deg_Heat_cDNA_P Parameter: Tissue Value: Aerial
  misc_feature: MA Experiment ID: 20000184 Result: Down-regulated in Transcription
  misc_feature: MA Experiment 20000184 PARAMETER Experiment Name: At_Shoots__P Parameter: Age (day) Value: 7
  misc_feature: MA Experiment 20000184 PARAMETER Experiment Name: At_Shoots__P Parameter: Tissue Value: Shoots vs. Whole Plant
  misc_feature: MA Experiment ID: 20000234 Result: Up-regulated in Transcription
  misc_feature: MA Experiment 20000234 PARAMETER Experiment Name: At_Siliques_P Parameter: Age (day) Value: 21
  misc_feature: MA Experiment 20000234 PARAMETER Experiment Name: At_Siliques_P Parameter: Organism Value: A. thaliana
  misc_feature: MA Experiment 20000234 PARAMETER Experiment Name: At_Siliques_P Parameter: Plant Line Value: WS
  misc_feature: MA Experiment 20000234 PARAMETER Experiment Name: At_Siliques_P Parameter: Tissue Value: Less Than 5mm Siliques vs. Whole Plant
  misc_feature: MA Experiment ID: 20000235 Result: Up-regulated in Transcription
  misc_feature: MA Experiment 20000235 PARAMETER Experiment Name: At_Siliques_P Parameter: Age (day) Value: 21
  misc_feature: MA Experiment 20000235 PARAMETER Experiment Name: At_Siliques_P Parameter: Organism Value: A. thaliana
  misc_feature: MA Experiment 20000235 PARAMETER Experiment Name: At_Siliques_P Parameter: Plant Line Value: WS
  misc_feature: MA Experiment 20000235 PARAMETER Experiment Name: At_Siliques_P Parameter: Tissue Value: 5-10mm Siliques vs. Whole Plant
  misc_feature: MA Experiment ID: 20000264 Result: Up-regulated in Transcription
  misc_feature: MA Experiment 20000264 PARAMETER Experiment Name: At_Open_Flower_P Parameter: Age (day) Value: 21
  misc_feature: MA Experiment 20000264 PARAMETER Experiment Name: At_Open_Flower_P Parameter: Plant Line Value: WS
  misc_feature: MA Experiment 20000264 PARAMETER Experiment Name: At_Open_Flower_P Parameter: Tissue Value: Open Flower vs. Whole Plant
  misc_feature: MA Experiment ID: 20000286 Result: Up-regulated in Transcription
  misc_feature: MA Experiment 20000286 PARAMETER Experiment Name: At_Open_Flower_P Parameter: Age (day) Value: 21
  misc_feature: MA Experiment 20000286 PARAMETER Experiment Name: At_Open_Flower_P Parameter: Plant Line Value: WS
  misc_feature: MA Experiment 20000286 PARAMETER Experiment Name: At_Open_Flower_P Parameter: Tissue Value: Half Open vs. Whole Plant
  misc_feature: MA Experiment ID: 20000439 Result: Down-regulated in Transcription
  misc_feature: MA Experiment 20000439 PARAMETER Experiment Name: At_Roots__P Parameter: Age (day) Value: 14 vs. 21
  misc_feature: MA Experiment 20000439 PARAMETER Experiment Name: At_Roots__P Parameter: Organism Value: A. thaliana
  misc_feature: MA Experiment 20000439 PARAMETER Experiment Name: At_Roots__P Parameter: Tissue Value: Roots vs. Whole Plant
  misc_feature: MA Experiment ID: 20000794 Result: Down-regulated in Transcription
  misc_feature: MA Experiment 20000794 PARAMETER Experiment Name: At_Petals_P Parameter: Age (day) Value: 23-25 days
  misc_feature: MA Experiment 20000794 PARAMETER Experiment Name: At_Petals_P Parameter: Plant Line Value: WS
  misc_feature: MA Experiment 20000794 PARAMETER Experiment Name: At_Petals_P Parameter: Tissue Value: Petals vs. Whole plant

SEQ ID NO: 31162 - protein, 571 aa, Arabidopsis thaliana; identical to SEQ ID NO: 27572
  peptide (1)..(571): Ceres Seq. ID no. 12370662
  misc_feature (259)..(556): Pfam Name: Pectinesterase Pfam Description: Pectinesterase
  misc_feature (30)..(568): Homolog of NCBI NO: 25313441 NR Description: pectinesterase (EC 3.1.1.11) [imported] - Salix
  misc_feature (2)..(566): Homolog of NCBI NO: 26451784 NR Description: putative pectinesterase [Arabidopsis thaliana]
  misc_feature (2)..(566): Homolog of NCBI NO: 15230019 NR Description: putative pectinesterase; protein id: At3g05610.1
  misc_feature (2)..(570): Homolog of NCBI NO: 15241079 NR Description: pectin methyl-esterase - like protein; protein
  misc_feature (11)..(217): Homolog of NCBI NO: 15234768 NR Description: pectinesterase family; protein id: At4g15980.1
  misc_feature (232)..(569): Homolog of NCBI NO: 15234768 NR Description: pectinesterase family; protein id: At4g15980.1
  misc_feature (1)..(566): Homolog of NCBI NO: 7549630 NR Description: pectin methylesterase, putative [Arabidopsis
  misc_feature (1)..(566): Homolog of NCBI NO: 39104585 NR Description: putative pectin methylesterase [Arabidopsis
  misc_feature (1)..(566): Homolog of NCBI NO: 22330893 NR Description: pectin methylesterase, putative; protein id:
  misc_feature (1)..(571): Homolog of NCBI NO: 15239814 NR Description: pectinesterase family

SEQ ID NO: 31163 - protein, 547 aa, Arabidopsis thaliana; identical to SEQ ID NO: 27573
  peptide (1)..(547): Ceres Seq. ID no. 12370663
  misc_feature (235)..(532): Pfam Name: Pectinesterase Pfam Description: Pectinesterase
  misc_feature (6)..(544): Homolog of NCBI NO: 25313441 NR Description: pectinesterase (EC 3.1.1.11) [imported] - Salix
  misc_feature (1)..(542): Homolog of NCBI NO: 26451784 NR Description: putative pectinesterase [Arabidopsis thaliana]
  misc_feature (1)..(542): Homolog of NCBI NO: 15230019 NR Description: putative pectinesterase; protein id: At3g05610.1
  misc_feature (1)..(546): Homolog of NCBI NO: 15241079 NR Description: pectin methyl-esterase - like protein; protein
  misc_feature (1)..(193): Homolog of NCBI NO: 15234768 NR Description: pectinesterase family; protein id: At4g15980.1
  misc_feature (208)..(545): Homolog of NCBI NO: 15234768 NR Description: pectinesterase family; protein id: At4g15980.1
  misc_feature (1)..(542): Homolog of NCBI NO: 7549630 NR Description: pectin methylesterase, putative [Arabidopsis
  misc_feature (1)..(542): Homolog of NCBI NO: 39104585 NR Description: putative pectin methylesterase [Arabidopsis
  misc_feature (1)..(542): Homolog of NCBI NO: 22330893 NR Description: pectin methylesterase, putative; protein id:
  misc_feature (1)..(547): Homolog of NCBI NO: 15239814 NR Description: pectinesterase family

SEQ ID NO: 31164 - protein, 499 aa, Arabidopsis thaliana; identical to SEQ ID NO: 27574
  peptide (1)..(499): Ceres Seq. ID no. 12370664
  misc_feature (187)..(484): Pfam Name: Pectinesterase Pfam Description: Pectinesterase
  misc_feature (1)..(496): Homolog of NCBI NO: 25313441 NR Description: pectinesterase (EC 3.1.1.11) [imported] - Salix
  misc_feature (1)..(494): Homolog of NCBI NO: 26451784 NR Description: putative pectinesterase [Arabidopsis thaliana]
  misc_feature (1)..(494): Homolog of NCBI NO: 15230019 NR Description: putative pectinesterase; protein id: At3g05610.1
  misc_feature (1)..(498): Homolog of NCBI NO: 15241079 NR Description: pectin methyl-esterase - like protein; protein
  misc_feature (1)..(145): Homolog of NCBI NO: 15234768 NR Description: pectinesterase family; protein id: At4g15980.1
  misc_feature (160)..(497): Homolog of NCBI NO: 15234768 NR Description: pectinesterase family; protein id: At4g15980.1
  misc_feature (1)..(494): Homolog of NCBI NO: 7549630 NR Description: pectin methylesterase, putative [Arabidopsis
  misc_feature (1)..(494): Homolog of NCBI NO: 39104585 NR Description: putative pectin methylesterase [Arabidopsis
  misc_feature (1)..(494): Homolog of NCBI NO: 22330893 NR Description: pectin methylesterase, putative; protein id:
  misc_feature (1)..(499): Homolog of NCBI NO: 15239814 NR Description: pectinesterase family

SEQ ID NO: 31165 - DNA, 1420 bp, Arabidopsis thaliana; identical to SEQ ID NO: 27575
  misc_feature (1)..(1420): Ceres Seq. ID no. 12331583
  misc_feature: MA Experiment ID: 108576 Result: Up-regulated in Transcription
  misc_feature: MA Experiment 108576 PARAMETER Experiment Name: At_42deg_Heat_cDNA_P Parameter: Temperature (deg C) Value: 42 vs. 22
  misc_feature: MA Experiment 108576 PARAMETER Experiment Name: At_42deg_Heat_cDNA_P Parameter: Timepoint (hr) Value: 1
  misc_feature: MA Experiment 108576 PARAMETER Experiment Name: At_42deg_Heat_cDNA_P Parameter: Tissue Value: Aerial
  misc_feature: MA Experiment ID: 108595 Result: Down-regulated in Transcription
  misc_feature: MA Experiment 108595 PARAMETER Experiment Name: At_Ler-pi_Ovule_cDNA_P Parameter: Plant Line Value: null
  misc_feature: MA Experiment ID: 20000179 Result: Up-regulated in Transcription
  misc_feature: MA Experiment 20000179 PARAMETER Experiment Name: At_Germinating_Seeds_P Parameter: Age (hr) Value: 6 vs. 0
  misc_feature: MA Experiment 20000179 PARAMETER Experiment Name: At_Germinating_Seeds_P Parameter: Tissue Value: Germinating Seeds
  misc_feature: MA Experiment ID: 20000180 Result: Up-regulated in Transcription
  misc_feature: MA Experiment 20000180 PARAMETER Experiment Name: At_Germinating_Seeds_P Parameter: Age (hr) Value: 24 vs. 0
  misc_feature: MA Experiment 20000180 PARAMETER Experiment Name: At_Germinating_Seeds_P Parameter: Tissue Value: Germinating Seeds
  misc_feature: MA Experiment ID: 20000227 Result: Up-regulated in Transcription
  misc_feature: MA Experiment 20000227 PARAMETER Experiment Name: At_Root-Tips-vs-Tops_P Parameter: Tissue Value: Root Tips vs. Root Tops
  misc_feature: MA Experiment ID: 20000264 Result: Down-regulated in Transcription
  misc_feature: MA Experiment 20000264 PARAMETER Experiment Name: At_Open_Flower_P Parameter: Age (day) Value: 21
  misc_feature: MA Experiment 20000264 PARAMETER Experiment Name: At_Open_Flower_P Parameter: Plant Line Value: WS
  misc_feature: MA Experiment 20000264 PARAMETER Experiment Name: At_Open_Flower_P Parameter: Tissue Value: Open Flower vs. Whole Plant
  misc_feature: MA Experiment ID: 20000265 Result: Down-regulated in Transcription
  misc_feature: MA Experiment 20000265 PARAMETER Experiment Name: At_Open_Flower_P Parameter: Age (day) Value: 21
  misc_feature: MA Experiment 20000265 PARAMETER Experiment Name: At_Open_Flower_P Parameter: Plant Line Value: WS
  misc_feature: MA Experiment 20000265 PARAMETER Experiment Name: At_Open_Flower_P Parameter: Tissue Value: Closed Flower vs. Whole Plant
  misc_feature: MA Experiment ID: 20000286 Result: Down-regulated in Transcription
  misc_feature: MA Experiment 20000286 PARAMETER Experiment Name: At_Open_Flower_P Parameter: Age (day) Value: 21
  misc_feature: MA Experiment 20000286 PARAMETER Experiment Name: At_Open_Flower_P Parameter: Plant Line Value: WS
  misc_feature: MA Experiment 20000286 PARAMETER Experiment Name: At_Open_Flower_P Parameter: Tissue Value: Half Open vs. Whole Plant
  misc_feature: MA Experiment ID: 20000438 Result: Down-regulated in Transcription
  misc_feature: MA Experiment 20000438 PARAMETER Experiment Name: At_Shoots__P Parameter: Age (day) Value: 14
  misc_feature: MA Experiment 20000438 PARAMETER Experiment Name: At_Shoots__P Parameter: Tissue Value: Shoots vs. Whole Plant
  misc_feature: MA Experiment ID: 20000794 Result: Down-regulated in Transcription
  misc_feature: MA Experiment 20000794 PARAMETER Experiment Name: At_Petals_P Parameter: Age (day) Value: 23-25 days
  misc_feature: MA Experiment 20000794 PARAMETER Experiment Name: At_Petals_P Parameter: Plant Line Value: WS
  misc_feature: MA Experiment 20000794 PARAMETER Experiment Name: At_Petals_P Parameter: Tissue Value: Petals vs. Whole plant
  misc_feature: MA Experiment ID: 20001556 Result: Down-regulated in Transcription
  misc_feature: MA Experiment 20001556 PARAMETER Experiment Name: At_Drought_Soil_Dry_P Parameter: Age (day) Value: 26
  misc_feature: MA Experiment 20001556 PARAMETER Experiment Name: At_Drought_Soil_Dry_P Parameter: Organism Value: A. thaliana
  misc_feature: MA Experiment 20001556 PARAMETER Experiment Name: At_Drought_Soil_Dry_P Parameter: Plant Line Value: WS
  misc_feature: MA Experiment 20001556 PARAMETER Experiment Name: At_Drought_Soil_Dry_P Parameter: Post Timepoint (hr) Value: None
  misc_feature: MA Experiment 20001556 PARAMETER Experiment Name: At_Drought_Soil_Dry_P Parameter: Post-Treatment Value: None
  misc_feature: MA Experiment 20001556 PARAMETER Experiment Name: At_Drought_Soil_Dry_P Parameter: Timepoint (day) Value: 12
  misc_feature: MA Experiment 20001556 PARAMETER Experiment Name: At_Drought_Soil_Dry_P Parameter: Treatment Value: Drought vs. No Drought
  misc_feature: MA Experiment ID: 20001757 Result: Down-regulated in Transcription
  misc_feature: MA Experiment 20001757 PARAMETER Experiment Name: At_50mM_NH4NO3_L-to-H_P Parameter: Timepoint (hr) Value: 6
  misc_feature: MA Experiment 20001757 PARAMETER Experiment Name: At_50mM_NH4NO3_L-to-H_P Parameter: Tissue Value: Leaf
  misc_feature: MA Experiment 20001757 PARAMETER Experiment Name: At_50mM_NH4NO3_L-to-H_P Parameter: Treatment Value: 50mM NH4NO3 vs 100mM Mannitol
  misc_feature: MA Experiment ID: 20001773 Result: Up-regulated in Transcription
  misc_feature: MA Experiment 20001773 PARAMETER Experiment Name: At_Far-red-enriched-adult_P Parameter: Age (day) Value: 30
  misc_feature: MA Experiment 20001773 PARAMETER Experiment Name: At_Far-red-enriched-adult_P Parameter: Light Value: Far-red enriched vs. White
  misc_feature: MA Experiment 20001773 PARAMETER Experiment Name: At_Far-red-enriched-adult_P Parameter: Organism Value: A. thaliana
  misc_feature: MA Experiment 20001773 PARAMETER Experiment Name: At_Far-red-enriched-adult_P Parameter: Plant Line Value: Columbia
  misc_feature: MA Experiment 20001773 PARAMETER Experiment Name: At_Far-red-enriched-adult_P Parameter: Timepoint (hr) Value: 48
  misc_feature: MA Experiment 20001773 PARAMETER Experiment Name: At_Far-red-enriched-adult_P Parameter: Tissue Value: Aerial
  misc_feature: MA Experiment ID: 20001904 Result: Up-regulated in Transcription
  misc_feature: MA Experiment 20001904 PARAMETER Experiment Name: At_Drought_Reproduction_P Parameter: Age (day) Value: 37
  misc_feature: MA Experiment 20001904 PARAMETER Experiment Name: At_Drought_Reproduction_P Parameter: Organism Value: A. thaliana
  misc_feature: MA Experiment 20001904 PARAMETER Experiment Name: At_Drought_Reproduction_P Parameter: Plant Line Value: WS
  misc_feature: MA Experiment 20001904 PARAMETER Experiment Name: At_Drought_Reproduction_P Parameter: Timepoint (day) Value: 7
  misc_feature: MA Experiment 20001904 PARAMETER Experiment Name: At_Drought_Reproduction_P Parameter: Tissue Value: Rosettes
  misc_feature: MA Experiment 20001904 PARAMETER Experiment Name: At_Drought_Reproduction_P Parameter: Treatment Value: Drought vs. No Drought
  misc_feature: MA Experiment ID: 20001905 Result: Up-regulated in Transcription
  misc_feature: MA Experiment 20001905 PARAMETER Experiment Name: At_Drought_Reproduction_P Parameter: Age (day) Value: 40
  misc_feature: MA Experiment 20001905 PARAMETER Experiment Name: At_Drought_Reproduction_P Parameter: Organism Value: A. thaliana
  misc_feature: MA Experiment 20001905 PARAMETER Experiment Name: At_Drought_Reproduction_P Parameter: Plant Line Value: WS
  misc_feature: MA Experiment 20001905 PARAMETER Experiment Name: At_Drought_Reproduction_P Parameter: Timepoint (day) Value: 10
  misc_feature: MA Experiment 20001905 PARAMETER Experiment Name: At_Drought_Reproduction_P Parameter: Tissue Value: Rosettes
  misc_feature: MA Experiment 20001905 PARAMETER Experiment Name: At_Drought_Reproduction_P Parameter: Treatment Value: Drought vs. No Drought

SEQ ID NO: 31166 - protein, 342 aa, Arabidopsis thaliana; identical to SEQ ID NO: 27576
  peptide (1)..(342): Ceres Seq. ID no. 12331584
  misc_feature (32)..(338): Pfam Name: NAD dependent epimerase/dehydratase family Pfam Description: NAD dependent epimerase/dehydratase family
  misc_feature (30)..(337): Homolog of NCBI NO: 15227109 NR Description: putative dTDP-glucose 4-6-dehydratase; protein
  misc_feature (79)..(342): Homolog of NCBI NO: 2351580 NR Description: thymidine diphospho-glucose 4-6-dehydratase
  misc_feature (1)..(341): Homolog of NCBI NO: 11121508 NR Description: d-TDP-glucose dehydratase [Phragmites australis]
  misc_feature (4)..(341): Homolog of NCBI NO: 18447934 NR Description: UDP-glucuronic acid decarboxylase
  misc_feature (1)..(341): Homolog of NCBI NO: 11270075 NR Description: dTDPglucose 4,6-dehydratase (EC 4.2.1.46)
  misc_feature (1)..(342): Homolog of NCBI NO: 13591616 NR Description: UDP-D-glucuronate carboxy-lyase [Pisum sativum]
  misc_feature (1)..(341): Homolog of NCBI NO: 15226950 NR Description: putative nucleotide-sugar dehydratase
  misc_feature (3)..(342): Homolog of NCBI NO: 15231432 NR Description: dTDP-glucose 4-6-dehydratases-like protein
  misc_feature (1)..(342): Homolog of NCBI NO: 15237853 NR Description: dTDP-glucose 4-6-dehydratase - like protein
  misc_feature (1)..(342): Homolog of NCBI NO: 14030703 NR Description: AT5g59290/mnc17_180 [Arabidopsis thaliana]

SEQ ID NO: 31167 - protein, 313 aa, Arabidopsis thaliana; identical to SEQ ID NO: 27577
  peptide (1)..(313): Ceres Seq. ID no. 12331585
  misc_feature (3)..(309): Pfam Name: NAD dependent epimerase/dehydratase family Pfam Description: NAD dependent epimerase/dehydratase family
  misc_feature (1)..(308): Homolog of NCBI NO: 15227109 NR Description: putative dTDP-glucose 4-6-dehydratase; protein
  misc_feature (50)..(313): Homolog of NCBI NO: 2351580 NR Description: thymidine diphospho-glucose 4-6-dehydratase
  misc_feature (1)..(312): Homolog of NCBI NO: 11121508 NR Description: d-TDP-glucose dehydratase [Phragmites australis]
  misc_feature (1)..(312): Homolog of NCBI NO: 18447934 NR Description: UDP-glucuronic acid decarboxylase
  misc_feature (1)..(312): Homolog of NCBI NO: 11270075 NR Description: dTDPglucose 4,6-dehydratase (EC 4.2.1.46)
  misc_feature (1)..(313): Homolog of NCBI NO: 13591616 NR Description: UDP-D-glucuronate carboxy-lyase [Pisum sativum]
  misc_feature (1)..(312): Homolog of NCBI NO: 15226950 NR Description: putative nucleotide-sugar dehydratase
  misc_feature (1)..(313): Homolog of NCBI NO: 15231432 NR Description: dTDP-glucose 4-6-dehydratases-like protein
  misc_feature (1)..(313): Homolog of NCBI NO: 15237853 NR Description: dTDP-glucose 4-6-dehydratase - like protein
  misc_feature (1)..(313): Homolog of NCBI NO: 14030703 NR Description: AT5g59290/mnc17_180 [Arabidopsis thaliana]

SEQ ID NO: 31168 - protein, 293 aa, Arabidopsis thaliana; identical to SEQ ID NO: 27578
  peptide (1)..(293): Ceres Seq. ID no. 12331586
  misc_feature (1)..(289): Pfam Name: NAD dependent epimerase/dehydratase family Pfam Description: NAD dependent epimerase/dehydratase family
  misc_feature (1)..(288): Homolog of NCBI NO: 15227109 NR Description: putative dTDP-glucose 4-6-dehydratase; protein
  misc_feature (30)..(293): Homolog of NCBI NO: 2351580 NR Description: thymidine diphospho-glucose 4-6-dehydratase
  misc_feature (1)..(292): Homolog of NCBI NO: 11121508 NR Description: d-TDP-glucose dehydratase [Phragmites australis]
  misc_feature (1)..(292): Homolog of NCBI NO: 18447934 NR Description: UDP-glucuronic acid decarboxylase
  misc_feature (1)..(292): Homolog of NCBI NO: 11270075 NR Description: dTDPglucose 4,6-dehydratase (EC 4.2.1.46)
  misc_feature (1)..(293): Homolog of NCBI NO: 13591616 NR Description: UDP-D-glucuronate carboxy-lyase [Pisum sativum]
  misc_feature (1)..(292): Homolog of NCBI NO: 15226950 NR Description: putative nucleotide-sugar dehydratase
  misc_feature (1)..(293): Homolog of NCBI NO: 15231432 NR Description: dTDP-glucose 4-6-dehydratases-like protein
  misc_feature (1)..(293): Homolog of NCBI NO: 15237853 NR Description: dTDP-glucose 4-6-dehydratase - like protein
  misc_feature (1)..(293): Homolog of NCBI NO: 14030703 NR Description: AT5g59290/mnc17_180 [Arabidopsis thaliana]

SEQ ID NO: 31169 - DNA, 1089 bp, Arabidopsis thaliana; identical to SEQ ID NO: 27579
  misc_feature (1)..(1089): Ceres Seq. ID no. 13488415
  misc_feature: MA Experiment ID: 108434 Result: Up-regulated in Transcription
  misc_feature: MA Experiment 108434 PARAMETER Experiment Name: At_Root_Tips_cDNA_P Parameter: Tissue Value: Root Tips
  misc_feature: MA Experiment ID: 108573 Result: Up-regulated in Transcription
  misc_feature: MA Experiment 108573 PARAMETER Experiment Name: At_Drought_cDNA_P Parameter: Timepoint (hr) Value: 6
  misc_feature: MA Experiment 108573 PARAMETER Experiment Name: At_Drought_cDNA_P Parameter: Tissue Value: Aerial
  misc_feature: MA Experiment 108573 PARAMETER Experiment Name: At_Drought_cDNA_P Parameter: Treatment Value: Drought vs. No Drought

SEQ ID NO: 31170 - protein, 250 aa, Arabidopsis thaliana; identical to SEQ ID NO: 27580
  peptide (1)..(250): Ceres Seq. ID no. 13488416
  misc_feature (1)..(110): Homolog of NCBI NO: 34864287 NR Description: similar to RIKEN cDNA 0610008A10 [Rattus
  misc_feature (1)..(248): Homolog of NCBI NO: 34858248 NR Description: similar to Aph1a-pending protein [Rattus
  misc_feature (1)..(207): Homolog of NCBI NO: 13775224 NR Description: presenilin stabilization factor-like [Homo
  misc_feature (1)..(207): Homolog of NCBI NO: 29243936 NR Description: hypothetical protein 4632417K02 [Mus musculus]
  misc_feature (1)..(207): Homolog of NCBI NO: 18088649 NR Description: hypothetical protein DKFZp564D0372 [Homo sapiens]
  misc_feature (1)..(227): Homolog of NCBI NO: 20129183 NR Description: presenilin stabilization factor CG2855-PA
  misc_feature (1)..(250): Homolog of NCBI NO: 18402667 NR Description: expressed protein [Arabidopsis thaliana]
  misc_feature (1)..(250): Homolog of NCBI NO: 21594204 NR Description: unknown [Arabidopsis thaliana]

SEQ ID NO: 31171 - protein, 134 aa, Arabidopsis thaliana; identical to SEQ ID NO: 27581
  peptide (1)..(134): Ceres Seq. ID no. 13488417
  misc_feature (12)..(134): Homolog of NCBI NO: 25370758 NR Description: hypothetical protein At2g31440 [imported] -

SEQ ID NO: 31172 - DNA, 825 bp, Arabidopsis thaliana; identical to SEQ ID NO: 27582
  misc_feature (1)..(825): Ceres Seq. ID no. 12384990
  misc_feature: MA Experiment ID: 108501 Result: Up-regulated in Transcription
  misc_feature: MA Experiment 108501 PARAMETER Experiment Name: At_ap2_floral_buds_cDNA_P Parameter: Plant Line Value: ap2 (Ler.)
  misc_feature: MA Experiment 108501 PARAMETER Experiment Name: At_ap2_floral_buds_cDNA_P Parameter: Tissue Value: Closed Flower
  misc_feature: MA Experiment ID: 108572 Result: Down-regulated in Transcription
  misc_feature: MA Experiment 108572 PARAMETER Experiment Name: At_Drought_cDNA_P Parameter: Timepoint (hr) Value: 1
  misc_feature: MA Experiment 108572 PARAMETER Experiment Name: At_Drought_cDNA_P Parameter: Tissue Value: Aerial
  misc_feature: MA Experiment 108572 PARAMETER Experiment Name: At_Drought_cDNA_P Parameter: Treatment Value: Drought vs. No Drought
  misc_feature: MA Experiment ID: 108595 Result: Up-regulated in Transcription
  misc_feature: MA Experiment 108595 PARAMETER Experiment Name: At_Ler-pi_Ovule_cDNA_P Parameter: Plant Line Value: null
  misc_feature: MA Experiment ID: 20000166 Result: Down-regulated in Transcription
  misc_feature: MA Experiment 20000166 PARAMETER Experiment Name: At_100uM_ABA_P Parameter: Age (day) Value: 14
  misc_feature: MA Experiment 20000166 PARAMETER Experiment Name: At_100uM_ABA_P Parameter: Organism Value: A. thaliana
  misc_feature: MA Experiment 20000166 PARAMETER Experiment Name: At_100uM_ABA_P Parameter: Plant Line Value: WS
  misc_feature: MA Experiment 20000166 PARAMETER Experiment Name: At_100uM_ABA_P Parameter: Timepoint (hr) Value: 1
  misc_feature: MA Experiment 20000166 PARAMETER Experiment Name: At_100uM_ABA_P Parameter: Tissue Value: Aerial
  misc_feature: MA Experiment 20000166 PARAMETER Experiment Name: At_100uM_ABA_P Parameter: Treatment Value: 100uM ABA vs. No Treatment
  misc_feature: MA Experiment ID: 20000173 Result: Down-regulated in Transcription
  misc_feature: MA Experiment 20000173 PARAMETER Experiment Name: At_42deg_Heat_P Parameter: Age (day) Value: 14
  misc_feature: MA Experiment 20000173 PARAMETER Experiment Name: At_42deg_Heat_P Parameter: Organism Value: A. thaliana
  misc_feature: MA Experiment 20000173 PARAMETER Experiment Name: At_42deg_Heat_P Parameter: Plant Line Value: WS
  misc_feature: MA Experiment 20000173 PARAMETER Experiment Name: At_42deg_Heat_P Parameter: Temperature (deg C) Value: 42 vs. 22
  misc_feature: MA Experiment 20000173 PARAMETER Experiment Name: At_42deg_Heat_P Parameter: Timepoint (hr) Value: 6
  misc_feature: MA Experiment 20000173 PARAMETER Experiment Name: At_42deg_Heat_P Parameter: Tissue Value: Aerial
  misc_feature: MA Experiment ID: 20000234 Result: Up-regulated in Transcription
  misc_feature: MA Experiment 20000234 PARAMETER Experiment Name: At_Siliques_P Parameter: Age (day) Value: 21
  misc_feature: MA Experiment 20000234 PARAMETER Experiment Name: At_Siliques_P Parameter: Organism Value: A. thaliana
  misc_feature: MA Experiment 20000234 PARAMETER Experiment Name: At_Siliques_P Parameter: Plant Line Value: WS
  misc_feature: MA Experiment 20000234 PARAMETER Experiment Name: At_Siliques_P Parameter: Tissue Value: Less Than 5mm Siliques vs. Whole Plant
  misc_feature: MA Experiment ID: 20000235 Result: Up-regulated in Transcription
  misc_feature: MA Experiment 20000235 PARAMETER Experiment Name: At_Siliques_P Parameter: Age (day) Value: 21
  misc_feature: MA Experiment 20000235 PARAMETER Experiment Name: At_Siliques_P Parameter: Organism Value: A. thaliana
  misc_feature: MA Experiment 20000235 PARAMETER Experiment Name: At_Siliques_P Parameter: Plant Line Value: WS
  misc_feature: MA Experiment 20000235 PARAMETER Experiment Name: At_Siliques_P Parameter: Tissue Value: 5-10mm Siliques vs. Whole Plant
  misc_feature: MA Experiment ID: 20000264 Result: Up-regulated in Transcription
  misc_feature: MA Experiment 20000264 PARAMETER Experiment Name: At_Open_Flower_P Parameter: Age (day) Value: 21
  misc_feature: MA Experiment 20000264 PARAMETER Experiment Name: At_Open_Flower_P Parameter: Plant Line Value: WS
  misc_feature: MA Experiment 20000264 PARAMETER Experiment Name: At_Open_Flower_P Parameter: Tissue Value: Open Flower vs. Whole Plant
  misc_feature: MA Experiment ID: 20000265 Result: Up-regulated in Transcription
  misc_feature: MA Experiment 20000265 PARAMETER Experiment Name: At_Open_Flower_P Parameter: Age (day) Value: 21
  misc_feature: MA Experiment 20000265 PARAMETER Experiment Name: At_Open_Flower_P Parameter: Plant Line Value: WS
  misc_feature: MA Experiment 20000265 PARAMETER Experiment Name: At_Open_Flower_P Parameter: Tissue Value: Closed Flower vs. Whole Plant
  misc_feature: MA Experiment ID: 20000269 Result: Up-regulated in Transcription
  misc_feature: MA Experiment 20000269 PARAMETER Experiment Name: At_1mM_KNO3_L-vs-H_Roots_P Parameter: Age (day) Value: 7,10,12
  misc_feature: MA Experiment 20000269 PARAMETER Experiment Name: At_1mM_KNO3_L-vs-H_Roots_P Parameter: Organism Value: A. thaliana
  misc_feature: MA Experiment 20000269 PARAMETER Experiment Name: At_1mM_KNO3_L-vs-H_Roots_P Parameter: Plant Line Value: WS
  misc_feature: MA Experiment 20000269 PARAMETER Experiment Name: At_1mM_KNO3_L-vs-H_Roots_P Parameter: Timepoint (day) Value: 7,10,12
  misc_feature: MA Experiment 20000269 PARAMETER Experiment Name: At_1mM_KNO3_L-vs-H_Roots_P Parameter: Tissue Value: Roots
  misc_feature: MA Experiment 20000269 PARAMETER Experiment Name: At_1mM_KNO3_L-vs-H_Roots_P Parameter: Treatment Value: 1mM KNO3 vs. 50mM KNO3
  misc_feature: MA Experiment ID: 20000286 Result: Up-regulated in Transcription
  misc_feature: MA Experiment 20000286 PARAMETER Experiment Name: At_Open_Flower_P Parameter: Age (day) Value: 21
  misc_feature: MA Experiment 20000286 PARAMETER Experiment Name: At_Open_Flower_P Parameter: Plant Line Value: WS
  misc_feature: MA Experiment 20000286 PARAMETER Experiment Name: At_Open_Flower_P Parameter: Tissue Value: Half Open vs. Whole Plant
  misc_feature: MA Experiment ID: 20000438 Result: Down-regulated in Transcription
  misc_feature: MA Experiment 20000438 PARAMETER Experiment Name: At_Shoots__P Parameter: Age (day) Value: 14
  misc_feature: MA Experiment 20000438 PARAMETER Experiment Name: At_Shoots__P Parameter: Tissue Value: Shoots vs. Whole Plant
  misc_feature: MA Experiment ID: 20000460 Result: Down-regulated in Transcription
  misc_feature: MA Experiment 20000460 PARAMETER Experiment Name: At_10percent_PEG_P Parameter: Age (day) Value: 12
  misc_feature: MA Experiment 20000460 PARAMETER Experiment Name: At_10percent_PEG_P Parameter: Organism Value: A. thaliana
  misc_feature: MA Experiment 20000460 PARAMETER Experiment Name: At_10percent_PEG_P Parameter: Plant Line Value: WS
  misc_feature: MA Experiment 20000460 PARAMETER Experiment Name: At_10percent_PEG_P Parameter: Timepoint (day) Value: 12
  misc_feature: MA Experiment 20000460 PARAMETER Experiment Name: At_10percent_PEG_P Parameter: Tissue Value: Whole Plant
  misc_feature: MA Experiment 20000460 PARAMETER Experiment Name: At_10percent_PEG_P Parameter: Treatment Value: 10percent PEG vs. No Treatment
  misc_feature: MA Experiment ID: 20000527 Result: Down-regulated in Transcription
  misc_feature: MA Experiment 20000527 PARAMETER Experiment Name: At_10percent_PEG_P Parameter: Age (day) Value: 20
  misc_feature: MA Experiment 20000527 PARAMETER Experiment Name: At_10percent_PEG_P Parameter: Organism Value: A. thaliana
  misc_feature: MA Experiment 20000527 PARAMETER Experiment Name: At_10percent_PEG_P Parameter: Plant Line Value: WS
  misc_feature: MA Experiment 20000527 PARAMETER Experiment Name: At_10percent_PEG_P Parameter: Timepoint (day) Value: 20
  misc_feature: MA Experiment 20000527 PARAMETER Experiment Name: At_10percent_PEG_P Parameter: Tissue Value: Whole Plant
  misc_feature: MA Experiment 20000527 PARAMETER Experiment Name: At_10percent_PEG_P Parameter: Treatment Value: 10percent PEG vs. No Treatment
  misc_feature: MA Experiment ID: 20000573 Result: Down-regulated in Transcription
  misc_feature: MA Experiment 20000573 PARAMETER Experiment Name: At_100uM_ABA_Mutants__P Parameter: Organism Value: A. thaliana
  misc_feature: MA Experiment 20000573 PARAMETER Experiment Name: At_100uM_ABA_Mutants__P Parameter: Plant Line Value: CS22 vs. Ler wt
  misc_feature: MA Experiment 20000573 PARAMETER Experiment Name: At_100uM_ABA_Mutants__P Parameter: Timepoint (hr) Value: N/A
  misc_feature: MA Experiment 20000573 PARAMETER Experiment Name: At_100uM_ABA_Mutants__P Parameter: Tissue Value: Whole Plant
  misc_feature: MA Experiment 20000573 PARAMETER Experiment Name: At_100uM_ABA_Mutants__P Parameter: Treatment Value: None
  misc_feature: MA Experiment ID: 20000574 Result: Down-regulated in Transcription
  misc_feature: MA Experiment 20000574 PARAMETER Experiment Name: At_100uM_ABA_Mutants__P Parameter: Organism Value: A. thaliana
  misc_feature: MA Experiment 20000574 PARAMETER Experiment Name: At_100uM_ABA_Mutants__P Parameter: Plant Line Value: CS23 vs. Ler wt
  misc_feature: MA Experiment 20000574 PARAMETER Experiment Name: At_100uM_ABA_Mutants__P Parameter: Timepoint (hr) Value: N/A
  misc_feature: MA Experiment 20000574 PARAMETER Experiment Name: At_100uM_ABA_Mutants__P Parameter: Tissue Value: Whole Plant
  misc_feature: MA Experiment 20000574 PARAMETER Experiment Name: At_100uM_ABA_Mutants__P Parameter: Treatment Value: None
  misc_feature: MA Experiment ID: 20000709 Result: Down-regulated in Transcription
  misc_feature: MA Experiment 20000709 PARAMETER Experiment Name: At_15mM_NH4NO3_L-to-H_P Parameter: Age (hr) Value: 14
  misc_feature: MA Experiment 20000709 PARAMETER Experiment Name: At_15mM_NH4NO3_L-to-H_P Parameter: Organism Value: A. thaliana
  misc_feature: MA Experiment 20000709 PARAMETER Experiment Name: At_15mM_NH4NO3_L-to-H_P Parameter: Plant Line Value: WS
  misc_feature: MA Experiment 20000709 PARAMETER Experiment Name: At_15mM_NH4NO3_L-to-H_P Parameter: Timepoint (hr) Value: 4
  misc_feature: MA Experiment 20000709 PARAMETER Experiment Name: At_15mM_NH4NO3_L-to-H_P Parameter: Tissue Value: Aerial
  misc_feature: MA Experiment 20000709 PARAMETER Experiment Name: At_15mM_NH4NO3_L-to-H_P Parameter: Treatment Value: 15mM NH4NO3 vs. 30mM Mannitol
  misc_feature: MA Experiment ID: 20000794 Result: Up-regulated in Transcription
  misc_feature: MA Experiment 20000794 PARAMETER Experiment Name: At_Petals_P Parameter: Age (day) Value: 23-25 days
  misc_feature: MA Experiment 20000794 PARAMETER Experiment Name: At_Petals_P Parameter: Plant Line Value: WS
  misc_feature: MA Experiment 20000794 PARAMETER Experiment Name: At_Petals_P Parameter: Tissue Value: Petals vs. Whole plant
  misc_feature: MA Experiment ID: 20001560 Result: Down-regulated in Transcription
  misc_feature: MA Experiment 20001560 PARAMETER Experiment Name: At_Drought_Soil_Dry_P Parameter: Age (day) Value: 28
  misc_feature: MA Experiment 20001560 PARAMETER Experiment Name: At_Drought_Soil_Dry_P Parameter: Organism Value: A. thaliana
  misc_feature: MA Experiment 20001560 PARAMETER Experiment Name: At_Drought_Soil_Dry_P Parameter: Plant Line Value: WS
  misc_feature: MA Experiment 20001560 PARAMETER Experiment Name: At_Drought_Soil_Dry_P Parameter: Post Timepoint (hr) Value: None
  misc_feature: MA Experiment 20001560 PARAMETER Experiment Name: At_Drought_Soil_Dry_P Parameter: Post-Treatment Value: None
  misc_feature: MA Experiment 20001560 PARAMETER Experiment Name: At_Drought_Soil_Dry_P Parameter: Timepoint (day) Value: 14
  misc_feature: MA Experiment 20001560 PARAMETER Experiment Name: At_Drought_Soil_Dry_P Parameter: Treatment Value: Drought vs. No Drought

SEQ ID NO: 31173 - protein, 180 aa, Arabidopsis thaliana; identical to SEQ ID NO: 27583
  peptide (1)..(180): Ceres Seq. ID no. 12384991
  misc_feature (82)..(140): Pfam Name: Protein of unknown function (DUF581) Pfam Description: Protein of unknown function (DUF581)
  misc_feature (83)..(164): Homolog of NCBI NO: 38344285 NR Description: OSJNBa0013K16.17 [Oryza sativa (japonica
  misc_feature (91)..(164): Homolog of NCBI NO: 34898006 NR Description: ESTs C26056(C11550),AU082131(C11550) correspond a region of the predicted gene.~Similar to Arabidopsis thaliana
  misc_feature (96)..(159): Homolog of NCBI NO: 38344282 NR Description: OSJNBa0013K16.14 [Oryza sativa (japonica
  misc_feature (93)..(160): Homolog of NCBI NO: 38344283 NR Description: OSJNBa0013K16.15 [Oryza sativa (japonica
  misc_feature (92)..(179): Homolog of NCBI NO: 38344280 NR Description: OSJNBa0013K16.12 [Oryza sativa (japonica
  misc_feature (88)..(180): Homolog of NCBI NO: 18406598 NR Description: expressed protein; protein id: At2g44670.1
  misc_feature (37)..(180): Homolog of NCBI NO: 15238001 NR Description: putative protein; protein id: At5g47060.1
  misc_feature (22)..(180): Homolog of NCBI NO: 7485163 NR Description: hypothetical protein - Arabidopsis thaliana
  misc_feature (22)..(180): Homolog of NCBI NO: 21594214 NR Description: unknown [Arabidopsis thaliana]
  misc_feature (22)..(180): Homolog of NCBI NO: 18414940 NR Description: expressed protein

SEQ ID NO: 31174 - protein, 159 aa, Arabidopsis thaliana; identical to SEQ ID NO: 27584
  peptide (1)..(159): Ceres Seq. ID no. 12384992
  misc_feature (61)..(119): Pfam Name: Protein of unknown function (DUF581) Pfam Description: Protein of unknown function (DUF581)
  misc_feature (62)..(143): Homolog of NCBI NO: 38344285 NR Description: OSJNBa0013K16.17 [Oryza sativa (japonica
  misc_feature (70)..(143): Homolog of NCBI NO: 34898006 NR Description: ESTs C26056(C11550),AU082131(C11550) correspond a region of the predicted gene.~Similar to Arabidopsis thaliana
  misc_feature (75)..(138): Homolog of NCBI NO: 38344282 NR Description: OSJNBa0013K16.14 [Oryza sativa (japonica
  misc_feature (72)..(139): Homolog of NCBI NO: 38344283 NR Description: OSJNBa0013K16.15 [Oryza sativa (japonica
  misc_feature (71)..(158): Homolog of NCBI NO: 38344280 NR Description: OSJNBa0013K16.12 [Oryza sativa (japonica
  misc_feature (67)..(159): Homolog of NCBI NO: 18406598 NR Description: expressed protein; protein id: At2g44670.1
  misc_feature (16)..(159): Homolog of NCBI NO: 15238001 NR Description: putative protein; protein id: At5g47060.1
  misc_feature (1)..(159): Homolog of NCBI NO: 7485163 NR Description: hypothetical protein - Arabidopsis thaliana
  misc_feature (1)..(159): Homolog of NCBI NO: 21594214 NR Description: unknown [Arabidopsis thaliana]
  misc_feature (1)..(159): Homolog of NCBI NO: 18414940 NR Description: expressed protein

SEQ ID NO: 31175 - protein, 155 aa, Arabidopsis thaliana; identical to SEQ ID NO: 27585
  peptide (1)..(155): Ceres Seq. ID no. 12384993
  misc_feature (57)..(115): Pfam Name: Protein of unknown function (DUF581) Pfam Description: Protein of unknown function (DUF581)
  misc_feature (58)..(139): Homolog of NCBI NO: 38344285 NR Description: OSJNBa0013K16.17 [Oryza sativa (japonica
  misc_feature (66)..(139): Homolog of NCBI NO: 34898006 NR Description: ESTs C26056(C11550),AU082131(C11550) correspond a region of the predicted gene.~Similar to Arabidopsis thaliana
  misc_feature (71)..(134): Homolog of NCBI NO: 38344282 NR Description: OSJNBa0013K16.14 [Oryza sativa (japonica
  misc_feature (68)..(135): Homolog of NCBI NO: 38344283 NR Description: OSJNBa0013K16.15 [Oryza sativa (japonica
  misc_feature (67)..(154): Homolog of NCBI NO: 38344280 NR Description: OSJNBa0013K16.12 [Oryza sativa (japonica
  misc_feature (63)..(155): Homolog of NCBI NO: 18406598 NR Description: expressed protein; protein id: At2g44670.1
  misc_feature (12)..(155): Homolog of NCBI NO: 15238001 NR Description: putative protein; protein id: At5g47060.1
  misc_feature (1)..(155): Homolog of NCBI NO: 7485163 NR Description: hypothetical protein - Arabidopsis thaliana
  misc_feature (1)..(155): Homolog of NCBI NO: 21594214 NR Description: unknown [Arabidopsis thaliana]
  misc_feature (1)..(155): Homolog of NCBI NO: 18414940 NR Description: expressed protein

SEQ ID NO: 31176 - DNA, 1145 bp, Arabidopsis thaliana; identical to SEQ ID NO: 27586
  misc_feature (1)..(1145): Ceres Seq. ID no. 12394991
  misc_feature: MA Experiment ID: 108435 Result: Down-regulated in Transcription
  misc_feature: MA Experiment 108435 PARAMETER Experiment Name: At_stm_Mutants_cDNA_P Parameter: Plant Line Value: wt Landsburg vs stm
  misc_feature: MA Experiment 108435 PARAMETER Experiment Name: At_stm_Mutants_cDNA_P Parameter: Tissue Value: Shoot Apical Meristem Region
  misc_feature: MA Experiment ID: 108488 Result: Up-regulated in Transcription
  misc_feature: MA Experiment ID: 108595 Result: Down-regulated in Transcription
  misc_feature: MA Experiment 108595 PARAMETER Experiment Name: At_Ler-pi_Ovule_cDNA_P Parameter: Plant Line Value: null
  misc_feature: MA Experiment ID: 20000224 Result: Down-regulated in Transcription
  misc_feature: MA Experiment ID: 20001905 Result: Down-regulated in Transcription
  misc_feature: MA Experiment 20001905 PARAMETER Experiment Name: At_Drought_Reproduction_P Parameter: Age (day) Value: 40
  misc_feature: MA Experiment 20001905 PARAMETER Experiment Name: At_Drought_Reproduction_P Parameter: Organism Value: A. thaliana
  misc_feature: MA Experiment 20001905 PARAMETER Experiment Name: At_Drought_Reproduction_P Parameter: Plant Line Value: WS
  misc_feature: MA Experiment 20001905 PARAMETER Experiment Name: At_Drought_Reproduction_P Parameter: Timepoint (day) Value: 10
  misc_feature: MA Experiment 20001905 PARAMETER Experiment Name: At_Drought_Reproduction_P Parameter: Tissue Value: Rosettes
  misc_feature: MA Experiment 20001905 PARAMETER Experiment Name: At_Drought_Reproduction_P Parameter: Treatment Value: Drought vs. No Drought

SEQ ID NO: 31177 - protein, 211 aa, Arabidopsis thaliana; identical to SEQ ID NO: 27587
  peptide (1)..(211): Ceres Seq. ID no. 12394992
  misc_feature (150)..(183): Pfam Name: TPR Domain Pfam Description: TPR Domain
  misc_feature (30)..(194): Homolog of NCBI NO: 23129236 NR Description: hypothetical protein [Nostoc punctiforme]
  misc_feature (30)..(197): Homolog of NCBI NO: 23042213 NR Description: hypothetical protein [Trichodesmium erythraeum
  misc_feature (28)..(197): Homolog of NCBI NO: 22299949 NR Description: photosystem I assembly related protein
  misc_feature (7)..(118): Homolog of NCBI NO: 38636894 NR Description: stress inducible protein-like
  misc_feature (7)..(118): Homolog of NCBI NO: 37535100 NR Description: unknown protein [Oryza sativa (japonica
  misc_feature (7)..(211): Homolog of NCBI NO: 37535090 NR Description: putative stress inducible protein
  misc_feature (1)..(211): Homolog of NCBI NO: 7487355 NR Description: hypothetical protein T22J18.13 - Arabidopsis
  misc_feature (1)..(211): Homolog of NCBI NO: 21537104 NR Description: unknown [Arabidopsis thaliana]
  misc_feature (1)..(211): Homolog of NCBI NO: 30687988 NR Description: tetratricopeptide repeat (TPR)-containing protein
  misc_feature (1)..(211): Homolog of NCBI NO: 22329737 NR Description: expressed protein

SEQ ID NO: 31178 - protein, 124 aa, Arabidopsis thaliana; identical to SEQ ID NO: 27588
  peptide (1)..(124): Ceres Seq. ID no. 12394993
  misc_feature (63)..(96): Pfam Name: TPR Domain Pfam Description: TPR Domain
  misc_feature (1)..(107): Homolog of NCBI NO: 23129236 NR Description: hypothetical protein [Nostoc punctiforme]
  misc_feature (1)..(110): Homolog of NCBI NO: 23042213 NR Description: hypothetical protein [Trichodesmium erythraeum
  misc_feature (1)..(110): Homolog of NCBI NO: 22299949 NR Description: photosystem I assembly related protein
  misc_feature (1)..(31): Homolog of NCBI NO: 38636894 NR Description: stress inducible protein-like
  misc_feature (1)..(31): Homolog of NCBI NO: 37535100 NR Description: unknown protein [Oryza sativa (japonica
  misc_feature (1)..(124): Homolog of NCBI NO: 37535090 NR Description: putative stress inducible protein
  misc_feature (1)..(124): Homolog of NCBI NO: 7487355 NR Description: hypothetical protein T22J18.13 - Arabidopsis
  misc_feature (1)..(124): Homolog of NCBI NO: 21537104 NR Description: unknown [Arabidopsis thaliana]
  misc_feature (1)..(124): Homolog of NCBI NO: 30687988 NR Description: tetratricopeptide repeat (TPR)-containing protein
  misc_feature (1)..(124): Homolog of NCBI NO: 22329737 NR Description: expressed protein

SEQ ID NO: 31179 - DNA, 1518 bp, Arabidopsis thaliana; identical to SEQ ID NO: 27589
  misc_feature (1)..(1518): Ceres Seq. ID no. 12333361
  misc_feature: MA Experiment ID: 108463 Result: Up-regulated in Transcription
  misc_feature: MA Experiment 108463 PARAMETER Experiment Name: At_Germinating_Seeds_cDNA_P Parameter: Age (day) Value: 3 vs. 0
  misc_feature: MA Experiment 108463 PARAMETER Experiment Name: At_Germinating_Seeds_cDNA_P Parameter: Tissue Value: Germinating Seeds
  misc_feature: MA Experiment ID: 108573 Result: Up-regulated in Transcription
  misc_feature: MA Experiment 108573 PARAMETER Experiment Name: At_Drought_cDNA_P Parameter: Timepoint (hr) Value: 6
  misc_feature: MA Experiment 108573 PARAMETER Experiment Name: At_Drought_cDNA_P Parameter: Tissue Value: Aerial
  misc_feature: MA Experiment 108573 PARAMETER Experiment Name: At_Drought_cDNA_P Parameter: Treatment Value: Drought vs. No Drought
  misc_feature: MA Experiment ID: 20000214 Result: Down-regulated in Transcription
  misc_feature: MA Experiment 20000214 PARAMETER Experiment Name: At_4deg_Cold_P Parameter: Timepoint (hr) Value: 6
  misc_feature: MA Experiment ID: 20000224 Result: Down-regulated in Transcription
  misc_feature: MA Experiment ID: 20001450 Result: Up-regulated in Transcription
  misc_feature: MA Experiment 20001450 PARAMETER Experiment Name: At_Far-red-induction_P Parameter: Age (day) Value: 7
  misc_feature: MA Experiment 20001450 PARAMETER Experiment Name: At_Far-red-induction_P Parameter: Light Value: Far-red vs. White
  misc_feature: MA Experiment 20001450 PARAMETER Experiment Name: At_Far-red-induction_P Parameter: Organism Value: A. thaliana
  misc_feature: MA Experiment 20001450 PARAMETER Experiment Name: At_Far-red-induction_P Parameter: Plant Line Value: Columbia
  misc_feature: MA Experiment 20001450 PARAMETER Experiment Name: At_Far-red-induction_P Parameter: Timepoint (hr) Value: 8
  misc_feature: MA Experiment 20001450 PARAMETER Experiment Name: At_Far-red-induction_P Parameter: Tissue Value: Whole Plant

SEQ ID NO: 31180 - protein, 380 aa, Arabidopsis thaliana; identical to SEQ ID NO: 27590
  peptide (1)..(380): Ceres Seq. ID no. 12333362
  misc_feature (136)..(373): Pfam Name: alpha/beta hydrolase fold Pfam Description: alpha/beta hydrolase fold
  misc_feature (108)..(304): Homolog of NCBI NO: 15642097 NR Description: esterase/lipase YbfF, putative [Vibrio cholerae]
  misc_feature (137)..(213): Homolog of NCBI NO: 20161236 NR Description: P0408G07.9 [Oryza sativa (japonica
  misc_feature (50)..(290): Homolog of NCBI NO: 21644577 NR Description: Williams-Beuren syndrome critical region 21 [Mus
  misc_feature (52)..(290): Homolog of NCBI NO: 34873230 NR Description: similar to Williams-Beuren syndrome critical
  misc_feature (108)..(375): Homolog of NCBI NO: 7486010 NR Description: hypothetical protein F22O6.50 - Arabidopsis
  misc_feature (104)..(200): Homolog of NCBI NO: 34908512 NR Description: P0679C12.26 [Oryza sativa (japonica
  misc_feature (209)..(375): Homolog of NCBI NO: 34908512 NR Description: P0679C12.26 [Oryza sativa (japonica
  misc_feature (108)..(375): Homolog of NCBI NO: 22331752 NR Description: putative protein
  misc_feature (209)..(377): Homolog of NCBI NO: 20161236 NR Description: P0408G07.9 [Oryza sativa (japonica
  misc_feature (1)..(380): Homolog of NCBI NO: 15234891 NR Description: putative protein

SEQ ID NO: 31181 - protein, 318 aa, Arabidopsis thaliana; identical to SEQ ID NO: 27591
  peptide (1)..(318): Ceres Seq. ID no. 12333363
  misc_feature (74)..(311): Pfam Name: alpha/beta hydrolase fold Pfam Description: alpha/beta hydrolase fold
  misc_feature (46)..(242): Homolog of NCBI NO: 15642097 NR Description: esterase/lipase YbfF, putative [Vibrio cholerae]
  misc_feature (75)..(151): Homolog of NCBI NO: 20161236 NR Description: P0408G07.9 [Oryza sativa (japonica
  misc_feature (1)..(228): Homolog of NCBI NO: 21644577 NR Description: Williams-Beuren syndrome critical region 21 [Mus
  misc_feature (1)..(228): Homolog of NCBI NO: 34873230 NR Description: similar to Williams-Beuren syndrome critical
  misc_feature (46)..(313): Homolog of NCBI NO: 7486010 NR Description: hypothetical protein F22O6.50 - Arabidopsis
  misc_feature (42)..(138): Homolog of NCBI NO: 34908512 NR Description: P0679C12.26 [Oryza sativa (japonica
  misc_feature (147)..(313): Homolog of NCBI NO: 34908512 NR Description: P0679C12.26 [Oryza sativa (japonica
  misc_feature (46)..(313): Homolog of NCBI NO: 22331752 NR Description: putative protein
  misc_feature (147)..(315): Homolog of NCBI NO: 20161236 NR Description: P0408G07.9 [Oryza sativa (japonica
  misc_feature (1)..(318): Homolog of NCBI NO: 15234891 NR Description: putative protein

SEQ ID NO: 31182 - DNA, 1506 bp, Arabidopsis thaliana; identical to SEQ ID NO: 27592
  misc_feature (1)..(1506): Ceres Seq. ID no. 12331587
  misc_feature: MA Experiment ID: 108573 Result: Up-regulated in Transcription
  misc_feature: MA Experiment 108573 PARAMETER Experiment Name: At_Drought_cDNA_P Parameter: Timepoint (hr) Value: 6
  misc_feature: MA Experiment 108573 PARAMETER Experiment Name: At_Drought_cDNA_P Parameter: Tissue Value: Aerial
  misc_feature: MA Experiment 108573 PARAMETER Experiment Name: At_Drought_cDNA_P Parameter: Treatment Value: Drought vs. No Drought
  misc_feature: MA Experiment ID: 20000224 Result: Down-regulated in Transcription

SEQ ID NO: 31183 - protein, 448 aa, Arabidopsis thaliana; identical to SEQ ID NO: 27593
  peptide (1)..(448): Ceres Seq. ID no. 12331588
  misc_feature (68)..(139): Pfam Name: RNA recognition motif. (a.k.a. RRM, RBD, or RNP domain) Pfam Description: RNA recognition motif. (a.k.a. RRM, RBD, or RNP
  misc_feature (29)..(175): Homolog of NCBI NO: 2500586 NR Description: Polypyrimidine tract-binding protein 1 (PTB)
  misc_feature (64)..(269): Homolog of NCBI NO: 28949889 NR Description: polypyrimidine track-binding protein homologue
  misc_feature (65)..(392): Homolog of NCBI NO: 22329999 NR Description: heterogeneous nuclear ribonucleoprotein (hnRNP),
  misc_feature (177)..(362): Homolog of NCBI NO: 20260638 NR Description: putative polypyrimidine tract-binding protein
  misc_feature (52)..(226): Homolog of NCBI NO: 34912728 NR Description: putative polypyrimidine tract-binding protein
  misc_feature (258)..(447): Homolog of NCBI NO: 34912728 NR Description: putative polypyrimidine tract-binding protein
  misc_feature (50)..(443): Homolog of NCBI NO: 15238677 NR Description: polypyrimidine tract-binding protein (PTB),
  misc_feature (50)..(444): Homolog of NCBI NO: 18921326 NR Description: putative polypyrimidine tract-binding protein
  misc_feature (50)..(448): Homolog of NCBI NO: 15232047 NR Description: polypyrimidine tract-binding protein (PTB)
  misc_feature (50)..(426): Homolog of NCBI NO: 11358627 NR Description: polypyrimidine tract-binding protein homolog

SEQ ID NO: 31184 - protein, 399 aa, Arabidopsis thaliana; identical to SEQ ID NO: 27594
  peptide (1)..(399): Ceres Seq. ID no. 12331589
  misc_feature (19)..(90): Pfam Name: RNA recognition motif. (a.k.a. RRM, RBD, or RNP domain) Pfam Description: RNA recognition motif. (a.k.a. RRM, RBD, or RNP
  misc_feature (1)..(126): Homolog of NCBI NO: 2500586 NR Description: Polypyrimidine tract-binding protein 1 (PTB)
  misc_feature (15)..(220): Homolog of NCBI NO: 28949889 NR Description: polypyrimidine track-binding protein homologue
  misc_feature (16)..(343): Homolog of NCBI NO: 22329999 NR Description: heterogeneous nuclear ribonucleoprotein (hnRNP),
  misc_feature (128)..(313): Homolog of NCBI NO: 20260638 NR Description: putative polypyrimidine tract-binding protein
  misc_feature (3)..(177): Homolog of NCBI NO: 34912728 NR Description: putative polypyrimidine tract-binding protein
  misc_feature (209)..(398): Homolog of NCBI NO: 34912728 NR Description: putative polypyrimidine tract-binding protein
  misc_feature (1)..(394): Homolog of NCBI NO: 15238677 NR Description: polypyrimidine tract-binding protein (PTB),
  misc_feature (1)..(395): Homolog of NCBI NO: 18921326 NR Description: putative polypyrimidine tract-binding protein
  misc_feature (1)..(399): Homolog of NCBI NO: 15232047 NR Description: polypyrimidine tract-binding protein (PTB)
  misc_feature (1)..(377): Homolog of NCBI NO: 11358627 NR Description: polypyrimidine tract-binding protein homolog

SEQ ID NO: 31185 - protein, 330 aa, Arabidopsis thaliana; identical to SEQ ID NO: 27595
  peptide (1)..(330): Ceres Seq. ID no. 12331590
  misc_feature (1)..(57): Homolog of NCBI NO: 2500586 NR Description: Polypyrimidine tract-binding protein 1 (PTB)
  misc_feature (1)..(151): Homolog of NCBI NO: 28949889 NR Description: polypyrimidine track-binding protein homologue
  misc_feature (1)..(274): Homolog of NCBI NO: 22329999 NR Description: heterogeneous nuclear ribonucleoprotein (hnRNP),
  misc_feature (59)..(244): Homolog of NCBI NO: 20260638 NR Description: putative polypyrimidine tract-binding protein
  misc_feature (1)..(108): Homolog of NCBI NO: 34912728 NR Description: putative polypyrimidine tract-binding protein
  misc_feature (140)..(329): Homolog of NCBI NO: 34912728 NR Description: putative polypyrimidine tract-binding protein
  misc_feature (1)..(325): Homolog of NCBI NO: 15238677 NR Description: polypyrimidine tract-binding protein (PTB),
  misc_feature (1)..(326): Homolog of NCBI NO: 18921326 NR Description: putative polypyrimidine tract-binding protein
  misc_feature (1)..(330): Homolog of NCBI NO: 15232047 NR Description: polypyrimidine tract-binding protein (PTB)
  misc_feature (1)..(308): Homolog of NCBI NO: 11358627 NR Description: polypyrimidine tract-binding protein homolog

SEQ ID NO: 31186 - DNA, 1179 bp, Arabidopsis thaliana; identical to SEQ ID NO: 27596
  misc_feature (1)..(1179): Ceres Seq. ID no. 12394969
  misc_feature: MA Experiment ID: 20000185 Result: Up-regulated in Transcription
  misc_feature: MA Experiment 20000185 PARAMETER Experiment Name: At_Roots__P Parameter: Age (day) Value: 7 vs. 21
  misc_feature: MA Experiment 20000185 PARAMETER Experiment Name: At_Roots__P Parameter: Organism Value: A. thaliana
  misc_feature: MA Experiment 20000185 PARAMETER Experiment Name: At_Roots__P Parameter: Tissue Value: Roots vs. Whole Plant
  misc_feature: MA Experiment ID: 20000227 Result: Up-regulated in Transcription
  misc_feature: MA Experiment 20000227 PARAMETER Experiment Name: At_Root-Tips-vs-Tops_P Parameter: Tissue Value: Root Tips vs. Root Tops
  misc_feature: MA Experiment ID: 20000235 Result: Down-regulated in Transcription
  misc_feature: MA Experiment 20000235 PARAMETER Experiment Name: At_Siliques_P Parameter: Age (day) Value: 21
  misc_feature: MA Experiment 20000235 PARAMETER Experiment Name: At_Siliques_P Parameter: Organism Value: A. thaliana
  misc_feature: MA Experiment 20000235 PARAMETER Experiment Name: At_Siliques_P Parameter: Plant Line Value: WS
  misc_feature: MA Experiment 20000235 PARAMETER Experiment Name: At_Siliques_P Parameter: Tissue Value: 5-10mm Siliques vs. Whole Plant
  misc_feature: MA Experiment ID: 20000264 Result: Down-regulated in Transcription
  misc_feature: MA Experiment 20000264 PARAMETER Experiment Name: At_Open_Flower_P Parameter: Age (day) Value: 21
  misc_feature: MA Experiment 20000264 PARAMETER Experiment Name: At_Open_Flower_P Parameter: Plant Line Value: WS
  misc_feature: MA Experiment 20000264 PARAMETER Experiment Name: At_Open_Flower_P Parameter: Tissue Value: Open Flower vs. Whole Plant
  misc_feature: MA Experiment ID: 20000265 Result: Up-regulated in Transcription
  misc_feature: MA Experiment 20000265 PARAMETER Experiment Name: At_Open_Flower_P Parameter: Age (day) Value: 21
  misc_feature: MA Experiment 20000265 PARAMETER Experiment Name: At_Open_Flower_P Parameter: Plant Line Value: WS
  misc_feature: MA Experiment 20000265 PARAMETER Experiment Name: At_Open_Flower_P Parameter: Tissue Value: Closed Flower vs. Whole Plant
  misc_feature: MA Experiment ID: 20000286 Result: Up-regulated in Transcription
  misc_feature: MA Experiment 20000286 PARAMETER Experiment Name: At_Open_Flower_P Parameter: Age (day) Value: 21
  misc_feature: MA Experiment 20000286 PARAMETER Experiment Name: At_Open_Flower_P Parameter: Plant Line Value: WS
  misc_feature: MA Experiment 20000286 PARAMETER Experiment Name: At_Open_Flower_P Parameter: Tissue Value: Half Open vs. Whole Plant
  misc_feature: MA Experiment ID: 20000437 Result: Down-regulated in Transcription
  misc_feature: MA Experiment 20000437 PARAMETER Experiment Name: At_Drought_P Parameter: Age (day) Value: 8
  misc_feature: MA Experiment 20000437 PARAMETER Experiment Name: At_Drought_P Parameter: Organism Value: A. thaliana
  misc_feature: MA Experiment 20000437 PARAMETER Experiment Name: At_Drought_P Parameter: Plant Line Value: WS
  misc_feature: MA Experiment 20000437 PARAMETER Experiment Name: At_Drought_P Parameter: Timepoint (hr) Value: 24
  misc_feature: MA Experiment 20000437 PARAMETER Experiment Name: At_Drought_P Parameter: Tissue Value: Whole Plant
  misc_feature: MA Experiment 20000437 PARAMETER Experiment Name: At_Drought_P Parameter: Treatment Value: Drought vs. No Drought
  misc_feature: MA Experiment ID: 20000438 Result: Down-regulated in Transcription
  misc_feature: MA Experiment 20000438 PARAMETER Experiment Name: At_Shoots__P Parameter: Age (day) Value: 14
  misc_feature: MA Experiment 20000438 PARAMETER Experiment Name: At_Shoots__P Parameter: Tissue Value: Shoots vs. Whole Plant
  misc_feature: MA Experiment ID: 20000794 Result: Down-regulated in Transcription
  misc_feature: MA Experiment 20000794 PARAMETER Experiment Name: At_Petals_P Parameter: Age (day) Value: 23-25 days
  misc_feature: MA Experiment 20000794 PARAMETER Experiment Name: At_Petals_P Parameter: Plant Line Value: WS
  misc_feature: MA Experiment 20000794 PARAMETER Experiment Name: At_Petals_P Parameter: Tissue Value: Petals vs. Whole plant
  misc_feature: MA Experiment ID: 20001771 Result: Up-regulated in Transcription
  misc_feature: MA Experiment 20001771 PARAMETER Experiment Name: At_Far-red-enriched-adult_P Parameter: Age (day) Value: 28
  misc_feature: MA Experiment 20001771 PARAMETER Experiment Name: At_Far-red-enriched-adult_P Parameter: Light Value: Far-red enriched vs. White
  misc_feature: MA Experiment 20001771 PARAMETER Experiment Name: At_Far-red-enriched-adult_P Parameter: Organism Value: A. thaliana
  misc_feature: MA Experiment 20001771 PARAMETER Experiment Name: At_Far-red-enriched-adult_P Parameter: Plant Line Value: Columbia
  misc_feature: MA Experiment 20001771 PARAMETER Experiment Name: At_Far-red-enriched-adult_P Parameter: Timepoint (hr) Value: 16
  misc_feature: MA Experiment 20001771 PARAMETER Experiment Name: At_Far-red-enriched-adult_P Parameter: Tissue Value: Aerial
  misc_feature: MA Experiment ID: 20001773 Result: Up-regulated in Transcription
  misc_feature: MA Experiment 20001773 PARAMETER Experiment Name: At_Far-red-enriched-adult_P Parameter: Age (day) Value: 30
  misc_feature: MA Experiment 20001773 PARAMETER Experiment Name: At_Far-red-enriched-adult_P Parameter: Light Value: Far-red enriched vs. White
  misc_feature: MA Experiment 20001773 PARAMETER Experiment Name: At_Far-red-enriched-adult_P Parameter: Organism Value: A. thaliana
  misc_feature: MA Experiment 20001773 PARAMETER Experiment Name: At_Far-red-enriched-adult_P Parameter: Plant Line Value: Columbia
  misc_feature: MA Experiment 20001773 PARAMETER Experiment Name: At_Far-red-enriched-adult_P Parameter: Timepoint (hr) Value: 48
  misc_feature: MA Experiment 20001773 PARAMETER Experiment Name: At_Far-red-enriched-adult_P Parameter: Tissue Value: Aerial
  misc_feature: MA Experiment ID: 20001910 Result: Down-regulated in Transcription
  misc_feature: MA Experiment 20001910 PARAMETER Experiment Name: At_Drought_Reproduction_P Parameter: Age (day) Value: 37
  misc_feature: MA Experiment 20001910 PARAMETER Experiment Name: At_Drought_Reproduction_P Parameter: Organism Value: A. thaliana
  misc_feature: MA Experiment 20001910 PARAMETER Experiment Name: At_Drought_Reproduction_P Parameter: Plant Line Value: WS
  misc_feature: MA Experiment 20001910 PARAMETER Experiment Name: At_Drought_Reproduction_P Parameter: Timepoint (day) Value: 7
  misc_feature: MA Experiment 20001910 PARAMETER Experiment Name: At_Drought_Reproduction_P Parameter: Tissue Value: Flowers
  misc_feature: MA Experiment 20001910 PARAMETER Experiment Name: At_Drought_Reproduction_P Parameter: Treatment Value: Drought vs. No Drought

SEQ ID NO: 31187 - protein, 362 aa, Arabidopsis thaliana; identical to SEQ ID NO: 27597
  peptide (1)..(362): Ceres Seq. ID no. 12394970
  misc_feature (69)..(362): Homolog of NCBI NO: 7453855 NR Description: peroxidase prx15 precursor [Spinacia oleracea]
  misc_feature (64)..(362): Homolog of NCBI NO: 34913714 NR Description: putative peroxidase [Oryza sativa (japonica
  misc_feature (54)..(362): Homolog of NCBI NO: 14031051 NR Description: peroxidase [Nicotiana tabacum]
  misc_feature (69)..(362): Homolog of NCBI NO: 15219493 NR Description: peroxidase, putative
  misc_feature (69)..(362): Homolog of NCBI NO: 21554765 NR Description: peroxidase, putative [Arabidopsis thaliana]
  misc_feature (56)..(362): Homolog of NCBI NO: 34903044 NR Description: unnamed protein product [Oryza sativa (japonica
  misc_feature (48)..(362): Homolog of NCBI NO: 35215022 NR Description: putative peroxidase 40 precursor
  misc_feature (24)..(362): Homolog of NCBI NO: 34015359 NR Description: putative peroxidase [Oryza sativa (japonica
  misc_feature (15)..(362): Homolog of NCBI NO: 15234882 NR Description: peroxidase family; protein id: At4g16270.1
  misc_feature (15)..(362): Homolog of NCBI NO: 26397553 NR Description: Peroxidase 40 precursor (Atperox P40)

SEQ ID NO: 31188 - protein, 348 aa, Arabidopsis thaliana; identical to SEQ ID NO: 27598
  peptide (1)..(348): Ceres Seq. ID no. 12394971
  misc_feature (55)..(348): Homolog of NCBI NO: 7453855 NR Description: peroxidase prx15 precursor [Spinacia oleracea]
  misc_feature (50)..(348): Homolog of NCBI NO: 34913714 NR Description: putative peroxidase [Oryza sativa (japonica
  misc_feature (40)..(348): Homolog of NCBI NO: 14031051 NR Description: peroxidase [Nicotiana tabacum]
  misc_feature (55)..(348): Homolog of NCBI NO: 15219493 NR Description: peroxidase, putative
  misc_feature (55)..(348): Homolog of NCBI NO: 21554765 NR Description: peroxidase, putative [Arabidopsis thaliana]
  misc_feature (42)..(348): Homolog of NCBI NO: 34903044 NR Description: unnamed protein product [Oryza sativa (japonica
  misc_feature (34)..(348): Homolog of NCBI NO: 35215022 NR Description: putative peroxidase 40 precursor
  misc_feature (10)..(348): Homolog of NCBI NO: 34015359 NR Description: putative peroxidase [Oryza sativa (japonica
  misc_feature (1)..(348): Homolog of NCBI NO: 15234882 NR Description: peroxidase family; protein id: At4g16270.1
  misc_feature (1)..(348): Homolog of NCBI NO: 26397553 NR Description: Peroxidase 40 precursor (Atperox P40)

SEQ ID NO: 31189 - protein, 339 aa, Arabidopsis thaliana; identical to SEQ ID NO: 27599
  peptide (1)..(339): Ceres Seq. ID no. 12394972
  misc_feature (46)..(339): Homolog of NCBI NO: 7453855 NR Description: peroxidase prx15 precursor [Spinacia oleracea]
  misc_feature (41)..(339): Homolog of NCBI NO: 34913714 NR Description: putative peroxidase [Oryza sativa (japonica
  misc_feature (31)..(339): Homolog of NCBI NO: 14031051 NR Description: peroxidase [Nicotiana tabacum]
  misc_feature (46)..(339): Homolog of NCBI NO: 15219493 NR Description: peroxidase, putative
  misc_feature (46)..(339): Homolog of NCBI NO: 21554765 NR Description: peroxidase, putative [Arabidopsis thaliana]
  misc_feature (33)..(339): Homolog of NCBI NO: 34903044 NR Description: unnamed protein product [Oryza sativa (japonica
  misc_feature (25)..(339): Homolog of NCBI NO: 35215022 NR Description: putative peroxidase 40 precursor
  misc_feature (1)..(339): Homolog of NCBI NO: 34015359 NR Description: putative peroxidase [Oryza sativa (japonica
  misc_feature (1)..(339): Homolog of NCBI NO: 15234882 NR Description: peroxidase family; protein id: At4g16270.1
  misc_feature (1)..(339): Homolog of NCBI NO: 26397553 NR Description: Peroxidase 40 precursor (Atperox P40)

SEQ ID NO: 31190 - DNA, 1167 bp, Arabidopsis thaliana; identical to SEQ ID NO: 27600
  misc_feature (1)..(1167): Ceres Seq. ID no. 12327065
  misc_feature: MA Experiment ID: 108434 Result: Up-regulated in Transcription
  misc_feature: MA Experiment 108434 PARAMETER Experiment Name: At_Root_Tips_cDNA_P Parameter: Tissue Value: Root Tips
  misc_feature: MA Experiment ID: 108462 Result: Down-regulated in Transcription
  misc_feature: MA Experiment 108462 PARAMETER Experiment Name: At_Germinating_Seeds_cDNA_P Parameter: Age (day) Value: 2 vs. 0
  misc_feature: MA Experiment 108462 PARAMETER Experiment Name: At_Germinating_Seeds_cDNA_P Parameter: Tissue Value: Germinating Seeds
  misc_feature: MA Experiment ID: 108463 Result: Down-regulated in Transcription
  misc_feature: MA Experiment 108463 PARAMETER Experiment Name: At_Germinating_Seeds_cDNA_P Parameter: Age (day) Value: 3 vs. 0
  misc_feature: MA Experiment 108463 PARAMETER Experiment Name: At_Germinating_Seeds_cDNA_P Parameter: Tissue Value: Germinating Seeds
  misc_feature: MA Experiment ID: 108464 Result: Down-regulated in Transcription
  misc_feature: MA Experiment 108464 PARAMETER Experiment Name: At_Germinating_Seeds_cDNA_P Parameter: Age (day) Value: 4 vs. 0
  misc_feature: MA Experiment 108464 PARAMETER Experiment Name: At_Germinating_Seeds_cDNA_P Parameter: Tissue Value: Germinating Seeds
  misc_feature: MA Experiment ID: 108489 Result: Up-regulated in Transcription
  misc_feature: MA Experiment ID: 20000111 Result: Down-regulated in Transcription
  misc_feature: MA Experiment 20000111 PARAMETER Experiment Name: At_42deg_Heat_cDNA_P Parameter: Temperature (deg C) Value: 42 vs. 22
  misc_feature: MA Experiment 20000111 PARAMETER Experiment Name: At_42deg_Heat_cDNA_P Parameter: Timepoint (hr) Value: 6
  misc_feature: MA Experiment 20000111 PARAMETER Experiment Name: At_42deg_Heat_cDNA_P Parameter: Tissue Value: Aerial
  misc_feature: MA Experiment ID: 20000113 Result: Down-regulated in Transcription
  misc_feature: MA Experiment 20000113 PARAMETER Experiment Name: At_42deg_Heat_cDNA_P Parameter: Temperature (deg C) Value: 42 vs. 22
  misc_feature: MA Experiment 20000113 PARAMETER Experiment Name: At_42deg_Heat_cDNA_P Parameter: Timepoint (hr) Value: 8
  misc_feature: MA Experiment 20000113 PARAMETER Experiment Name: At_42deg_Heat_cDNA_P Parameter: Tissue Value: Aerial
  misc_feature: MA Experiment ID: 20000173 Result: Down-regulated in Transcription
  misc_feature: MA Experiment 20000173 PARAMETER Experiment Name: At_42deg_Heat_P Parameter: Age (day) Value: 14
  misc_feature: MA Experiment 20000173 PARAMETER Experiment Name: At_42deg_Heat_P Parameter: Organism Value: A. thaliana
  misc_feature: MA Experiment 20000173 PARAMETER Experiment Name: At_42deg_Heat_P Parameter: Plant Line Value: WS
  misc_feature: MA Experiment 20000173 PARAMETER Experiment Name: At_42deg_Heat_P Parameter: Temperature (deg C) Value: 42 vs. 22
  misc_feature: MA Experiment 20000173 PARAMETER Experiment Name: At_42deg_Heat_P Parameter: Timepoint (hr) Value: 6
  misc_feature: MA Experiment 20000173 PARAMETER Experiment Name: At_42deg_Heat_P Parameter: Tissue Value: Aerial
  misc_feature: MA Experiment ID: 20000180 Result: Down-regulated in Transcription
  misc_feature: MA Experiment 20000180 PARAMETER Experiment Name: At_Germinating_Seeds_P Parameter: Age (hr) Value: 24 vs. 0
  misc_feature: MA Experiment 20000180 PARAMETER Experiment Name: At_Germinating_Seeds_P Parameter: Tissue Value: Germinating Seeds
  misc_feature: MA Experiment ID: 20001451 Result: Up-regulated in Transcription
  misc_feature: MA Experiment 20001451 PARAMETER Experiment Name: At_Far-red-induction_P Parameter: Age (day) Value: 7
  misc_feature: MA Experiment 20001451 PARAMETER Experiment Name: At_Far-red-induction_P Parameter: Light Value: Far-red vs. White
  misc_feature: MA Experiment 20001451 PARAMETER Experiment Name: At_Far-red-induction_P Parameter: Organism Value: A. thaliana
  misc_feature: MA Experiment 20001451 PARAMETER Experiment Name: At_Far-red-induction_P Parameter: Plant Line Value: Columbia
  misc_feature: MA Experiment 20001451 PARAMETER Experiment Name: At_Far-red-induction_P Parameter: Timepoint (hr) Value: 24
  misc_feature: MA Experiment 20001451 PARAMETER Experiment Name: At_Far-red-induction_P Parameter: Tissue Value: Whole Plant
  misc_feature: MA Experiment ID: 20001557 Result: Up-regulated in Transcription
  misc_feature: MA Experiment 20001557 PARAMETER Experiment Name: At_Drought_Soil_Dry_P Parameter: Age (day) Value: 27
  misc_feature: MA Experiment 20001557 PARAMETER Experiment Name: At_Drought_Soil_Dry_P Parameter: Organism Value: A. thaliana
  misc_feature: MA Experiment 20001557 PARAMETER Experiment Name: At_Drought_Soil_Dry_P Parameter: Plant Line Value: WS
  misc_feature: MA Experiment 20001557 PARAMETER Experiment Name: At_Drought_Soil_Dry_P Parameter: Post Timepoint (hr) Value: 3
  misc_feature: MA Experiment 20001557 PARAMETER Experiment Name: At_Drought_Soil_Dry_P Parameter: Post-Treatment Value: Re-Water vs. No Drought
  misc_feature: MA Experiment 20001557 PARAMETER Experiment Name: At_Drought_Soil_Dry_P Parameter: Timepoint (day) Value: 13
  misc_feature: MA Experiment 20001557 PARAMETER Experiment Name: At_Drought_Soil_Dry_P Parameter: Treatment Value: Drought vs. No Drought
  misc_feature: MA Experiment ID: 20001560 Result: Up-regulated in Transcription
  misc_feature: MA Experiment 20001560 PARAMETER Experiment Name: At_Drought_Soil_Dry_P Parameter: Age (day) Value: 28
  misc_feature: MA Experiment 20001560 PARAMETER Experiment Name: At_Drought_Soil_Dry_P Parameter: Organism Value: A. thaliana
  misc_feature: MA Experiment 20001560 PARAMETER Experiment Name: At_Drought_Soil_Dry_P Parameter: Plant Line Value: WS
  misc_feature: MA Experiment 20001560 PARAMETER Experiment Name: At_Drought_Soil_Dry_P Parameter: Post Timepoint (hr) Value: None
  misc_feature: MA Experiment 20001560 PARAMETER Experiment Name: At_Drought_Soil_Dry_P Parameter: Post-Treatment Value: None
  misc_feature: MA Experiment 20001560 PARAMETER Experiment Name: At_Drought_Soil_Dry_P Parameter: Timepoint (day) Value: 14
  misc_feature: MA Experiment 20001560 PARAMETER Experiment Name: At_Drought_Soil_Dry_P Parameter: Treatment Value: Drought vs. No Drought

SEQ ID NO: 31191 - protein, 313 aa, Arabidopsis thaliana; identical to SEQ ID NO: 27601
  peptide (1)..(313): Ceres Seq. ID no. 12327066
  misc_feature (39)..(236): Pfam Name: AIG1 family Pfam Description: AIG1 family
  misc_feature (7)..(299): Homolog of NCBI NO: 21780151 NR Description: toc33-like protein [Orychophragmus violaceus]
  misc_feature (7)..(299): Homolog of NCBI NO: 14596163 NR Description: similar to GTP-binding protein [Arabidopsis
  misc_feature (7)..(299): Homolog of NCBI NO: 15217705 NR Description: putative GTP-binding protein
  misc_feature (8)..(312): Homolog of NCBI NO: 7259224 NR Description: Toc34-2 protein [Zea mays]
  misc_feature (8)..(312): Homolog of NCBI NO: 6689637 NR Description: Toc34-1 protein [Zea mays]
  misc_feature (5)..(307): Homolog of NCBI NO: 1076522 NR Description: chloroplast import-associated protein IAP36,
  misc_feature (5)..(307): Homolog of NCBI NO: 25091388 NR Description: Translocase of chloroplast 34 (34 kDa chloroplast envelope protein) (GTP-binding protein OEP34) (GTP-binding
  misc_feature (1)..(313): Homolog of NCBI NO: 25091410 NR Description: Translocase of chloroplast 34 (34 kDa chloroplast
  misc_feature (1)..(313): Homolog of NCBI NO: 15238381 NR Description: GTP-binding protein (gb|AAD09203.1)
  misc_feature (1)..(313): Homolog of NCBI NO: 21594231 NR Description: GTP-binding protein [Arabidopsis thaliana]

SEQ ID NO: 31192 - protein, 197 aa, Arabidopsis thaliana; identical to SEQ ID NO: 27602
  peptide (1)..(197): Ceres Seq. ID no. 12327067
  misc_feature (1)..(120): Pfam Name: AIG1 family Pfam Description: AIG1 family
  misc_feature (1)..(183): Homolog of NCBI NO: 21780151 NR Description: toc33-like protein [Orychophragmus violaceus]
  misc_feature (1)..(183): Homolog of NCBI NO: 14596163 NR Description: similar to GTP-binding protein [Arabidopsis
  misc_feature (1)..(183): Homolog of NCBI NO: 15217705 NR Description: putative GTP-binding protein
  misc_feature (1)..(196): Homolog of NCBI NO: 7259224 NR Description: Toc34-2 protein [Zea mays]
  misc_feature (1)..(196): Homolog of NCBI NO: 6689637 NR Description: Toc34-1 protein [Zea mays]
  misc_feature (1)..(191): Homolog of NCBI NO: 1076522 NR Description: chloroplast import-associated protein IAP36,
  misc_feature (1)..(191): Homolog of NCBI NO: 25091388 NR Description: Translocase of chloroplast 34 (34 kDa chloroplast envelope protein) (GTP-binding protein OEP34) (GTP-binding
  misc_feature (1)..(197): Homolog of NCBI NO: 25091410 NR Description: Translocase of chloroplast 34 (34 kDa chloroplast
  misc_feature (1)..(197): Homolog of NCBI NO: 15238381 NR Description: GTP-binding protein (gb|AAD09203.1)
  misc_feature (1)..(197): Homolog of NCBI NO: 21594231 NR Description: GTP-binding protein [Arabidopsis thaliana]

SEQ ID NO: 31193 - DNA, 1584 bp, Arabidopsis thaliana; identical to SEQ ID NO: 27603
  misc_feature (1)..(1584): Ceres Seq. ID no. 12704699
  misc_feature: MA Experiment ID: 20000068 Result: Down-regulated in Transcription
  misc_feature: MA Experiment ID: 20000113 Result: Down-regulated in Transcription
  misc_feature: MA Experiment 20000113 PARAMETER Experiment Name: At_42deg_Heat_cDNA_P Parameter: Temperature (deg C) Value: 42 vs. 22
  misc_feature: MA Experiment 20000113 PARAMETER Experiment Name: At_42deg_Heat_cDNA_P Parameter: Timepoint (hr) Value: 8
  misc_feature: MA Experiment 20000113 PARAMETER Experiment Name: At_42deg_Heat_cDNA_P Parameter: Tissue Value: Aerial
  misc_feature: MA Experiment ID: 20000171 Result: Down-regulated in Transcription
  misc_feature: MA Experiment 20000171 PARAMETER Experiment Name: At_42deg_Heat_P Parameter: Age (day) Value: 14
  misc_feature: MA Experiment 20000171 PARAMETER Experiment Name: At_42deg_Heat_P Parameter: Organism Value: A. thaliana
  misc_feature: MA Experiment 20000171 PARAMETER Experiment Name: At_42deg_Heat_P Parameter: Plant Line Value: WS
  misc_feature: MA Experiment 20000171 PARAMETER Experiment Name: At_42deg_Heat_P Parameter: Temperature (deg C) Value: 42 vs. 22
  misc_feature: MA Experiment 20000171 PARAMETER Experiment Name: At_42deg_Heat_P Parameter: Timepoint (hr) Value: 1
  misc_feature: MA Experiment 20000171 PARAMETER Experiment Name: At_42deg_Heat_P Parameter: Tissue Value: Aerial
  misc_feature: MA Experiment ID: 20000173 Result: Down-regulated in Transcription
  misc_feature: MA Experiment 20000173 PARAMETER Experiment Name: At_42deg_Heat_P Parameter: Age (day) Value: 14
  misc_feature: MA Experiment 20000173 PARAMETER Experiment Name: At_42deg_Heat_P Parameter: Organism Value: A. thaliana
  misc_feature: MA Experiment 20000173 PARAMETER Experiment Name: At_42deg_Heat_P Parameter: Plant Line Value: WS
  misc_feature: MA Experiment 20000173 PARAMETER Experiment Name: At_42deg_Heat_P Parameter: Temperature (deg C) Value: 42 vs. 22
  misc_feature: MA Experiment 20000173 PARAMETER Experiment Name: At_42deg_Heat_P Parameter: Timepoint (hr) Value: 6
  misc_feature: MA Experiment 20000173 PARAMETER Experiment Name: At_42deg_Heat_P Parameter: Tissue Value: Aerial
  misc_feature: MA Experiment ID: 20000184 Result: Down-regulated in Transcription
  misc_feature: MA Experiment 20000184 PARAMETER Experiment Name: At_Shoots__P Parameter: Age (day) Value: 7
  misc_feature: MA Experiment 20000184 PARAMETER Experiment Name: At_Shoots__P Parameter: Tissue Value: Shoots vs. Whole Plant
  misc_feature: MA Experiment ID: 20000185 Result: Down-regulated in Transcription
  misc_feature: MA Experiment 20000185 PARAMETER Experiment Name: At_Roots__P Parameter: Age (day) Value: 7 vs. 21
  misc_feature: MA Experiment 20000185 PARAMETER Experiment Name: At_Roots__P Parameter: Organism Value: A. thaliana
  misc_feature: MA Experiment 20000185 PARAMETER Experiment Name: At_Roots__P Parameter: Tissue Value: Roots vs. Whole Plant
  misc_feature: MA Experiment ID: 20000227 Result: Down-regulated in Transcription
  misc_feature: MA Experiment 20000227 PARAMETER Experiment Name: At_Root-Tips-vs-Tops_P Parameter: Tissue Value: Root Tips vs. Root Tops
  misc_feature: MA Experiment ID: 20000439 Result: Down-regulated in Transcription
  misc_feature: MA Experiment 20000439 PARAMETER Experiment Name: At_Roots__P Parameter: Age (day) Value: 14 vs. 21
  misc_feature: MA Experiment 20000439 PARAMETER Experiment Name: At_Roots__P Parameter: Organism Value: A. thaliana
  misc_feature: MA Experiment 20000439 PARAMETER Experiment Name: At_Roots__P Parameter: Tissue Value: Roots vs. Whole Plant
  misc_feature: MA Experiment ID: 20000496 Result: Up-regulated in Transcription
  misc_feature: MA Experiment 20000496 PARAMETER Experiment Name: At_Guard_Cells_P Parameter: Harvest Date Value: 7/19/2002
  misc_feature: MA Experiment 20000496 PARAMETER Experiment Name: At_Guard_Cells_P Parameter: Organism Value: Canola
  misc_feature: MA Experiment 20000496 PARAMETER Experiment Name: At_Guard_Cells_P Parameter: Tissue Value: Guard Cells vs. Leaves
  misc_feature: MA Experiment ID: 20000794 Result: Up-regulated in Transcription
  misc_feature: MA Experiment 20000794 PARAMETER Experiment Name: At_Petals_P Parameter: Age (day) Value: 23-25 days
  misc_feature: MA Experiment 20000794 PARAMETER Experiment Name: At_Petals_P Parameter: Plant Line Value: WS
  misc_feature: MA Experiment 20000794 PARAMETER Experiment Name: At_Petals_P Parameter: Tissue Value: Petals vs. Whole plant
  misc_feature: MA Experiment ID: 20001557 Result: Up-regulated in Transcription
  misc_feature: MA Experiment 20001557 PARAMETER Experiment Name: At_Drought_Soil_Dry_P Parameter: Age (day) Value: 27
  misc_feature: MA Experiment 20001557 PARAMETER Experiment Name: At_Drought_Soil_Dry_P Parameter: Organism Value: A. thaliana
  misc_feature: MA Experiment 20001557 PARAMETER Experiment Name: At_Drought_Soil_Dry_P Parameter: Plant Line Value: WS
  misc_feature: MA Experiment 20001557 PARAMETER Experiment Name: At_Drought_Soil_Dry_P Parameter: Post Timepoint (hr) Value: 3
  misc_feature: MA Experiment 20001557 PARAMETER Experiment Name: At_Drought_Soil_Dry_P Parameter: Post-Treatment Value: Re-Water vs. No Drought
  misc_feature: MA Experiment 20001557 PARAMETER Experiment Name: At_Drought_Soil_Dry_P Parameter: Timepoint (day) Value: 13
  misc_feature: MA Experiment 20001557 PARAMETER Experiment Name: At_Drought_Soil_Dry_P Parameter: Treatment Value: Drought vs. No Drought
  misc_feature: MA Experiment ID: 20001911 Result: Down-regulated in Transcription
  misc_feature: MA Experiment 20001911 PARAMETER Experiment Name: At_Drought_Reproduction_P Parameter: Age (day) Value: 40
  misc_feature: MA Experiment 20001911 PARAMETER Experiment Name: At_Drought_Reproduction_P Parameter: Organism Value: A. thaliana
  misc_feature: MA Experiment 20001911 PARAMETER Experiment Name: At_Drought_Reproduction_P Parameter: Plant Line Value: WS
  misc_feature: MA Experiment 20001911 PARAMETER Experiment Name: At_Drought_Reproduction_P Parameter: Timepoint (day) Value: 10
  misc_feature: MA Experiment 20001911 PARAMETER Experiment Name: At_Drought_Reproduction_P Parameter: Tissue Value: Flowers
  misc_feature: MA Experiment 20001911 PARAMETER Experiment Name: At_Drought_Reproduction_P Parameter: Treatment Value: Drought vs. No Drought

SEQ ID NO: 31194 - protein, 415 aa, Arabidopsis thaliana; identical to SEQ ID NO: 27604
  peptide (1)..(415): Ceres Seq. ID no. 12704700
  misc_feature (72)..(354): Pfam Name: Protein kinase domain Pfam Description: Protein kinase domain
  misc_feature (1)..(358): Homolog of NCBI NO: 15225520 NR Description: putative protein kinase
  misc_feature (1)..(390): Homolog of NCBI NO: 166809 NR Description: protein kinase
  misc_feature (1)..(390): Homolog of NCBI NO: 15241749 NR Description: serine/threonine-specific protein kinase NAK
  misc_feature (1)..(358): Homolog of NCBI NO: 34906046 NR Description: putative serine/threonine-specific protein kinase
  misc_feature (1)..(364): Homolog of NCBI NO: 14719339 NR Description: putative protein kinase [Oryza sativa]
  misc_feature (1)..(396): Homolog of NCBI NO: 34897424 NR Description: putative protein kinase [Oryza sativa (japonica
  misc_feature (259)..(413): Homolog of NCBI NO: 8778537 NR Description: F22G5.5 [Arabidopsis thaliana]
  misc_feature (1)..(259): Homolog of NCBI NO: 8778537 NR Description: F22G5.5 [Arabidopsis thaliana]
  misc_feature (1)..(415): Homolog of NCBI NO: 15222437 NR Description: protein kinase APK1A; protein id: At1g07570.1
  misc_feature (1)..(415): Homolog of NCBI NO: 15227001 NR Description: putative protein kinase; protein id: At2g28930.1

SEQ ID NO: 31195 - protein, 392 aa, Arabidopsis thaliana; identical to SEQ ID NO: 27605
  peptide (1)..(392): Ceres Seq. ID no. 12704701
  misc_feature (49)..(331): Pfam Name: Protein kinase domain Pfam Description: Protein kinase domain
  misc_feature (1)..(335): Homolog of NCBI NO: 15225520 NR Description: putative protein kinase
  misc_feature (1)..(367): Homolog of NCBI NO: 166809 NR Description: protein kinase
  misc_feature (1)..(367): Homolog of NCBI NO: 15241749 NR Description: serine/threonine-specific protein kinase NAK
  misc_feature (1)..(335): Homolog of NCBI NO: 34906046 NR Description: putative serine/threonine-specific protein kinase
  misc_feature (1)..(341): Homolog of NCBI NO: 14719339 NR Description: putative protein kinase [Oryza sativa]
  misc_feature (1)..(373): Homolog of NCBI NO: 34897424 NR Description: putative protein kinase [Oryza sativa (japonica
  misc_feature (236)..(390): Homolog of NCBI NO: 8778537 NR Description: F22G5.5 [Arabidopsis thaliana]
  misc_feature (1)..(236): Homolog of NCBI NO: 8778537 NR Description: F22G5.5 [Arabidopsis thaliana]
  misc_feature (1)..(392): Homolog of NCBI NO: 15222437 NR Description: protein kinase APK1A; protein id: At1g07570.1
  misc_feature (1)..(392): Homolog of NCBI NO: 15227001 NR Description: putative protein kinase; protein id: At2g28930.1

SEQ ID NO: 31196 - protein, 258 aa, Arabidopsis thaliana; identical to SEQ ID NO: 27606
  peptide (1)..(258): Ceres Seq. ID no. 12704702
  misc_feature (1)..(197): Pfam Name: Protein kinase domain Pfam Description: Protein kinase domain
  misc_feature (1)..(201): Homolog of NCBI NO: 15225520 NR Description: putative protein kinase
  misc_feature (1)..(233): Homolog of NCBI NO: 166809 NR Description: protein kinase
  misc_feature (1)..(233): Homolog of NCBI NO: 15241749 NR Description: serine/threonine-specific protein kinase NAK
  misc_feature (1)..(201): Homolog of NCBI NO: 34906046 NR Description: putative serine/threonine-specific protein kinase
  misc_feature (1)..(207): Homolog of NCBI NO: 14719339 NR Description: putative protein kinase [Oryza sativa]
  misc_feature (1)..(239): Homolog of NCBI NO: 34897424 NR Description: putative protein kinase [Oryza sativa (japonica
  misc_feature (102)..(256): Homolog of NCBI NO: 8778537 NR Description: F22G5.5 [Arabidopsis thaliana]
  misc_feature (1)..(102): Homolog of NCBI NO: 8778537 NR Description: F22G5.5 [Arabidopsis thaliana]
  misc_feature (1)..(258): Homolog of NCBI NO: 15222437 NR Description: protein kinase APK1A; protein id: At1g07570.1
  misc_feature (1)..(258): Homolog of NCBI NO: 15227001 NR Description: putative protein kinase; protein id: At2g28930.1

SEQ ID NO: 31197 - DNA, 1205 bp, Arabidopsis thaliana; identical to SEQ ID NO: 27607
  misc_feature (1)..(1205): Ceres Seq. ID no. 12332476
  misc_feature: MA Experiment ID: 108461 Result: Down-regulated in Transcription
  misc_feature: MA Experiment 108461 PARAMETER Experiment Name: At_Germinating_Seeds_cDNA_P Parameter: Age (day) Value: 1 vs. 0
  misc_feature: MA Experiment 108461 PARAMETER Experiment Name: At_Germinating_Seeds_cDNA_P Parameter: Tissue Value: Germinating Seeds
  misc_feature: MA Experiment ID: 108469 Result: Up-regulated in Transcription
  misc_feature: MA Experiment ID: 108572 Result: Up-regulated in Transcription
  misc_feature: MA Experiment 108572 PARAMETER Experiment Name: At_Drought_cDNA_P Parameter: Timepoint (hr) Value: 1
  misc_feature: MA Experiment 108572 PARAMETER Experiment Name: At_Drought_cDNA_P Parameter: Tissue Value: Aerial
  misc_feature: MA Experiment 108572 PARAMETER Experiment Name: At_Drought_cDNA_P Parameter: Treatment Value: Drought vs. No Drought
  misc_feature: MA Experiment ID: 108573 Result: Up-regulated in Transcription
  misc_feature: MA Experiment 108573 PARAMETER Experiment Name: At_Drought_cDNA_P Parameter: Timepoint (hr) Value: 6
  misc_feature: MA Experiment 108573 PARAMETER Experiment Name: At_Drought_cDNA_P Parameter: Tissue Value: Aerial
  misc_feature: MA Experiment 108573 PARAMETER Experiment Name: At_Drought_cDNA_P Parameter: Treatment Value: Drought vs. No Drought
  misc_feature: MA Experiment ID: 108574 Result: Up-regulated in Transcription
  misc_feature: MA Experiment 108574 PARAMETER Experiment Name: At_Wounding__cDNA_P Parameter: Timepoint (hr) Value: 1
  misc_feature: MA Experiment 108574 PARAMETER Experiment Name: At_Wounding__cDNA_P Parameter: Tissue Value: Aerial
  misc_feature: MA Experiment 108574 PARAMETER Experiment Name: At_Wounding__cDNA_P Parameter: Treatment Value: Wounding vs. No Wounding
  misc_feature: MA Experiment ID: 108585 Result: Up-regulated in Transcription
  misc_feature: MA Experiment 108585 PARAMETER Experiment Name: At_5mM_NaNP_cDNA_P Parameter: Timepoint (hr) Value: 6
  misc_feature: MA Experiment 108585 PARAMETER Experiment Name: At_5mM_NaNP_cDNA_P Parameter: Tissue Value: Aerial
  misc_feature: MA Experiment 108585 PARAMETER Experiment Name: At_5mM_NaNP_cDNA_P Parameter: Treatment Value: null
  misc_feature: MA Experiment ID: 108667 Result: Up-regulated in Transcription
  misc_feature: MA Experiment 108667 PARAMETER Experiment Name: At_2mM_SA_cDNA_P Parameter: Plant Line Value: WS
  misc_feature: MA Experiment 108667 PARAMETER Experiment Name: At_2mM_SA_cDNA_P Parameter: Timepoint (hr) Value: 1
  misc_feature: MA Experiment 108667 PARAMETER Experiment Name: At_2mM_SA_cDNA_P Parameter: Treatment Value: 2mM SA vs. No Treatment
  misc_feature: MA Experiment ID: 108668 Result: Up-regulated in Transcription
  misc_feature: MA Experiment 108668 PARAMETER Experiment Name: At_2mM_SA_cDNA_P Parameter: Plant Line Value: WS
  misc_feature: MA Experiment 108668 PARAMETER Experiment Name: At_2mM_SA_cDNA_P Parameter: Timepoint (hr) Value: 6
  misc_feature: MA Experiment 108668 PARAMETER Experiment Name: At_2mM_SA_cDNA_P Parameter: Treatment Value: 2mM SA vs. No Treatment
  misc_feature: MA Experiment ID: 20000086 Result: Up-regulated in Transcription
  misc_feature: MA Experiment 20000086 PARAMETER Experiment Name: At_100uM_ABA_Mutants_cDNA_P Parameter: Plant Line Value: CS22
  misc_feature: MA Experiment 20000086 PARAMETER Experiment Name: At_100uM_ABA_Mutants_cDNA_P Parameter: Timepoint (hr) Value: 6
  misc_feature: MA Experiment 20000086 PARAMETER Experiment Name: At_100uM_ABA_Mutants_cDNA_P Parameter: Tissue Value: Aerial
  misc_feature: MA Experiment 20000086 PARAMETER Experiment Name: At_100uM_ABA_Mutants_cDNA_P Parameter: Treatment Value: 100uM ABA vs. No Treatment
  misc_feature: MA Experiment ID: 20000087 Result: Up-regulated in Transcription
  misc_feature: MA Experiment 20000087 PARAMETER Experiment Name: At_100uM_ABA_Mutants_cDNA_P Parameter: Plant Line Value: WS
  misc_feature: MA Experiment 20000087 PARAMETER Experiment Name: At_100uM_ABA_Mutants_cDNA_P Parameter: Timepoint (hr) Value: 6
  misc_feature: MA Experiment 20000087 PARAMETER Experiment Name: At_100uM_ABA_Mutants_cDNA_P Parameter: Tissue Value: Aerial
  misc_feature: MA Experiment 20000087 PARAMETER Experiment Name: At_100uM_ABA_Mutants_cDNA_P Parameter: Treatment Value: 100uM ABA vs. No Treatment
  misc_feature: MA Experiment ID: 20000089 Result: Up-regulated in Transcription
  misc_feature: MA Experiment ID: 20000090 Result: Up-regulated in Transcription
  misc_feature: MA Experiment ID: 20000117 Result: Up-regulated in Transcription
  misc_feature: MA Experiment 20000117 PARAMETER Experiment Name: At_100uM_ABA_Mutants_cDNA_P Parameter: Plant Line Value: Columbia
  misc_feature: MA Experiment 20000117 PARAMETER Experiment Name: At_100uM_ABA_Mutants_cDNA_P Parameter: Timepoint (hr) Value: 6
  misc_feature: MA Experiment 20000117 PARAMETER Experiment Name: At_100uM_ABA_Mutants_cDNA_P Parameter: Tissue Value: Aerial
  misc_feature: MA Experiment 20000117 PARAMETER Experiment Name: At_100uM_ABA_Mutants_cDNA_P Parameter: Treatment Value: 100uM ABA vs. No Treatment
  misc_feature: MA Experiment ID: 20000179 Result: Down-regulated in Transcription
  misc_feature: MA Experiment 20000179 PARAMETER Experiment Name: At_Germinating_Seeds_P Parameter: Age (hr) Value: 6 vs. 0
  misc_feature: MA Experiment 20000179 PARAMETER Experiment Name: At_Germinating_Seeds_P Parameter: Tissue Value: Germinating Seeds
  misc_feature: MA Experiment ID: 20000180 Result: Down-regulated in Transcription
  misc_feature: MA Experiment 20000180 PARAMETER Experiment Name: At_Germinating_Seeds_P Parameter: Age (hr) Value: 24 vs. 0
  misc_feature: MA Experiment 20000180 PARAMETER Experiment Name: At_Germinating_Seeds_P Parameter: Tissue Value: Germinating Seeds
  misc_feature: MA Experiment ID: 20000182 Result: Up-regulated in Transcription
  misc_feature: MA Experiment 20000182 PARAMETER Experiment Name: At_2mM_SA_P Parameter: Age (day) Value: 14
  misc_feature: MA Experiment 20000182 PARAMETER Experiment Name: At_2mM_SA_P Parameter: Organism Value: A. thaliana
  misc_feature: MA Experiment 20000182 PARAMETER Experiment Name: At_2mM_SA_P Parameter: Plant Line Value: WS
  misc_feature: MA Experiment 20000182 PARAMETER Experiment Name: At_2mM_SA_P Parameter: Timepoint (hr) Value: 6
  misc_feature: MA Experiment 20000182 PARAMETER Experiment Name: At_2mM_SA_P Parameter: Tissue Value: Aerial
  misc_feature: MA Experiment 20000182 PARAMETER Experiment Name: At_2mM_SA_P Parameter: Treatment Value: 2mM SA vs. No Treatment
  misc_feature: MA Experiment ID: 20000185 Result: Up-regulated in Transcription
  misc_feature: MA Experiment 20000185 PARAMETER Experiment Name: At_Roots__P Parameter: Age (day) Value: 7 vs. 21
  misc_feature: MA Experiment 20000185 PARAMETER Experiment Name: At_Roots__P Parameter: Organism Value: A. thaliana
  misc_feature: MA Experiment 20000185 PARAMETER Experiment Name: At_Roots__P Parameter: Tissue Value: Roots vs. Whole Plant
  misc_feature: MA Experiment ID: 20000224 Result: Up-regulated in Transcription
  misc_feature: MA Experiment ID: 20000437 Result: Up-regulated in Transcription
  misc_feature: MA Experiment 20000437 PARAMETER Experiment Name: At_Drought_P Parameter: Age (day) Value: 8
  misc_feature: MA Experiment 20000437 PARAMETER Experiment Name: At_Drought_P Parameter: Organism Value: A. thaliana
  misc_feature: MA Experiment 20000437 PARAMETER Experiment Name: At_Drought_P Parameter: Plant Line Value: WS
  misc_feature: MA Experiment 20000437 PARAMETER Experiment Name: At_Drought_P Parameter: Timepoint (hr) Value: 24
  misc_feature: MA Experiment 20000437 PARAMETER Experiment Name: At_Drought_P Parameter: Tissue Value: Whole Plant
  misc_feature: MA Experiment 20000437 PARAMETER Experiment Name: At_Drought_P Parameter: Treatment Value: Drought vs. No Drought
  misc_feature: MA Experiment ID: 20000439 Result: Up-regulated in Transcription
  misc_feature: MA Experiment 20000439 PARAMETER Experiment Name: At_Roots__P Parameter: Age (day) Value: 14 vs. 21
  misc_feature: MA Experiment 20000439 PARAMETER Experiment Name: At_Roots__P Parameter: Organism Value: A. thaliana
  misc_feature: MA Experiment 20000439 PARAMETER Experiment Name: At_Roots__P Parameter: Tissue Value: Roots vs. Whole Plant
  misc_feature: MA Experiment ID: 20000527 Result: Down-regulated in Transcription
  misc_feature: MA Experiment 20000527 PARAMETER Experiment Name: At_10percent_PEG_P Parameter: Age (day) Value: 20
  misc_feature: MA Experiment 20000527 PARAMETER Experiment Name: At_10percent_PEG_P Parameter: Organism Value: A. thaliana
  misc_feature: MA Experiment 20000527 PARAMETER Experiment Name: At_10percent_PEG_P Parameter: Plant Line Value: WS
  misc_feature: MA Experiment 20000527 PARAMETER Experiment Name: At_10percent_PEG_P Parameter: Timepoint (day) Value: 20
  misc_feature: MA Experiment 20000527 PARAMETER Experiment Name: At_10percent_PEG_P Parameter: Tissue Value: Whole Plant
  misc_feature: MA Experiment 20000527 PARAMETER Experiment Name: At_10percent_PEG_P Parameter: Treatment Value: 10percent PEG vs. No Treatment
  misc_feature: MA Experiment ID: 20000794 Result: Down-regulated in Transcription
  misc_feature: MA Experiment 20000794 PARAMETER Experiment Name: At_Petals_P Parameter: Age (day) Value: 23-25 days
  misc_feature: MA Experiment 20000794 PARAMETER Experiment Name: At_Petals_P Parameter: Plant Line Value: WS
  misc_feature: MA Experiment 20000794 PARAMETER Experiment Name: At_Petals_P Parameter: Tissue Value: Petals vs. Whole plant
  misc_feature: MA Experiment ID: 20001247 Result: Down-regulated in Transcription
  misc_feature: MA Experiment 20001247 PARAMETER Experiment Name: At_Far-red-induction_P Parameter: Age (day) Value: 7
  misc_feature: MA Experiment 20001247 PARAMETER Experiment Name: At_Far-red-induction_P Parameter: Light Value: Far-red vs. White
  misc_feature: MA Experiment 20001247 PARAMETER Experiment Name: At_Far-red-induction_P Parameter: Organism Value: A. thaliana
  misc_feature: MA Experiment 20001247 PARAMETER Experiment Name: At_Far-red-induction_P Parameter: Plant Line Value: Columbia
  misc_feature: MA Experiment 20001247 PARAMETER Experiment Name: At_Far-red-induction_P Parameter: Timepoint (hr) Value: 1
  misc_feature: MA Experiment 20001247 PARAMETER Experiment Name: At_Far-red-induction_P Parameter: Tissue Value: Whole Plant
  misc_feature: MA Experiment ID: 20001451 Result: Down-regulated in Transcription
  misc_feature: MA Experiment 20001451 PARAMETER Experiment Name: At_Far-red-induction_P Parameter: Age (day) Value: 7
  misc_feature: MA Experiment 20001451 PARAMETER Experiment Name: At_Far-red-induction_P Parameter: Light Value: Far-red vs. White
  misc_feature: MA Experiment 20001451 PARAMETER Experiment Name: At_Far-red-induction_P Parameter: Organism Value: A. thaliana
  misc_feature: MA Experiment 20001451 PARAMETER Experiment Name: At_Far-red-induction_P Parameter: Plant Line Value: Columbia
  misc_feature: MA Experiment 20001451 PARAMETER Experiment Name: At_Far-red-induction_P Parameter: Timepoint (hr) Value: 24
  misc_feature: MA Experiment 20001451 PARAMETER Experiment Name: At_Far-red-induction_P Parameter: Tissue Value: Whole Plant
  misc_feature: MA Experiment ID: 20001560 Result: Up-regulated in Transcription
  misc_feature: MA Experiment 20001560 PARAMETER Experiment Name: At_Drought_Soil_Dry_P Parameter: Age (day) Value: 28
  misc_feature: MA Experiment 20001560 PARAMETER Experiment Name: At_Drought_Soil_Dry_P Parameter: Organism Value: A. thaliana
  misc_feature: MA Experiment 20001560 PARAMETER Experiment Name: At_Drought_Soil_Dry_P Parameter: Plant Line Value: WS
  misc_feature: MA Experiment 20001560 PARAMETER Experiment Name: At_Drought_Soil_Dry_P Parameter: Post Timepoint (hr) Value: None
  misc_feature: MA Experiment 20001560 PARAMETER Experiment Name: At_Drought_Soil_Dry_P Parameter: Post-Treatment Value: None
  misc_feature: MA Experiment 20001560 PARAMETER Experiment Name: At_Drought_Soil_Dry_P Parameter: Timepoint (day) Value: 14
  misc_feature: MA Experiment 20001560 PARAMETER Experiment Name: At_Drought_Soil_Dry_P Parameter: Treatment Value: Drought vs. No Drought
  misc_feature: MA Experiment ID: 20001904 Result: Up-regulated in Transcription
  misc_feature: MA Experiment 20001904 PARAMETER Experiment Name: At_Drought_Reproduction_P Parameter: Age (day) Value: 37
  misc_feature: MA Experiment 20001904 PARAMETER Experiment Name: At_Drought_Reproduction_P Parameter: Organism Value: A. thaliana
  misc_feature: MA Experiment 20001904 PARAMETER Experiment Name: At_Drought_Reproduction_P Parameter: Plant Line Value: WS
  misc_feature: MA Experiment 20001904 PARAMETER Experiment Name: At_Drought_Reproduction_P Parameter: Timepoint (day) Value: 7
  misc_feature: MA Experiment 20001904 PARAMETER Experiment Name: At_Drought_Reproduction_P Parameter: Tissue Value: Rosettes
  misc_feature: MA Experiment 20001904 PARAMETER Experiment Name: At_Drought_Reproduction_P Parameter: Treatment Value: Drought vs. No Drought
  misc_feature: MA Experiment ID: 20001905 Result: Up-regulated in Transcription
  misc_feature: MA Experiment 20001905 PARAMETER Experiment Name: At_Drought_Reproduction_P Parameter: Age (day) Value: 40
  misc_feature: MA Experiment 20001905 PARAMETER Experiment Name: At_Drought_Reproduction_P Parameter: Organism Value: A. thaliana
  misc_feature: MA Experiment 20001905 PARAMETER Experiment Name: At_Drought_Reproduction_P Parameter: Plant Line Value: WS
  misc_feature: MA Experiment 20001905 PARAMETER Experiment Name: At_Drought_Reproduction_P Parameter: Timepoint (day) Value: 10
  misc_feature: MA Experiment 20001905 PARAMETER Experiment Name: At_Drought_Reproduction_P Parameter: Tissue Value: Rosettes
  misc_feature: MA Experiment 20001905 PARAMETER Experiment Name: At_Drought_Reproduction_P Parameter: Treatment Value: Drought vs. No Drought

SEQ ID NO: 31198 - protein, 326 aa, Arabidopsis thaliana; identical to SEQ ID NO: 27608
  peptide (1)..(326): Ceres Seq. ID no. 12332477
  misc_feature (10)..(139): Pfam Name: NAD dependent epimerase/dehydratase family Pfam Description: NAD dependent epimerase/dehydratase family
  misc_feature (10)..(139): Pfam Name: NAD dependent epimerase/dehydratase family Pfam Description: NAD dependent epimerase/dehydratase family
  misc_feature (3)..(323): Homolog of NCBI NO: 5852203 NR Description: aldehyde reductase [Vigna radiata]
  misc_feature (3)..(326): Homolog of NCBI NO: 7431406 NR Description: probable cinnamyl-alcohol dehydrogenase (EC
  misc_feature (1)..(326): Homolog of NCBI NO: 34913420 NR Description: putative cinnamyl-alcohol dehydrogenase
  misc_feature (6)..(326): Homolog of NCBI NO: 25405464 NR Description: hypothetical protein F5D21.12 [imported] -
  misc_feature (3)..(326): Homolog of NCBI NO: 30694964 NR Description: cinnamyl-alcohol dehydrogenase (CAD), putative
  misc_feature (3)..(323): Homolog of NCBI NO: 5852203 NR Description: aldehyde reductase [Vigna radiata]
  misc_feature (1)..(326): Homolog of NCBI NO: 34913420 NR Description: putative cinnamyl-alcohol dehydrogenase
  misc_feature (3)..(326): Homolog of NCBI NO: 30694964 NR Description: cinnamyl-alcohol dehydrogenase (CAD), putative
  misc_feature (1)..(326): Homolog of NCBI NO: 21594240 NR Description: cinnamyl-alcohol dehydrogenase-like protein
  misc_feature (1)..(326): Homolog of NCBI NO: 15239741 NR Description: cinnamyl-alcohol dehydrogenase - like protein
  misc_feature (3)..(326): Homolog of NCBI NO: 7488627 NR Description: probable cinnamyl-alcohol dehydrogenase (EC
  misc_feature (2)..(326): Homolog of NCBI NO: 7431409 NR Description: cinnamyl-alcohol dehydrogenase (EC 1.1.1.195) -
  misc_feature (3)..(326): Homolog of NCBI NO: 37029996 NR Description: NADPH-dependent cinnamyl alcohol dehydrogenase
  misc_feature (6)..(326): Homolog of NCBI NO: 25405464 NR Description: hypothetical protein F5D21.12 [imported] -
  misc_feature (3)..(326): Homolog of NCBI NO: 7431406 NR Description: probable cinnamyl-alcohol dehydrogenase (EC
  misc_feature (3)..(326): Homolog of NCBI NO: 37029996 NR Description: NADPH-dependent cinnamyl alcohol dehydrogenase
  misc_feature (2)..(326): Homolog of NCBI NO: 7431409 NR Description: cinnamyl-alcohol dehydrogenase (EC 1.1.1.195) -
  misc_feature (3)..(326): Homolog of NCBI NO: 7488627 NR Description: probable cinnamyl-alcohol dehydrogenase (EC
  misc_feature (1)..(326): Homolog of NCBI NO: 15239741 NR Description: cinnamyl-alcohol dehydrogenase - like protein
  misc_feature (1)..(326): Homolog of NCBI NO: 21594240 NR Description: cinnamyl-alcohol dehydrogenase-like protein

SEQ ID NO: 31199 - protein, 196 aa, Arabidopsis thaliana; identical to SEQ ID NO: 27609
  peptide (1)..(196): Ceres Seq. ID no. 12332478
  misc_feature (1)..(109): Pfam Name: 3-beta hydroxysteroid dehydrogenase/isomerase family Pfam Description: 3-beta hydroxysteroid dehydrogenase/isomerase
  misc_feature (1)..(109): Pfam Name: 3-beta hydroxysteroid dehydrogenase/isomerase family Pfam Description: 3-beta hydroxysteroid dehydrogenase/isomerase
  misc_feature (1)..(193): Homolog of NCBI NO: 5852203 NR Description: aldehyde reductase [Vigna radiata]
  misc_feature (1)..(196): Homolog of NCBI NO: 7431406 NR Description: probable cinnamyl-alcohol dehydrogenase (EC
  misc_feature (1)..(196): Homolog of NCBI NO: 34913420 NR Description: putative cinnamyl-alcohol dehydrogenase
  misc_feature (1)..(196): Homolog of NCBI NO: 25405464 NR Description: hypothetical protein F5D21.12 [imported] -
  misc_feature (1)..(196): Homolog of NCBI NO: 30694964 NR Description: cinnamyl-alcohol dehydrogenase (CAD), putative
  misc_feature (1)..(193): Homolog of NCBI NO: 5852203 NR Description: aldehyde reductase [Vigna radiata]
  misc_feature (1)..(196): Homolog of NCBI NO: 34913420 NR Description: putative cinnamyl-alcohol dehydrogenase
  misc_feature (1)..(196): Homolog of NCBI NO: 30694964 NR Description: cinnamyl-alcohol dehydrogenase (CAD), putative
  misc_feature (1)..(196): Homolog of NCBI NO: 21594240 NR Description: cinnamyl-alcohol dehydrogenase-like protein
  misc_feature (1)..(196): Homolog of NCBI NO: 15239741 NR Description: cinnamyl-alcohol dehydrogenase - like protein
  misc_feature (1)..(196): Homolog of NCBI NO: 7488627 NR Description: probable cinnamyl-alcohol dehydrogenase (EC
  misc_feature (1)..(196): Homolog of NCBI NO: 7431409 NR Description: cinnamyl-alcohol dehydrogenase (EC 1.1.1.195) -
  misc_feature (1)..(196): Homolog of NCBI NO: 37029996 NR Description: NADPH-dependent cinnamyl alcohol dehydrogenase
  misc_feature (1)..(196): Homolog of NCBI NO: 25405464 NR Description: hypothetical protein F5D21.12 [imported] -
  misc_feature (1)..(196): Homolog of NCBI NO: 7431406 NR Description: probable cinnamyl-alcohol dehydrogenase (EC
  misc_feature (1)..(196): Homolog of NCBI NO: 37029996 NR Description: NADPH-dependent cinnamyl alcohol dehydrogenase
  misc_feature (1)..(196): Homolog of NCBI NO: 7431409 NR Description: cinnamyl-alcohol dehydrogenase (EC 1.1.1.195) -
  misc_feature (1)..(196): Homolog of NCBI NO: 7488627 NR Description: probable cinnamyl-alcohol dehydrogenase (EC
  misc_feature (1)..(196): Homolog of NCBI NO: 15239741 NR Description: cinnamyl-alcohol dehydrogenase - like protein
  misc_feature (1)..(196): Homolog of NCBI NO: 21594240 NR Description: cinnamyl-alcohol dehydrogenase-like protein

SEQ ID NO: 31200 - protein, 164 aa, Arabidopsis thaliana; identical to SEQ ID NO: 27610
  peptide (1)..(164): Ceres Seq. ID no. 12332479
  misc_feature (1)..(77): Pfam Name: 3-beta hydroxysteroid dehydrogenase/isomerase family Pfam Description: 3-beta hydroxysteroid dehydrogenase/isomerase
  misc_feature (1)..(77): Pfam Name: 3-beta hydroxysteroid dehydrogenase/isomerase family Pfam Description: 3-beta hydroxysteroid dehydrogenase/isomerase
  misc_feature (1)..(161): Homolog of NCBI NO: 5852203 NR Description: aldehyde reductase [Vigna radiata]
  misc_feature (1)..(164): Homolog of NCBI NO: 7431406 NR Description: probable cinnamyl-alcohol dehydrogenase (EC
  misc_feature (1)..(164): Homolog of NCBI NO: 34913420 NR Description: putative cinnamyl-alcohol dehydrogenase
  misc_feature (1)..(164): Homolog of NCBI NO: 25405464 NR Description: hypothetical protein F5D21.12 [imported] -
  misc_feature (1)..(164): Homolog of NCBI NO: 30694964 NR Description: cinnamyl-alcohol dehydrogenase (CAD), putative
  misc_feature (1)..(161): Homolog of NCBI NO: 5852203 NR Description: aldehyde reductase [Vigna radiata]
  misc_feature (1)..(164): Homolog of NCBI NO: 34913420 NR Description: putative cinnamyl-alcohol dehydrogenase
  misc_feature (1)..(164): Homolog of NCBI NO: 30694964 NR Description: cinnamyl-alcohol dehydrogenase (CAD), putative
  misc_feature (1)..(164): Homolog of NCBI NO: 21594240 NR Description: cinnamyl-alcohol dehydrogenase-like protein
  misc_feature (1)..(164): Homolog of NCBI NO: 15239741 NR Description: cinnamyl-alcohol dehydrogenase - like protein
  misc_feature (1)..(164): Homolog of NCBI NO: 7488627 NR Description: probable cinnamyl-alcohol dehydrogenase (EC
  misc_feature (1)..(164): Homolog of NCBI NO: 7431409 NR Description: cinnamyl-alcohol dehydrogenase (EC 1.1.1.195) -
  misc_feature (1)..(164): Homolog of NCBI NO: 37029996 NR Description: NADPH-dependent cinnamyl alcohol dehydrogenase
  misc_feature (1)..(164): Homolog of NCBI NO: 25405464 NR Description: hypothetical protein F5D21.12 [imported] -
  misc_feature (1)..(164): Homolog of NCBI NO: 7431406 NR Description: probable cinnamyl-alcohol dehydrogenase (EC
  misc_feature (1)..(164): Homolog of NCBI NO: 37029996 NR Description: NADPH-dependent cinnamyl alcohol dehydrogenase
  misc_feature (1)..(164): Homolog of NCBI NO: 7431409 NR Description: cinnamyl-alcohol dehydrogenase (EC 1.1.1.195) -
  misc_feature (1)..(164): Homolog of NCBI NO: 7488627 NR Description: probable cinnamyl-alcohol dehydrogenase (EC
  misc_feature (1)..(164): Homolog of NCBI NO: 15239741 NR Description: cinnamyl-alcohol dehydrogenase - like protein
  misc_feature (1)..(164): Homolog of NCBI NO: 21594240 NR Description: cinnamyl-alcohol dehydrogenase-like protein

SEQ ID NO: 31201 - DNA, 1391 bp, Arabidopsis thaliana; identical to SEQ ID NO: 27611
  misc_feature (1)..(1391): Ceres Seq. ID no. 12335464
  misc_feature: MA Experiment ID: 108435 Result: Down-regulated in Transcription
  misc_feature: MA Experiment 108435 PARAMETER Experiment Name: At_stm_Mutants_cDNA_P Parameter: Plant Line Value: wt Landsburg vs stm
  misc_feature: MA Experiment 108435 PARAMETER Experiment Name: At_stm_Mutants_cDNA_P Parameter: Tissue Value: Shoot Apical Meristem Region
  misc_feature: MA Experiment ID: 108462 Result: Up-regulated in Transcription
  misc_feature: MA Experiment 108462 PARAMETER Experiment Name: At_Germinating_Seeds_cDNA_P Parameter: Age (day) Value: 2 vs. 0
  misc_feature: MA Experiment 108462 PARAMETER Experiment Name: At_Germinating_Seeds_cDNA_P Parameter: Tissue Value: Germinating Seeds
  misc_feature: MA Experiment ID: 108577 Result: Down-regulated in Transcription
  misc_feature: MA Experiment 108577 PARAMETER Experiment Name: At_42deg_Heat_cDNA_P Parameter: Temperature (deg C) Value: 42 vs. 22
  misc_feature: MA Experiment 108577 PARAMETER Experiment Name: At_42deg_Heat_cDNA_P Parameter: Timepoint (hr) Value: 6
  misc_feature: MA Experiment 108577 PARAMETER Experiment Name: At_42deg_Heat_cDNA_P Parameter: Tissue Value: Aerial
  misc_feature: MA Experiment ID: 108595 Result: Down-regulated in Transcription
  misc_feature: MA Experiment 108595 PARAMETER Experiment Name: At_Ler-pi_Ovule_cDNA_P Parameter: Plant Line Value: null
  misc_feature: MA Experiment ID: 108668 Result: Down-regulated in Transcription
  misc_feature: MA Experiment 108668 PARAMETER Experiment Name: At_2mM_SA_cDNA_P Parameter: Plant Line Value: WS
  misc_feature: MA Experiment 108668 PARAMETER Experiment Name: At_2mM_SA_cDNA_P Parameter: Timepoint (hr) Value: 6
  misc_feature: MA Experiment 108668 PARAMETER Experiment Name: At_2mM_SA_cDNA_P Parameter: Treatment Value: 2mM SA vs. No Treatment
  misc_feature: MA Experiment ID: 20000069 Result: Down-regulated in Transcription
  misc_feature: MA Experiment 20000069 PARAMETER Experiment Name: At_100uM_ABA_Mutants_cDNA_P Parameter: Plant Line Value: CS23
  misc_feature: MA Experiment 20000069 PARAMETER Experiment Name: At_100uM_ABA_Mutants_cDNA_P Parameter: Timepoint (hr) Value: 6
  misc_feature: MA Experiment 20000069 PARAMETER Experiment Name: At_100uM_ABA_Mutants_cDNA_P Parameter: Tissue Value: Aerial
  misc_feature: MA Experiment 20000069 PARAMETER Experiment Name: At_100uM_ABA_Mutants_cDNA_P Parameter: Treatment Value: 100uM ABA vs. No Treatment
  misc_feature: MA Experiment ID: 20000184 Result: Up-regulated in Transcription
  misc_feature: MA Experiment 20000184 PARAMETER Experiment Name: At_Shoots__P Parameter: Age (day) Value: 7
  misc_feature: MA Experiment 20000184 PARAMETER Experiment Name: At_Shoots__P Parameter: Tissue Value: Shoots vs. Whole Plant
  misc_feature: MA Experiment ID: 20000224 Result: Down-regulated in Transcription
  misc_feature: MA Experiment ID: 20000437 Result: Down-regulated in Transcription
  misc_feature: MA Experiment 20000437 PARAMETER Experiment Name: At_Drought_P Parameter: Age (day) Value: 8
  misc_feature: MA Experiment 20000437 PARAMETER Experiment Name: At_Drought_P Parameter: Organism Value: A. thaliana
  misc_feature: MA Experiment 20000437 PARAMETER Experiment Name: At_Drought_P Parameter: Plant Line Value: WS
  misc_feature: MA Experiment 20000437 PARAMETER Experiment Name: At_Drought_P Parameter: Timepoint (hr) Value: 24
  misc_feature: MA Experiment 20000437 PARAMETER Experiment Name: At_Drought_P Parameter: Tissue Value: Whole Plant
  misc_feature: MA Experiment 20000437 PARAMETER Experiment Name: At_Drought_P Parameter: Treatment Value: Drought vs. No Drought
  misc_feature: MA Experiment ID: 20001911 Result: Down-regulated in Transcription
  misc_feature: MA Experiment 20001911 PARAMETER Experiment Name: At_Drought_Reproduction_P Parameter: Age (day) Value: 40
  misc_feature: MA Experiment 20001911 PARAMETER Experiment Name: At_Drought_Reproduction_P Parameter: Organism Value: A. thaliana
  misc_feature: MA Experiment 20001911 PARAMETER Experiment Name: At_Drought_Reproduction_P Parameter: Plant Line Value: WS
  misc_feature: MA Experiment 20001911 PARAMETER Experiment Name: At_Drought_Reproduction_P Parameter: Timepoint (day) Value: 10
  misc_feature: MA Experiment 20001911 PARAMETER Experiment Name: At_Drought_Reproduction_P Parameter: Tissue Value: Flowers
  misc_feature: MA Experiment 20001911 PARAMETER Experiment Name: At_Drought_Reproduction_P Parameter: Treatment Value: Drought vs. No Drought

SEQ ID NO: 31202 - protein, 316 aa, Arabidopsis thaliana; identical to SEQ ID NO: 27612
  peptide (1)..(316): Ceres Seq. ID no. 12335465
  misc_feature (9)..(313): Homolog of NCBI NO: 34898284 NR Description: hypothetical protien~similar to Arabidopsis
  misc_feature (25)..(217): Homolog of NCBI NO: 7486583 NR Description: hypothetical protein F7H19.80 - Arabidopsis
  misc_feature (3)..(217): Homolog of NCBI NO: 30685980 NR Description: expressed protein [Arabidopsis thaliana]
  misc_feature (7)..(311): Homolog of NCBI NO: 28393831 NR Description: unknown protein [Arabidopsis thaliana]
  misc_feature (7)..(311): Homolog of NCBI NO: 15234077 NR Description: hypothetical protein; protein id: At4g01140.1
  misc_feature (4)..(314): Homolog of NCBI NO: 25354607 NR Description: F16P17.15 [imported] - Arabidopsis thaliana
  misc_feature (1)..(316): Homolog of NCBI NO: 27542758 NR Description: hypothetical protein-like protein [Sorghum
  misc_feature (1)..(316): Homolog of NCBI NO: 27542756 NR Description: hypothetical protein-like protein [Sorghum
  misc_feature (1)..(316): Homolog of NCBI NO: 21594262 NR Description: unknown [Arabidopsis thaliana]
  misc_feature (1)..(316): Homolog of NCBI NO: 18398173 NR Description: expressed protein

SEQ ID NO: 31203 - protein, 242 aa, Arabidopsis thaliana; identical to SEQ ID NO: 27613
  peptide (1)..(242): Ceres Seq. ID no. 12335466
  misc_feature (1)..(239): Homolog of NCBI NO: 34898284 NR Description: hypothetical protien~similar to Arabidopsis
  misc_feature (1)..(143): Homolog of NCBI NO: 7486583 NR Description: hypothetical protein F7H19.80 - Arabidopsis
  misc_feature (1)..(143): Homolog of NCBI NO: 30685980 NR Description: expressed protein [Arabidopsis thaliana]
  misc_feature (1)..(237): Homolog of NCBI NO: 28393831 NR Description: unknown protein [Arabidopsis thaliana]
  misc_feature (1)..(237): Homolog of NCBI NO: 15234077 NR Description: hypothetical protein; protein id: At4g01140.1
  misc_feature (1)..(240): Homolog of NCBI NO: 25354607 NR Description: F16P17.15 [imported] - Arabidopsis thaliana
  misc_feature (1)..(242): Homolog of NCBI NO: 27542758 NR Description: hypothetical protein-like protein [Sorghum
  misc_feature (1)..(242): Homolog of NCBI NO: 27542756 NR Description: hypothetical protein-like protein [Sorghum
  misc_feature (1)..(242): Homolog of NCBI NO: 21594262 NR Description: unknown [Arabidopsis thaliana]
  misc_feature (1)..(242): Homolog of NCBI NO: 18398173 NR Description: expressed protein

SEQ ID NO: 31204 - DNA, 1310 bp, Arabidopsis thaliana; identical to SEQ ID NO: 27614
  misc_feature (1)..(1310): Ceres Seq. ID no. 12335884
  misc_feature: MA Experiment ID: 108434 Result: Up-regulated in Transcription
  misc_feature: MA Experiment 108434 PARAMETER Experiment Name: At_Root_Tips_cDNA_P Parameter: Tissue Value: Root Tips
  misc_feature: MA Experiment ID: 108461 Result: Up-regulated in Transcription
  misc_feature: MA Experiment 108461 PARAMETER Experiment Name: At_Germinating_Seeds_cDNA_P Parameter: Age (day) Value: 1 vs. 0
  misc_feature: MA Experiment 108461 PARAMETER Experiment Name: At_Germinating_Seeds_cDNA_P Parameter: Tissue Value: Germinating Seeds
  misc_feature: MA Experiment ID: 108577 Result: Down-regulated in Transcription
  misc_feature: MA Experiment 108577 PARAMETER Experiment Name: At_42deg_Heat_cDNA_P Parameter: Temperature (deg C) Value: 42 vs. 22
  misc_feature: MA Experiment 108577 PARAMETER Experiment Name: At_42deg_Heat_cDNA_P Parameter: Timepoint (hr) Value: 6
  misc_feature: MA Experiment 108577 PARAMETER Experiment Name: At_42deg_Heat_cDNA_P Parameter: Tissue Value: Aerial
  misc_feature: MA Experiment ID: 20000111 Result: Down-regulated in Transcription
  misc_feature: MA Experiment 20000111 PARAMETER Experiment Name: At_42deg_Heat_cDNA_P Parameter: Temperature (deg C) Value: 42 vs. 22
  misc_feature: MA Experiment 20000111 PARAMETER Experiment Name: At_42deg_Heat_cDNA_P Parameter: Timepoint (hr) Value: 6
  misc_feature: MA Experiment 20000111 PARAMETER Experiment Name: At_42deg_Heat_cDNA_P Parameter: Tissue Value: Aerial
  misc_feature: MA Experiment ID: 20000113 Result: Down-regulated in Transcription
  misc_feature: MA Experiment 20000113 PARAMETER Experiment Name: At_42deg_Heat_cDNA_P Parameter: Temperature (deg C) Value: 42 vs. 22
  misc_feature: MA Experiment 20000113 PARAMETER Experiment Name: At_42deg_Heat_cDNA_P Parameter: Timepoint (hr) Value: 8
  misc_feature: MA Experiment 20000113 PARAMETER Experiment Name: At_42deg_Heat_cDNA_P Parameter: Tissue Value: Aerial
  misc_feature: MA Experiment ID: 20000184 Result: Up-regulated in Transcription
  misc_feature: MA Experiment 20000184 PARAMETER Experiment Name: At_Shoots__P Parameter: Age (day) Value: 7
  misc_feature: MA Experiment 20000184 PARAMETER Experiment Name: At_Shoots__P Parameter: Tissue Value: Shoots vs. Whole Plant
  misc_feature: MA Experiment ID: 20000224 Result: Down-regulated in Transcription
  misc_feature: MA Experiment ID: 20000234 Result: Up-regulated in Transcription
  misc_feature: MA Experiment 20000234 PARAMETER Experiment Name: At_Siliques_P Parameter: Age (day) Value: 21
  misc_feature: MA Experiment 20000234 PARAMETER Experiment Name: At_Siliques_P Parameter: Organism Value: A. thaliana
  misc_feature: MA Experiment 20000234 PARAMETER Experiment Name: At_Siliques_P Parameter: Plant Line Value: WS
  misc_feature: MA Experiment 20000234 PARAMETER Experiment Name: At_Siliques_P Parameter: Tissue Value: Less Than 5mm Siliques vs. Whole Plant
  misc_feature: MA Experiment ID: 20000573 Result: Down-regulated in Transcription
  misc_feature: MA Experiment 20000573 PARAMETER Experiment Name: At_100uM_ABA_Mutants__P Parameter: Organism Value: A. thaliana
  misc_feature: MA Experiment 20000573 PARAMETER Experiment Name: At_100uM_ABA_Mutants__P Parameter: Plant Line Value: CS22 vs. Ler wt
  misc_feature: MA Experiment 20000573 PARAMETER Experiment Name: At_100uM_ABA_Mutants__P Parameter: Timepoint (hr) Value: N/A
  misc_feature: MA Experiment 20000573 PARAMETER Experiment Name: At_100uM_ABA_Mutants__P Parameter: Tissue Value: Whole Plant
  misc_feature: MA Experiment 20000573 PARAMETER Experiment Name: At_100uM_ABA_Mutants__P Parameter: Treatment Value: None
  misc_feature: MA Experiment ID: 20000794 Result: Down-regulated in Transcription
  misc_feature: MA Experiment 20000794 PARAMETER Experiment Name: At_Petals_P Parameter: Age (day) Value: 23-25 days
  misc_feature: MA Experiment 20000794 PARAMETER Experiment Name: At_Petals_P Parameter: Plant Line Value: WS
  misc_feature: MA Experiment 20000794 PARAMETER Experiment Name: At_Petals_P Parameter: Tissue Value: Petals vs. Whole plant
  misc_feature: MA Experiment ID: 20001558 Result: Up-regulated in Transcription
  misc_feature: MA Experiment 20001558 PARAMETER Experiment Name: At_Drought_Soil_Dry_P Parameter: Age (day) Value: 27
  misc_feature: MA Experiment 20001558 PARAMETER Experiment Name: At_Drought_Soil_Dry_P Parameter: Organism Value: A. thaliana
  misc_feature: MA Experiment 20001558 PARAMETER Experiment Name: At_Drought_Soil_Dry_P Parameter: Plant Line Value: WS
  misc_feature: MA Experiment 20001558 PARAMETER Experiment Name: At_Drought_Soil_Dry_P Parameter: Post Timepoint (hr) Value: 6
  misc_feature: MA Experiment 20001558 PARAMETER Experiment Name: At_Drought_Soil_Dry_P Parameter: Post-Treatment Value: Re-Water vs. No Drought
  misc_feature: MA Experiment 20001558 PARAMETER Experiment Name: At_Drought_Soil_Dry_P Parameter: Timepoint (day) Value: 13
  misc_feature: MA Experiment 20001558 PARAMETER Experiment Name: At_Drought_Soil_Dry_P Parameter: Treatment Value: Drought vs. No Drought
  misc_feature: MA Experiment ID: 20001560 Result: Up-regulated in Transcription
  misc_feature: MA Experiment 20001560 PARAMETER Experiment Name: At_Drought_Soil_Dry_P Parameter: Age (day) Value: 28
  misc_feature: MA Experiment 20001560 PARAMETER Experiment Name: At_Drought_Soil_Dry_P Parameter: Organism Value: A. thaliana
  misc_feature: MA Experiment 20001560 PARAMETER Experiment Name: At_Drought_Soil_Dry_P Parameter: Plant Line Value: WS
  misc_feature: MA Experiment 20001560 PARAMETER Experiment Name: At_Drought_Soil_Dry_P Parameter: Post Timepoint (hr) Value: None
  misc_feature: MA Experiment 20001560 PARAMETER Experiment Name: At_Drought_Soil_Dry_P Parameter: Post-Treatment Value: None
  misc_feature: MA Experiment 20001560 PARAMETER Experiment Name: At_Drought_Soil_Dry_P Parameter: Timepoint (day) Value: 14
  misc_feature: MA Experiment 20001560 PARAMETER Experiment Name: At_Drought_Soil_Dry_P Parameter: Treatment Value: Drought vs. No Drought
  misc_feature: MA Experiment ID: 20001911 Result: Down-regulated in Transcription
  misc_feature: MA Experiment 20001911 PARAMETER Experiment Name: At_Drought_Reproduction_P Parameter: Age (day) Value: 40
  misc_feature: MA Experiment 20001911 PARAMETER Experiment Name: At_Drought_Reproduction_P Parameter: Organism Value: A. thaliana
  misc_feature: MA Experiment 20001911 PARAMETER Experiment Name: At_Drought_Reproduction_P Parameter: Plant Line Value: WS
  misc_feature: MA Experiment 20001911 PARAMETER Experiment Name: At_Drought_Reproduction_P Parameter: Timepoint (day) Value: 10
  misc_feature: MA Experiment 20001911 PARAMETER Experiment Name: At_Drought_Reproduction_P Parameter: Tissue Value: Flowers
  misc_feature: MA Experiment 20001911 PARAMETER Experiment Name: At_Drought_Reproduction_P Parameter: Treatment Value: Drought vs. No Drought

SEQ ID NO: 31205 - protein, 310 aa, Arabidopsis thaliana; identical to SEQ ID NO: 27615
  peptide (1)..(310): Ceres Seq. ID no. 12335885
  misc_feature (158)..(310): Pfam Name: 3-oxo-5-alpha-steroid 4-dehydrogenase Pfam Description: 3-oxo-5-alpha-steroid 4-dehydrogenase
  misc_feature (31)..(310): Homolog of NCBI NO: 39590267 NR Description: Hypothetical protein CBG11196 [Caenorhabditis
  misc_feature (24)..(310): Homolog of NCBI NO: 19923070 NR Description: synaptic glycoprotein SC2 [Mus musculus]
  misc_feature (24)..(310): Homolog of NCBI NO: 19924091 NR Description: synaptic glycoprotein SC2 [Rattus norvegicus]
  misc_feature (2)..(310): Homolog of NCBI NO: 30585427 NR Description: Homo sapiens glycoprotein, synaptic 2 [synthetic
  misc_feature (2)..(310): Homolog of NCBI NO: 24475816 NR Description: glycoprotein, synaptic 2; synaptic glycoprotein
  misc_feature (2)..(310): Homolog of NCBI NO: 13111809 NR Description: Unknown (protein for IMAGE:2901253) [Homo sapiens]
  misc_feature (2)..(310): Homolog of NCBI NO: 33585860 NR Description: Glycoprotein, synaptic 2 [Xenopus laevis]
  misc_feature (1)..(310): Homolog of NCBI NO: 25004880 NR Description: steroid 5-alpha reductase [Cicer arietinum]
  misc_feature (1)..(310): Homolog of NCBI NO: 34895848 NR Description: putative glycoprotein [Oryza sativa (japonica
  misc_feature (1)..(310): Homolog of NCBI NO: 15233250 NR Description: synaptic glycoprotein SC2-like protein

SEQ ID NO: 31206 - protein, 176 aa, Arabidopsis thaliana; identical to SEQ ID NO: 27616
  peptide (1)..(176): Ceres Seq. ID no. 12335886
  misc_feature (24)..(176): Pfam Name: 3-oxo-5-alpha-steroid 4-dehydrogenase Pfam Description: 3-oxo-5-alpha-steroid 4-dehydrogenase
  misc_feature (1)..(176): Homolog of NCBI NO: 39590267 NR Description: Hypothetical protein CBG11196 [Caenorhabditis
  misc_feature (1)..(176): Homolog of NCBI NO: 19923070 NR Description: synaptic glycoprotein SC2 [Mus musculus]
  misc_feature (1)..(176): Homolog of NCBI NO: 19924091 NR Description: synaptic glycoprotein SC2 [Rattus norvegicus]
  misc_feature (1)..(176): Homolog of NCBI NO: 30585427 NR Description: Homo sapiens glycoprotein, synaptic 2 [synthetic
  misc_feature (1)..(176): Homolog of NCBI NO: 24475816 NR Description: glycoprotein, synaptic 2; synaptic glycoprotein
  misc_feature (1)..(176): Homolog of NCBI NO: 13111809 NR Description: Unknown (protein for IMAGE:2901253) [Homo sapiens]
  misc_feature (1)..(176): Homolog of NCBI NO: 33585860 NR Description: Glycoprotein, synaptic 2 [Xenopus laevis]
  misc_feature (1)..(176): Homolog of NCBI NO: 25004880 NR Description: steroid 5-alpha reductase [Cicer arietinum]
  misc_feature (1)..(176): Homolog of NCBI NO: 34895848 NR Description: putative glycoprotein [Oryza sativa (japonica
  misc_feature (1)..(176): Homolog of NCBI NO: 15233250 NR Description: synaptic glycoprotein SC2-like protein

SEQ ID NO: 31207 - DNA, 1070 bp, Arabidopsis thaliana; identical to SEQ ID NO: 27617
  misc_feature (1)..(1070): Ceres Seq. ID no. 4905418
  misc_feature: MA Experiment ID: 108434 Result: Down-regulated in Transcription
  misc_feature: MA Experiment 108434 PARAMETER Experiment Name: At_Root_Tips_cDNA_P Parameter: Tissue Value: Root Tips
  misc_feature: MA Experiment ID: 108462 Result: Down-regulated in Transcription
  misc_feature: MA Experiment 108462 PARAMETER Experiment Name: At_Germinating_Seeds_cDNA_P Parameter: Age (day) Value: 2 vs. 0
  misc_feature: MA Experiment 108462 PARAMETER Experiment Name: At_Germinating_Seeds_cDNA_P Parameter: Tissue Value: Germinating Seeds
  misc_feature: MA Experiment ID: 108463 Result: Down-regulated in Transcription
  misc_feature: MA Experiment 108463 PARAMETER Experiment Name: At_Germinating_Seeds_cDNA_P Parameter: Age (day) Value: 3 vs. 0
  misc_feature: MA Experiment 108463 PARAMETER Experiment Name: At_Germinating_Seeds_cDNA_P Parameter: Tissue Value: Germinating Seeds
  misc_feature: MA Experiment ID: 108464 Result: Down-regulated in Transcription
  misc_feature: MA Experiment 108464 PARAMETER Experiment Name: At_Germinating_Seeds_cDNA_P Parameter: Age (day) Value: 4 vs. 0
  misc_feature: MA Experiment 108464 PARAMETER Experiment Name: At_Germinating_Seeds_cDNA_P Parameter: Tissue Value: Germinating Seeds
  misc_feature: MA Experiment ID: 108473 Result: Down-regulated in Transcription
  misc_feature: MA Experiment 108473 PARAMETER Experiment Name: At_Drought_Flowers_cDNA_P Parameter: Timepoint (hr) Value: 7 d
  misc_feature: MA Experiment 108473 PARAMETER Experiment Name: At_Drought_Flowers_cDNA_P Parameter: Tissue Value: Flower
  misc_feature: MA Experiment 108473 PARAMETER Experiment Name: At_Drought_Flowers_cDNA_P Parameter: Treatment Value: Drought vs. No Drought
  misc_feature: MA Experiment ID: 108488 Result: Up-regulated in Transcription
  misc_feature: MA Experiment ID: 108489 Result: Up-regulated in Transcription
  misc_feature: MA Experiment ID: 108561 Result: Down-regulated in Transcription
  misc_feature: MA Experiment 108561 PARAMETER Experiment Name: At_100uM_ABA_cDNA_P Parameter: Timepoint (hr) Value: 6
  misc_feature: MA Experiment 108561 PARAMETER Experiment Name: At_100uM_ABA_cDNA_P Parameter: Tissue Value: Aerial
  misc_feature: MA Experiment 108561 PARAMETER Experiment Name: At_100uM_ABA_cDNA_P Parameter: Treatment Value: 100uM ABA vs. No Treatment
  misc_feature: MA Experiment ID: 108572 Result: Down-regulated in Transcription
  misc_feature: MA Experiment 108572 PARAMETER Experiment Name: At_Drought_cDNA_P Parameter: Timepoint (hr) Value: 1
  misc_feature: MA Experiment 108572 PARAMETER Experiment Name: At_Drought_cDNA_P Parameter: Tissue Value: Aerial
  misc_feature: MA Experiment 108572 PARAMETER Experiment Name: At_Drought_cDNA_P Parameter: Treatment Value: Drought vs. No Drought
  misc_feature: MA Experiment ID: 108579 Result: Up-regulated in Transcription
  misc_feature: MA Experiment 108579 PARAMETER Experiment Name: At_4deg_Cold_cDNA_P Parameter: Temperature (deg C) Value: 4 vs. 22
  misc_feature: MA Experiment 108579 PARAMETER Experiment Name: At_4deg_Cold_cDNA_P Parameter: Timepoint (hr) Value: 6
  misc_feature: MA Experiment 108579 PARAMETER Experiment Name: At_4deg_Cold_cDNA_P Parameter: Tissue Value: Aerial
  misc_feature: MA Experiment ID: 108607 Result: Down-regulated in Transcription
  misc_feature: MA Experiment 108607 PARAMETER Experiment Name: At_100uM_ABA_cDNA_P Parameter: Timepoint (hr) Value: 4
  misc_feature: MA Experiment 108607 PARAMETER Experiment Name: At_100uM_ABA_cDNA_P Parameter: Tissue Value: Aerial
  misc_feature: MA Experiment 108607 PARAMETER Experiment Name: At_100uM_ABA_cDNA_P Parameter: Treatment Value: 100uM ABA vs. No Treatment
  misc_feature: MA Experiment ID: 108608 Result: Down-regulated in Transcription
  misc_feature: MA Experiment 108608 PARAMETER Experiment Name: At_100uM_ABA_cDNA_P Parameter: Timepoint (hr) Value: 1
  misc_feature: MA Experiment 108608 PARAMETER Experiment Name: At_100uM_ABA_cDNA_P Parameter: Tissue Value: Aerial
  misc_feature: MA Experiment 108608 PARAMETER Experiment Name: At_100uM_ABA_cDNA_P Parameter: Treatment Value: 100uM ABA vs. No Treatment
  misc_feature: MA Experiment ID: 108609 Result: Down-regulated in Transcription
  misc_feature: MA Experiment 108609 PARAMETER Experiment Name: At_100uM_ABA_cDNA_P Parameter: Timepoint (hr) Value: 24
  misc_feature: MA Experiment 108609 PARAMETER Experiment Name: At_100uM_ABA_cDNA_P Parameter: Tissue Value: Aerial
  misc_feature: MA Experiment 108609 PARAMETER Experiment Name: At_100uM_ABA_cDNA_P Parameter: Treatment Value: 100uM ABA vs. No Treatment
  misc_feature: MA Experiment ID: 20000069 Result: Down-regulated in Transcription
  misc_feature: MA Experiment 20000069 PARAMETER Experiment Name: At_100uM_ABA_Mutants_cDNA_P Parameter: Plant Line Value: CS23
  misc_feature: MA Experiment 20000069 PARAMETER Experiment Name: At_100uM_ABA_Mutants_cDNA_P Parameter: Timepoint (hr) Value: 6
  misc_feature: MA Experiment 20000069 PARAMETER Experiment Name: At_100uM_ABA_Mutants_cDNA_P Parameter: Tissue Value: Aerial
  misc_feature: MA Experiment 20000069 PARAMETER Experiment Name: At_100uM_ABA_Mutants_cDNA_P Parameter: Treatment Value: 100uM ABA vs. No Treatment
  misc_feature: MA Experiment ID: 20000070 Result: Down-regulated in Transcription
  misc_feature: MA Experiment 20000070 PARAMETER Experiment Name: At_100uM_ABA_Mutants_cDNA_P Parameter: Plant Line Value: CS24
  misc_feature: MA Experiment 20000070 PARAMETER Experiment Name: At_100uM_ABA_Mutants_cDNA_P Parameter: Timepoint (hr) Value: 6
  misc_feature: MA Experiment 20000070 PARAMETER Experiment Name: At_100uM_ABA_Mutants_cDNA_P Parameter: Tissue Value: Aerial
  misc_feature: MA Experiment 20000070 PARAMETER Experiment Name: At_100uM_ABA_Mutants_cDNA_P Parameter: Treatment Value: 100uM ABA vs. No Treatment
  misc_feature: MA Experiment ID: 20000086 Result: Down-regulated in Transcription
  misc_feature: MA Experiment 20000086 PARAMETER Experiment Name: At_100uM_ABA_Mutants_cDNA_P Parameter: Plant Line Value: CS22
  misc_feature: MA Experiment 20000086 PARAMETER Experiment Name: At_100uM_ABA_Mutants_cDNA_P Parameter: Timepoint (hr) Value: 6
  misc_feature: MA Experiment 20000086 PARAMETER Experiment Name: At_100uM_ABA_Mutants_cDNA_P Parameter: Tissue Value: Aerial
  misc_feature: MA Experiment 20000086 PARAMETER Experiment Name: At_100uM_ABA_Mutants_cDNA_P Parameter: Treatment Value: 100uM ABA vs. No Treatment
  misc_feature: MA Experiment ID: 20000166 Result: Down-regulated in Transcription
  misc_feature: MA Experiment 20000166 PARAMETER Experiment Name: At_100uM_ABA_P Parameter: Age (day) Value: 14
  misc_feature: MA Experiment 20000166 PARAMETER Experiment Name: At_100uM_ABA_P Parameter: Organism Value: A. thaliana
  misc_feature: MA Experiment 20000166 PARAMETER Experiment Name: At_100uM_ABA_P Parameter: Plant Line Value: WS
  misc_feature: MA Experiment 20000166 PARAMETER Experiment Name: At_100uM_ABA_P Parameter: Timepoint (hr) Value: 1
  misc_feature: MA Experiment 20000166 PARAMETER Experiment Name: At_100uM_ABA_P Parameter: Tissue Value: Aerial
  misc_feature: MA Experiment 20000166 PARAMETER Experiment Name: At_100uM_ABA_P Parameter: Treatment Value: 100uM ABA vs. No Treatment
  misc_feature: MA Experiment ID: 20000185 Result: Down-regulated in Transcription
  misc_feature: MA Experiment 20000185 PARAMETER Experiment Name: At_Roots__P Parameter: Age (day) Value: 7 vs. 21
  misc_feature: MA Experiment 20000185 PARAMETER Experiment Name: At_Roots__P Parameter: Organism Value: A. thaliana
  misc_feature: MA Experiment 20000185 PARAMETER Experiment Name: At_Roots__P Parameter: Tissue Value: Roots vs. Whole Plant
  misc_feature: MA Experiment ID: 20000213 Result: Up-regulated in Transcription
  misc_feature: MA Experiment 20000213 PARAMETER Experiment Name: At_4deg_Cold_P Parameter: Timepoint (hr) Value: 2
  misc_feature: MA Experiment ID: 20000227 Result: Down-regulated in Transcription
  misc_feature: MA Experiment 20000227 PARAMETER Experiment Name: At_Root-Tips-vs-Tops_P Parameter: Tissue Value: Root Tips vs. Root Tops
  misc_feature: MA Experiment ID: 20000234 Result: Up-regulated in Transcription
  misc_feature: MA Experiment 20000234 PARAMETER Experiment Name: At_Siliques_P Parameter: Age (day) Value: 21
  misc_feature: MA Experiment 20000234 PARAMETER Experiment Name: At_Siliques_P Parameter: Organism Value: A. thaliana
  misc_feature: MA Experiment 20000234 PARAMETER Experiment Name: At_Siliques_P Parameter: Plant Line Value: WS
  misc_feature: MA Experiment 20000234 PARAMETER Experiment Name: At_Siliques_P Parameter: Tissue Value: Less Than 5mm Siliques vs. Whole Plant
  misc_feature: MA Experiment ID: 20000264 Result: Up-regulated in Transcription
  misc_feature: MA Experiment 20000264 PARAMETER Experiment Name: At_Open_Flower_P Parameter: Age (day) Value: 21
  misc_feature: MA Experiment 20000264 PARAMETER Experiment Name: At_Open_Flower_P Parameter: Plant Line Value: WS
  misc_feature: MA Experiment 20000264 PARAMETER Experiment Name: At_Open_Flower_P Parameter: Tissue Value: Open Flower vs. Whole Plant
  misc_feature: MA Experiment ID: 20000267 Result: Down-regulated in Transcription
  misc_feature: MA Experiment 20000267 PARAMETER Experiment Name: At_Drought_P Parameter: Age (day) Value: 7
  misc_feature: MA Experiment 20000267 PARAMETER Experiment Name: At_Drought_P Parameter: Organism Value: A. thaliana
  misc_feature: MA Experiment 20000267 PARAMETER Experiment Name: At_Drought_P Parameter: Plant Line Value: WS
  misc_feature: MA Experiment 20000267 PARAMETER Experiment Name: At_Drought_P Parameter: Timepoint (hr) Value: 6
  misc_feature: MA Experiment 20000267 PARAMETER Experiment Name: At_Drought_P Parameter: Tissue Value: Whole Plant
  misc_feature: MA Experiment 20000267 PARAMETER Experiment Name: At_Drought_P Parameter: Treatment Value: Drought vs. No Drought
  misc_feature: MA Experiment ID: 20000438 Result: Down-regulated in Transcription
  misc_feature: MA Experiment 20000438 PARAMETER Experiment Name: At_Shoots__P Parameter: Age (day) Value: 14
  misc_feature: MA Experiment 20000438 PARAMETER Experiment Name: At_Shoots__P Parameter: Tissue Value: Shoots vs. Whole Plant
  misc_feature: MA Experiment ID: 20000439 Result: Down-regulated in Transcription
  misc_feature: MA Experiment 20000439 PARAMETER Experiment Name: At_Roots__P Parameter: Age (day) Value: 14 vs. 21
  misc_feature: MA Experiment 20000439 PARAMETER Experiment Name: At_Roots__P Parameter: Organism Value: A. thaliana
  misc_feature: MA Experiment 20000439 PARAMETER Experiment Name: At_Roots__P Parameter: Tissue Value: Roots vs. Whole Plant
  misc_feature: MA Experiment ID: 20000441 Result: Up-regulated in Transcription
  misc_feature: MA Experiment 20000441 PARAMETER Experiment Name: At_1uM_BR-BRZ__P Parameter: Tissue Value: Shoot Apices
  misc_feature: MA Experiment 20000441 PARAMETER Experiment Name: At_1uM_BR-BRZ__P Parameter: Treatment Value: 1uM BR vs. No Treatment
  misc_feature: MA Experiment ID: 20000443 Result: Up-regulated in Transcription
  misc_feature: MA Experiment 20000443 PARAMETER Experiment Name: At_1uM_BR-BRZ__P Parameter: Tissue Value: Shoot Apices
  misc_feature: MA Experiment 20000443 PARAMETER Experiment Name: At_1uM_BR-BRZ__P Parameter: Treatment Value: 1uM BRZ vs. No Treatment
  misc_feature: MA Experiment ID: 20000573 Result: Up-regulated in Transcription
  misc_feature: MA Experiment 20000573 PARAMETER Experiment Name: At_100uM_ABA_Mutants__P Parameter: Organism Value: A. thaliana
  misc_feature: MA Experiment 20000573 PARAMETER Experiment Name: At_100uM_ABA_Mutants__P Parameter: Plant Line Value: CS22 vs. Ler wt
  misc_feature: MA Experiment 20000573 PARAMETER Experiment Name: At_100uM_ABA_Mutants__P Parameter: Timepoint (hr) Value: N/A
  misc_feature: MA Experiment 20000573 PARAMETER Experiment Name: At_100uM_ABA_Mutants__P Parameter: Tissue Value: Whole Plant
  misc_feature: MA Experiment 20000573 PARAMETER Experiment Name: At_100uM_ABA_Mutants__P Parameter: Treatment Value: None
  misc_feature: MA Experiment ID: 20000574 Result: Up-regulated in Transcription
  misc_feature: MA Experiment 20000574 PARAMETER Experiment Name: At_100uM_ABA_Mutants__P Parameter: Organism Value: A. thaliana
  misc_feature: MA Experiment 20000574 PARAMETER Experiment Name: At_100uM_ABA_Mutants__P Parameter: Plant Line Value: CS23 vs. Ler wt
  misc_feature: MA Experiment 20000574 PARAMETER Experiment Name: At_100uM_ABA_Mutants__P Parameter: Timepoint (hr) Value: N/A
  misc_feature: MA Experiment 20000574 PARAMETER Experiment Name: At_100uM_ABA_Mutants__P Parameter: Tissue Value: Whole Plant
  misc_feature: MA Experiment 20000574 PARAMETER Experiment Name: At_100uM_ABA_Mutants__P Parameter: Treatment Value: None
  misc_feature: MA Experiment ID: 20000575 Result: Down-regulated in Transcription
  misc_feature: MA Experiment 20000575 PARAMETER Experiment Name: At_100uM_ABA_Mutants__P Parameter: Organism Value: A. thaliana
  misc_feature: MA Experiment 20000575 PARAMETER Experiment Name: At_100uM_ABA_Mutants__P Parameter: Plant Line Value: CS22
  misc_feature: MA Experiment 20000575 PARAMETER Experiment Name: At_100uM_ABA_Mutants__P Parameter: Timepoint (hr) Value: 6
  misc_feature: MA Experiment 20000575 PARAMETER Experiment Name: At_100uM_ABA_Mutants__P Parameter: Tissue Value: Whole Plant
  misc_feature: MA Experiment 20000575 PARAMETER Experiment Name: At_100uM_ABA_Mutants__P Parameter: Treatment Value: 1uM ABA vs. No Treatment
  misc_feature: MA Experiment ID: 20000606 Result: Up-regulated in Transcription
  misc_feature: MA Experiment 20000606 PARAMETER Experiment Name: At_CS8548_Mutant_P Parameter: Age (day) Value: 14
  misc_feature: MA Experiment 20000606 PARAMETER Experiment Name: At_CS8548_Mutant_P Parameter: Plant Line Value: CS8548 vs. wt
  misc_feature: MA Experiment 20000606 PARAMETER Experiment Name: At_CS8548_Mutant_P Parameter: Tissue Value: Whole Plant
  misc_feature: MA Experiment ID: 20000794 Result: Up-regulated in Transcription
  misc_feature: MA Experiment 20000794 PARAMETER Experiment Name: At_Petals_P Parameter: Age (day) Value: 23-25 days
  misc_feature: MA Experiment 20000794 PARAMETER Experiment Name: At_Petals_P Parameter: Plant Line Value: WS
  misc_feature: MA Experiment 20000794 PARAMETER Experiment Name: At_Petals_P Parameter: Tissue Value: Petals vs. Whole plant
  misc_feature: MA Experiment ID: 20001554 Result: Down-regulated in Transcription
  misc_feature: MA Experiment 20001554 PARAMETER Experiment Name: At_Drought_Soil_Dry_P Parameter: Age (day) Value: 21
  misc_feature: MA Experiment 20001554 PARAMETER Experiment Name: At_Drought_Soil_Dry_P Parameter: Organism Value: A. thaliana
  misc_feature: MA Experiment 20001554 PARAMETER Experiment Name: At_Drought_Soil_Dry_P Parameter: Plant Line Value: WS
  misc_feature: MA Experiment 20001554 PARAMETER Experiment Name: At_Drought_Soil_Dry_P Parameter: Post Timepoint (hr) Value: None
  misc_feature: MA Experiment 20001554 PARAMETER Experiment Name: At_Drought_Soil_Dry_P Parameter: Post-Treatment Value: None
  misc_feature: MA Experiment 20001554 PARAMETER Experiment Name: At_Drought_Soil_Dry_P Parameter: Timepoint (day) Value: 7
  misc_feature: MA Experiment 20001554 PARAMETER Experiment Name: At_Drought_Soil_Dry_P Parameter: Treatment Value: Drought vs. No Drought
  misc_feature: MA Experiment ID: 20001557 Result: Up-regulated in Transcription
  misc_feature: MA Experiment 20001557 PARAMETER Experiment Name: At_Drought_Soil_Dry_P Parameter: Age (day) Value: 27
  misc_feature: MA Experiment 20001557 PARAMETER Experiment Name: At_Drought_Soil_Dry_P Parameter: Organism Value: A. thaliana
  misc_feature: MA Experiment 20001557 PARAMETER Experiment Name: At_Drought_Soil_Dry_P Parameter: Plant Line Value: WS
  misc_feature: MA Experiment 20001557 PARAMETER Experiment Name: At_Drought_Soil_Dry_P Parameter: Post Timepoint (hr) Value: 3
  misc_feature: MA Experiment 20001557 PARAMETER Experiment Name: At_Drought_Soil_Dry_P Parameter: Post-Treatment Value: Re-Water vs. No Drought
  misc_feature: MA Experiment 20001557 PARAMETER Experiment Name: At_Drought_Soil_Dry_P Parameter: Timepoint (day) Value: 13
  misc_feature: MA Experiment 20001557 PARAMETER Experiment Name: At_Drought_Soil_Dry_P Parameter: Treatment Value: Drought vs. No Drought
  misc_feature: MA Experiment ID: 20001558 Result: Up-regulated in Transcription
  misc_feature: MA Experiment 20001558 PARAMETER Experiment Name: At_Drought_Soil_Dry_P Parameter: Age (day) Value: 27
  misc_feature: MA Experiment 20001558 PARAMETER Experiment Name: At_Drought_Soil_Dry_P Parameter: Organism Value: A. thaliana
  misc_feature: MA Experiment 20001558 PARAMETER Experiment Name: At_Drought_Soil_Dry_P Parameter: Plant Line Value: WS
  misc_feature: MA Experiment 20001558 PARAMETER Experiment Name: At_Drought_Soil_Dry_P Parameter: Post Timepoint (hr) Value: 6
  misc_feature: MA Experiment 20001558 PARAMETER Experiment Name: At_Drought_Soil_Dry_P Parameter: Post-Treatment Value: Re-Water vs. No Drought
  misc_feature: MA Experiment 20001558 PARAMETER Experiment Name: At_Drought_Soil_Dry_P Parameter: Timepoint (day) Value: 13
  misc_feature: MA Experiment 20001558 PARAMETER Experiment Name: At_Drought_Soil_Dry_P Parameter: Treatment Value: Drought vs. No Drought
  misc_feature: MA Experiment ID: 20001910 Result: Down-regulated in Transcription
  misc_feature: MA Experiment 20001910 PARAMETER Experiment Name: At_Drought_Reproduction_P Parameter: Age (day) Value: 37
  misc_feature: MA Experiment 20001910 PARAMETER Experiment Name: At_Drought_Reproduction_P Parameter: Organism Value: A. thaliana
  misc_feature: MA Experiment 20001910 PARAMETER Experiment Name: At_Drought_Reproduction_P Parameter: Plant Line Value: WS
  misc_feature: MA Experiment 20001910 PARAMETER Experiment Name: At_Drought_Reproduction_P Parameter: Timepoint (day) Value: 7
  misc_feature: MA Experiment 20001910 PARAMETER Experiment Name: At_Drought_Reproduction_P Parameter: Tissue Value: Flowers
  misc_feature: MA Experiment 20001910 PARAMETER Experiment Name: At_Drought_Reproduction_P Parameter: Treatment Value: Drought vs. No Drought

SEQ ID NO: 31208 - protein, 215 aa, Arabidopsis thaliana; identical to SEQ ID NO: 27618
  peptide (1)..(215): Ceres Seq. ID no. 4905419
  misc_feature (59)..(202): Pfam Name: Pathogenesis-related protein Bet v I family Pfam Description: Pathogenesis-related protein Bet v I family
  misc_feature (40)..(209): Homolog of NCBI NO: 18378830 NR Description: expressed protein
  misc_feature (52)..(209): Homolog of NCBI NO: 9758515 NR Description: gene_id:MZA15.21~pir||T05073~similar to unknown
  misc_feature (61)..(209): Homolog of NCBI NO: 15242531 NR Description: putative protein; protein id: At5g45870.1
  misc_feature (61)..(212): Homolog of NCBI NO: 15242529 NR Description: putative protein; protein id: At5g45860.1
  misc_feature (10)..(209): Homolog of NCBI NO: 22327625 NR Description: putative protein
  misc_feature (44)..(209): Homolog of NCBI NO: 34907924 NR Description: B1088C09.9 [Oryza sativa (japonica
  misc_feature (1)..(206): Homolog of NCBI NO: 15239114 NR Description: putative protein
  misc_feature (52)..(212): Homolog of NCBI NO: 18404709 NR Description: expressed protein
  misc_feature (41)..(215): Homolog of NCBI NO: 25348262 NR Description: hypothetical protein At2g40330 [imported] -
  misc_feature (1)..(215): Homolog of NCBI NO: 18405351 NR Description: expressed protein

SEQ ID NO: 31209 - protein, 175 aa, Arabidopsis thaliana; identical to SEQ ID NO: 27619
  peptide (1)..(175): Ceres Seq. ID no. 4905420
  misc_feature (19)..(162): Pfam Name: Pathogenesis-related protein Bet v I family Pfam Description: Pathogenesis-related protein Bet v I family
  misc_feature (1)..(169): Homolog of NCBI NO: 18378830 NR Description: expressed protein
  misc_feature (12)..(169): Homolog of NCBI NO: 9758515 NR Description: gene_id:MZA15.21~pir||T05073~similar to unknown
  misc_feature (21)..(169): Homolog of NCBI NO: 15242531 NR Description: putative protein; protein id: At5g45870.1
  misc_feature (21)..(172): Homolog of NCBI NO: 15242529 NR Description: putative protein; protein id: At5g45860.1
  misc_feature (1)..(169): Homolog of NCBI NO: 22327625 NR Description: putative protein
  misc_feature (4)..(169): Homolog of NCBI NO: 34907924 NR Description: B1088C09.9 [Oryza sativa (japonica
  misc_feature (1)..(166): Homolog of NCBI NO: 15239114 NR Description: putative protein
  misc_feature (12)..(172): Homolog of NCBI NO: 18404709 NR Description: expressed protein
  misc_feature (1)..(175): Homolog of NCBI NO: 25348262 NR Description: hypothetical protein At2g40330 [imported] -
  misc_feature (1)..(175): Homolog of NCBI NO: 18405351 NR Description: expressed protein

SEQ ID NO: 31210 - DNA, 1167 bp, Arabidopsis thaliana; identical to SEQ ID NO: 27620
  misc_feature (1)..(1167): Ceres Seq. ID no. 13497461
  misc_feature: MA Experiment ID: 108434 Result: Up-regulated in Transcription
  misc_feature: MA Experiment 108434 PARAMETER Experiment Name: At_Root_Tips_cDNA_P Parameter: Tissue Value: Root Tips
  misc_feature: MA Experiment ID: 108462 Result: Down-regulated in Transcription
  misc_feature: MA Experiment 108462 PARAMETER Experiment Name: At_Germinating_Seeds_cDNA_P Parameter: Age (day) Value: 2 vs. 0
  misc_feature: MA Experiment 108462 PARAMETER Experiment Name: At_Germinating_Seeds_cDNA_P Parameter: Tissue Value: Germinating Seeds
  misc_feature: MA Experiment ID: 108463 Result: Down-regulated in Transcription
  misc_feature: MA Experiment 108463 PARAMETER Experiment Name: At_Germinating_Seeds_cDNA_P Parameter: Age (day) Value: 3 vs. 0
  misc_feature: MA Experiment 108463 PARAMETER Experiment Name: At_Germinating_Seeds_cDNA_P Parameter: Tissue Value: Germinating Seeds
  misc_feature: MA Experiment ID: 108464 Result: Down-regulated in Transcription
  misc_feature: MA Experiment 108464 PARAMETER Experiment Name: At_Germinating_Seeds_cDNA_P Parameter: Age (day) Value: 4 vs. 0
  misc_feature: MA Experiment 108464 PARAMETER Experiment Name: At_Germinating_Seeds_cDNA_P Parameter: Tissue Value: Germinating Seeds
  misc_feature: MA Experiment ID: 108488 Result: Up-regulated in Transcription
  misc_feature: MA Experiment ID: 108561 Result: Down-regulated in Transcription
  misc_feature: MA Experiment 108561 PARAMETER Experiment Name: At_100uM_ABA_cDNA_P Parameter: Timepoint (hr) Value: 6
  misc_feature: MA Experiment 108561 PARAMETER Experiment Name: At_100uM_ABA_cDNA_P Parameter: Tissue Value: Aerial
  misc_feature: MA Experiment 108561 PARAMETER Experiment Name: At_100uM_ABA_cDNA_P Parameter: Treatment Value: 100uM ABA vs. No Treatment
  misc_feature: MA Experiment ID: 108595 Result: Down-regulated in Transcription
  misc_feature: MA Experiment 108595 PARAMETER Experiment Name: At_Ler-pi_Ovule_cDNA_P Parameter: Plant Line Value: null
  misc_feature: MA Experiment ID: 108605 Result: Down-regulated in Transcription
  misc_feature: MA Experiment 108605 PARAMETER Experiment Name: At_100uM_ABA_cDNA_P Parameter: Timepoint (hr) Value: 6
  misc_feature: MA Experiment 108605 PARAMETER Experiment Name: At_100uM_ABA_cDNA_P Parameter: Tissue Value: Aerial
  misc_feature: MA Experiment 108605 PARAMETER Experiment Name: At_100uM_ABA_cDNA_P Parameter: Treatment Value: 100uM ABA vs. No Treatment
  misc_feature: MA Experiment ID: 108607 Result: Down-regulated in Transcription
  misc_feature: MA Experiment 108607 PARAMETER Experiment Name: At_100uM_ABA_cDNA_P Parameter: Timepoint (hr) Value: 4
  misc_feature: MA Experiment 108607 PARAMETER Experiment Name: At_100uM_ABA_cDNA_P Parameter: Tissue Value: Aerial
  misc_feature: MA Experiment 108607 PARAMETER Experiment Name: At_100uM_ABA_cDNA_P Parameter: Treatment Value: 100uM ABA vs. No Treatment
  misc_feature: MA Experiment ID: 20000090 Result: Up-regulated in Transcription
  misc_feature: MA Experiment ID: 20000111 Result: Down-regulated in Transcription
  misc_feature: MA Experiment 20000111 PARAMETER Experiment Name: At_42deg_Heat_cDNA_P Parameter: Temperature (deg C) Value: 42 vs. 22
  misc_feature: MA Experiment 20000111 PARAMETER Experiment Name: At_42deg_Heat_cDNA_P Parameter: Timepoint (hr) Value: 6
  misc_feature: MA Experiment 20000111 PARAMETER Experiment Name: At_42deg_Heat_cDNA_P Parameter: Tissue Value: Aerial
  misc_feature: MA Experiment ID: 20000112 Result: Down-regulated in Transcription
  misc_feature: MA Experiment 20000112 PARAMETER Experiment Name: At_42deg_Heat_cDNA_P Parameter: Temperature (deg C) Value: 42 vs. 22
  misc_feature: MA Experiment 20000112 PARAMETER Experiment Name: At_42deg_Heat_cDNA_P Parameter: Timepoint (hr) Value: 2
  misc_feature: MA Experiment 20000112 PARAMETER Experiment Name: At_42deg_Heat_cDNA_P Parameter: Tissue Value: Aerial
  misc_feature: MA Experiment ID: 20000113 Result: Down-regulated in Transcription
  misc_feature: MA Experiment 20000113 PARAMETER Experiment Name: At_42deg_Heat_cDNA_P Parameter: Temperature (deg C) Value: 42 vs. 22
  misc_feature: MA Experiment 20000113 PARAMETER Experiment Name: At_42deg_Heat_cDNA_P Parameter: Timepoint (hr) Value: 8
  misc_feature: MA Experiment 20000113 PARAMETER Experiment Name: At_42deg_Heat_cDNA_P Parameter: Tissue Value: Aerial
  misc_feature: MA Experiment ID: 20000169 Result: Down-regulated in Transcription
  misc_feature: MA Experiment 20000169 PARAMETER Experiment Name: At_100uM_ABA_P Parameter: Age (day) Value: 14
  misc_feature: MA Experiment 20000169 PARAMETER Experiment Name: At_100uM_ABA_P Parameter: Organism Value: A. thaliana
  misc_feature: MA Experiment 20000169 PARAMETER Experiment Name: At_100uM_ABA_P Parameter: Plant Line Value: WS
  misc_feature: MA Experiment 20000169 PARAMETER Experiment Name: At_100uM_ABA_P Parameter: Timepoint (hr) Value: 6
  misc_feature: MA Experiment 20000169 PARAMETER Experiment Name: At_100uM_ABA_P Parameter: Tissue Value: Aerial
  misc_feature: MA Experiment 20000169 PARAMETER Experiment Name: At_100uM_ABA_P Parameter: Treatment Value: 100uM ABA vs. No Treatment
  misc_feature: MA Experiment ID: 20000173 Result: Down-regulated in Transcription
  misc_feature: MA Experiment 20000173 PARAMETER Experiment Name: At_42deg_Heat_P Parameter: Age (day) Value: 14
  misc_feature: MA Experiment 20000173 PARAMETER Experiment Name: At_42deg_Heat_P Parameter: Organism Value: A. thaliana
  misc_feature: MA Experiment 20000173 PARAMETER Experiment Name: At_42deg_Heat_P Parameter: Plant Line Value: WS
  misc_feature: MA Experiment 20000173 PARAMETER Experiment Name: At_42deg_Heat_P Parameter: Temperature (deg C) Value: 42 vs. 22
  misc_feature: MA Experiment 20000173 PARAMETER Experiment Name: At_42deg_Heat_P Parameter: Timepoint (hr) Value: 6
  misc_feature: MA Experiment 20000173 PARAMETER Experiment Name: At_42deg_Heat_P Parameter: Tissue Value: Aerial
  misc_feature: MA Experiment ID: 20000234 Result: Up-regulated in Transcription
  misc_feature: MA Experiment 20000234 PARAMETER Experiment Name: At_Siliques_P Parameter: Age (day) Value: 21
  misc_feature: MA Experiment 20000234 PARAMETER Experiment Name: At_Siliques_P Parameter: Organism Value: A. thaliana
  misc_feature: MA Experiment 20000234 PARAMETER Experiment Name: At_Siliques_P Parameter: Plant Line Value: WS
  misc_feature: MA Experiment 20000234 PARAMETER Experiment Name: At_Siliques_P Parameter: Tissue Value: Less Than 5mm Siliques vs. Whole Plant
  misc_feature: MA Experiment ID: 20000436 Result: Down-regulated in Transcription
  misc_feature: MA Experiment 20000436 PARAMETER Experiment Name: At_Drought_P Parameter: Age (day) Value: 7
  misc_feature: MA Experiment 20000436 PARAMETER Experiment Name: At_Drought_P Parameter: Organism Value: A. thaliana
  misc_feature: MA Experiment 20000436 PARAMETER Experiment Name: At_Drought_P Parameter: Plant Line Value: WS
  misc_feature: MA Experiment 20000436 PARAMETER Experiment Name: At_Drought_P Parameter: Timepoint (hr) Value: 12
  misc_feature: MA Experiment 20000436 PARAMETER Experiment Name: At_Drought_P Parameter: Tissue Value: Whole Plant
  misc_feature: MA Experiment 20000436 PARAMETER Experiment Name: At_Drought_P Parameter: Treatment Value: Drought vs. No Drought
  misc_feature: MA Experiment ID: 20000437 Result: Down-regulated in Transcription
  misc_feature: MA Experiment 20000437 PARAMETER Experiment Name: At_Drought_P Parameter: Age (day) Value: 8
  misc_feature: MA Experiment 20000437 PARAMETER Experiment Name: At_Drought_P Parameter: Organism Value: A. thaliana
  misc_feature: MA Experiment 20000437 PARAMETER Experiment Name: At_Drought_P Parameter: Plant Line Value: WS
  misc_feature: MA Experiment 20000437 PARAMETER Experiment Name: At_Drought_P Parameter: Timepoint (hr) Value: 24
  misc_feature: MA Experiment 20000437 PARAMETER Experiment Name: At_Drought_P Parameter: Tissue Value: Whole Plant
  misc_feature: MA Experiment 20000437 PARAMETER Experiment Name: At_Drought_P Parameter: Treatment Value: Drought vs. No Drought
  misc_feature: MA Experiment ID: 20000573 Result: Up-regulated in Transcription
  misc_feature: MA Experiment 20000573 PARAMETER Experiment Name: At_100uM_ABA_Mutants__P Parameter: Organism Value: A. thaliana
  misc_feature: MA Experiment 20000573 PARAMETER Experiment Name: At_100uM_ABA_Mutants__P Parameter: Plant Line Value: CS22 vs. Ler wt
  misc_feature: MA Experiment 20000573 PARAMETER Experiment Name: At_100uM_ABA_Mutants__P Parameter: Timepoint (hr) Value: N/A
  misc_feature: MA Experiment 20000573 PARAMETER Experiment Name: At_100uM_ABA_Mutants__P Parameter: Tissue Value: Whole Plant
  misc_feature: MA Experiment 20000573 PARAMETER Experiment Name: At_100uM_ABA_Mutants__P Parameter: Treatment Value: None
  misc_feature: MA Experiment ID: 20000574 Result: Up-regulated in Transcription
  misc_feature: MA Experiment 20000574 PARAMETER Experiment Name: At_100uM_ABA_Mutants__P Parameter: Organism Value: A. thaliana
  misc_feature: MA Experiment 20000574 PARAMETER Experiment Name: At_100uM_ABA_Mutants__P Parameter: Plant Line Value: CS23 vs. Ler wt
  misc_feature: MA Experiment 20000574 PARAMETER Experiment Name: At_100uM_ABA_Mutants__P Parameter: Timepoint (hr) Value: N/A
  misc_feature: MA Experiment 20000574 PARAMETER Experiment Name: At_100uM_ABA_Mutants__P Parameter: Tissue Value: Whole Plant
  misc_feature: MA Experiment 20000574 PARAMETER Experiment Name: At_100uM_ABA_Mutants__P Parameter: Treatment Value: None
  misc_feature: MA Experiment ID: 20000794 Result: Down-regulated in Transcription
  misc_feature: MA Experiment 20000794 PARAMETER Experiment Name: At_Petals_P Parameter: Age (day) Value: 23-25 days
  misc_feature: MA Experiment 20000794 PARAMETER Experiment Name: At_Petals_P Parameter: Plant Line Value: WS
  misc_feature: MA Experiment 20000794 PARAMETER Experiment Name: At_Petals_P Parameter: Tissue Value: Petals vs. Whole plant
  misc_feature: MA Experiment ID: 20001450 Result: Down-regulated in Transcription
  misc_feature: MA Experiment 20001450 PARAMETER Experiment Name: At_Far-red-induction_P Parameter: Age (day) Value: 7
  misc_feature: MA Experiment 20001450 PARAMETER Experiment Name: At_Far-red-induction_P Parameter: Light Value: Far-red vs. White
  misc_feature: MA Experiment 20001450 PARAMETER Experiment Name: At_Far-red-induction_P Parameter: Organism Value: A. thaliana
  misc_feature: MA Experiment 20001450 PARAMETER Experiment Name: At_Far-red-induction_P Parameter: Plant Line Value: Columbia
  misc_feature: MA Experiment 20001450 PARAMETER Experiment Name: At_Far-red-induction_P Parameter: Timepoint (hr) Value: 8
  misc_feature: MA Experiment 20001450 PARAMETER Experiment Name: At_Far-red-induction_P Parameter: Tissue Value: Whole Plant
  misc_feature: MA Experiment ID: 20001451 Result: Down-regulated in Transcription
  misc_feature: MA Experiment 20001451 PARAMETER Experiment Name: At_Far-red-induction_P Parameter: Age (day) Value: 7
  misc_feature: MA Experiment 20001451 PARAMETER Experiment Name: At_Far-red-induction_P Parameter: Light Value: Far-red vs. White
  misc_feature: MA Experiment 20001451 PARAMETER Experiment Name: At_Far-red-induction_P Parameter: Organism Value: A. thaliana
  misc_feature: MA Experiment 20001451 PARAMETER Experiment Name: At_Far-red-induction_P Parameter: Plant Line Value: Columbia
  misc_feature: MA Experiment 20001451 PARAMETER Experiment Name: At_Far-red-induction_P Parameter: Timepoint (hr) Value: 24
  misc_feature: MA Experiment 20001451 PARAMETER Experiment Name: At_Far-red-induction_P Parameter: Tissue Value: Whole Plant
  misc_feature: MA Experiment ID: 20001558 Result: Up-regulated in Transcription
  misc_feature: MA Experiment 20001558 PARAMETER Experiment Name: At_Drought_Soil_Dry_P Parameter: Age (day) Value: 27
  misc_feature: MA Experiment 20001558 PARAMETER Experiment Name: At_Drought_Soil_Dry_P Parameter: Organism Value: A. thaliana
  misc_feature: MA Experiment 20001558 PARAMETER Experiment Name: At_Drought_Soil_Dry_P Parameter: Plant Line Value: WS
  misc_feature: MA Experiment 20001558 PARAMETER Experiment Name: At_Drought_Soil_Dry_P Parameter: Post Timepoint (hr) Value: 6
  misc_feature: MA Experiment 20001558 PARAMETER Experiment Name: At_Drought_Soil_Dry_P Parameter: Post-Treatment Value: Re-Water vs. No Drought
  misc_feature: MA Experiment 20001558 PARAMETER Experiment Name: At_Drought_Soil_Dry_P Parameter: Timepoint (day) Value: 13
  misc_feature: MA Experiment 20001558 PARAMETER Experiment Name: At_Drought_Soil_Dry_P Parameter: Treatment Value: Drought vs. No Drought
  misc_feature: MA Experiment ID: 20001560 Result: Up-regulated in Transcription
  misc_feature: MA Experiment 20001560 PARAMETER Experiment Name: At_Drought_Soil_Dry_P Parameter: Age (day) Value: 28
  misc_feature: MA Experiment 20001560 PARAMETER Experiment Name: At_Drought_Soil_Dry_P Parameter: Organism Value: A. thaliana
  misc_feature: MA Experiment 20001560 PARAMETER Experiment Name: At_Drought_Soil_Dry_P Parameter: Plant Line Value: WS
  misc_feature: MA Experiment 20001560 PARAMETER Experiment Name: At_Drought_Soil_Dry_P Parameter: Post Timepoint (hr) Value: None
  misc_feature: MA Experiment 20001560 PARAMETER Experiment Name: At_Drought_Soil_Dry_P Parameter: Post-Treatment Value: None
  misc_feature: MA Experiment 20001560 PARAMETER Experiment Name: At_Drought_Soil_Dry_P Parameter: Timepoint (day) Value: 14
  misc_feature: MA Experiment 20001560 PARAMETER Experiment Name: At_Drought_Soil_Dry_P Parameter: Treatment Value: Drought vs. No Drought
  misc_feature: MA Experiment ID: 20001757 Result: Up-regulated in Transcription
  misc_feature: MA Experiment 20001757 PARAMETER Experiment Name: At_50mM_NH4NO3_L-to-H_P Parameter: Timepoint (hr) Value: 6
  misc_feature: MA Experiment 20001757 PARAMETER Experiment Name: At_50mM_NH4NO3_L-to-H_P Parameter: Tissue Value: Leaf
  misc_feature: MA Experiment 20001757 PARAMETER Experiment Name: At_50mM_NH4NO3_L-to-H_P Parameter: Treatment Value: 50mM NH4NO3 vs 100mM Mannitol
  misc_feature: MA Experiment ID: 20001905 Result: Down-regulated in Transcription
  misc_feature: MA Experiment 20001905 PARAMETER Experiment Name: At_Drought_Reproduction_P Parameter: Age (day) Value: 40
  misc_feature: MA Experiment 20001905 PARAMETER Experiment Name: At_Drought_Reproduction_P Parameter: Organism Value: A. thaliana
  misc_feature: MA Experiment 20001905 PARAMETER Experiment Name: At_Drought_Reproduction_P Parameter: Plant Line Value: WS
  misc_feature: MA Experiment 20001905 PARAMETER Experiment Name: At_Drought_Reproduction_P Parameter: Timepoint (day) Value: 10
  misc_feature: MA Experiment 20001905 PARAMETER Experiment Name: At_Drought_Reproduction_P Parameter: Tissue Value: Rosettes
  misc_feature: MA Experiment 20001905 PARAMETER Experiment Name: At_Drought_Reproduction_P Parameter: Treatment Value: Drought vs. No Drought
  misc_feature: MA Experiment ID: 20001911 Result: Down-regulated in Transcription
  misc_feature: MA Experiment 20001911 PARAMETER Experiment Name: At_Drought_Reproduction_P Parameter: Age (day) Value: 40
  misc_feature: MA Experiment 20001911 PARAMETER Experiment Name: At_Drought_Reproduction_P Parameter: Organism Value: A. thaliana
  misc_feature: MA Experiment 20001911 PARAMETER Experiment Name: At_Drought_Reproduction_P Parameter: Plant Line Value: WS
  misc_feature: MA Experiment 20001911 PARAMETER Experiment Name: At_Drought_Reproduction_P Parameter: Timepoint (day) Value: 10
  misc_feature: MA Experiment 20001911 PARAMETER Experiment Name: At_Drought_Reproduction_P Parameter: Tissue Value: Flowers
  misc_feature: MA Experiment 20001911 PARAMETER Experiment Name: At_Drought_Reproduction_P Parameter: Treatment Value: Drought vs. No Drought

SEQ ID NO: 31211 - protein, 288 aa, Arabidopsis thaliana; identical to SEQ ID NO: 27621
  peptide (1)..(288): Ceres Seq. ID no. 13497462
  misc_feature (220)..(286): Pfam Name: Mpv17 / PMP22 family Pfam Description: Mpv17 / PMP22 family
  misc_feature (118)..(283): Homolog of NCBI NO: 6678926 NR Description: Mpv17 transgene, kidney disease mutant [Mus
  misc_feature (102)..(284): Homolog of NCBI NO: 15226016 NR Description: peroxisomal membrane protein, putative (22 kDa)
  misc_feature (115)..(278): Homolog of NCBI NO: 6679577 NR Description: peroxisomal membrane protein 2
  misc_feature (118)..(283): Homolog of NCBI NO: 34783266 NR Description: MPV17 protein [Homo sapiens]
  misc_feature (118)..(283): Homolog of NCBI NO: 4505241 NR Description: MpV17 transgene, murine homolog,
  misc_feature (115)..(278): Homolog of NCBI NO: 10954089 NR Description: 22 kDa peroxisomal membrane protein PMP22 [Mus
  misc_feature (122)..(283): Homolog of NCBI NO: 32766323 NR Description: Unknown (protein for MGC:63573) [Danio rerio]
  misc_feature (1)..(288): Homolog of NCBI NO: 21594286 NR Description: unknown [Arabidopsis thaliana]
  misc_feature (1)..(288): Homolog of NCBI NO: 15241166 NR Description: expressed protein [Arabidopsis thaliana]
  misc_feature (1)..(288): Homolog of NCBI NO: 16648746 NR Description: AT5g19750/T29J13_170 [Arabidopsis thaliana]

SEQ ID NO: 31212 - DNA, 1588 bp, Arabidopsis thaliana; identical to SEQ ID NO: 27622
  misc_feature (1)..(1588): Ceres Seq. ID no. 12335467
  misc_feature: MA Experiment ID: 20000087 Result: Down-regulated in Transcription
  misc_feature: MA Experiment 20000087 PARAMETER Experiment Name: At_100uM_ABA_Mutants_cDNA_P Parameter: Plant Line Value: WS
  misc_feature: MA Experiment 20000087 PARAMETER Experiment Name: At_100uM_ABA_Mutants_cDNA_P Parameter: Timepoint (hr) Value: 6
  misc_feature: MA Experiment 20000087 PARAMETER Experiment Name: At_100uM_ABA_Mutants_cDNA_P Parameter: Tissue Value: Aerial
  misc_feature: MA Experiment 20000087 PARAMETER Experiment Name: At_100uM_ABA_Mutants_cDNA_P Parameter: Treatment Value: 100uM ABA vs. No Treatment
  misc_feature: MA Experiment ID: 20000089 Result: Down-regulated in Transcription
  misc_feature: MA Experiment ID: 20000227 Result: Down-regulated in Transcription
  misc_feature: MA Experiment 20000227 PARAMETER Experiment Name: At_Root-Tips-vs-Tops_P Parameter: Tissue Value: Root Tips vs. Root Tops
  misc_feature: MA Experiment ID: 20001557 Result: Down-regulated in Transcription
  misc_feature: MA Experiment 20001557 PARAMETER Experiment Name: At_Drought_Soil_Dry_P Parameter: Age (day) Value: 27
  misc_feature: MA Experiment 20001557 PARAMETER Experiment Name: At_Drought_Soil_Dry_P Parameter: Organism Value: A. thaliana
  misc_feature: MA Experiment 20001557 PARAMETER Experiment Name: At_Drought_Soil_Dry_P Parameter: Plant Line Value: WS
  misc_feature: MA Experiment 20001557 PARAMETER Experiment Name: At_Drought_Soil_Dry_P Parameter: Post Timepoint (hr) Value: 3
  misc_feature: MA Experiment 20001557 PARAMETER Experiment Name: At_Drought_Soil_Dry_P Parameter: Post-Treatment Value: Re-Water vs. No Drought
  misc_feature: MA Experiment 20001557 PARAMETER Experiment Name: At_Drought_Soil_Dry_P Parameter: Timepoint (day) Value: 13
  misc_feature: MA Experiment 20001557 PARAMETER Experiment Name: At_Drought_Soil_Dry_P Parameter: Treatment Value: Drought vs. No Drought
  misc_feature: MA Experiment ID: 20001560 Result: Down-regulated in Transcription
  misc_feature: MA Experiment 20001560 PARAMETER Experiment Name: At_Drought_Soil_Dry_P Parameter: Age (day) Value: 28
  misc_feature: MA Experiment 20001560 PARAMETER Experiment Name: At_Drought_Soil_Dry_P Parameter: Organism Value: A. thaliana
  misc_feature: MA Experiment 20001560 PARAMETER Experiment Name: At_Drought_Soil_Dry_P Parameter: Plant Line Value: WS
  misc_feature: MA Experiment 20001560 PARAMETER Experiment Name: At_Drought_Soil_Dry_P Parameter: Post Timepoint (hr) Value: None
  misc_feature: MA Experiment 20001560 PARAMETER Experiment Name: At_Drought_Soil_Dry_P Parameter: Post-Treatment Value: None
  misc_feature: MA Experiment 20001560 PARAMETER Experiment Name: At_Drought_Soil_Dry_P Parameter: Timepoint (day) Value: 14
  misc_feature: MA Experiment 20001560 PARAMETER Experiment Name: At_Drought_Soil_Dry_P Parameter: Treatment Value: Drought vs. No Drought

SEQ ID NO: 31213 - protein, 426 aa, Arabidopsis thaliana; identical to SEQ ID NO: 27623
  peptide (1)..(426): Ceres Seq. ID no. 12335468
  misc_feature (218)..(264): Pfam Name: Zinc finger, C3HC4 type (RING finger) Pfam Description: Zinc finger, C3HC4 type (RING finger)
  misc_feature (194)..(416): Homolog of NCBI NO: 9757769 NR Description: gene_id:MOK16.9~unknown protein [Arabidopsis
  misc_feature (194)..(416): Homolog of NCBI NO: 11290062 NR Description: hypothetical protein F15A17.210 - Arabidopsis
  misc_feature (70)..(416): Homolog of NCBI NO: 18398630 NR Description: expressed protein
  misc_feature (27)..(425): Homolog of NCBI NO: 32489688 NR Description: OSJNBb0004G23.1 [Oryza sativa (japonica
  misc_feature (126)..(418): Homolog of NCBI NO: 30697388 NR Description: zinc finger (C3HC4-type RING finger) protein
  misc_feature (54)..(418): Homolog of NCBI NO: 18424371 NR Description: putative protein
  misc_feature (3)..(426): Homolog of NCBI NO: 26452687 NR Description: unknown protein [Arabidopsis thaliana]
  misc_feature (3)..(426): Homolog of NCBI NO: 30686985 NR Description: zinc finger (C3HC4-type RING finger) protein
  misc_feature (3)..(426): Homolog of NCBI NO: 21594296 NR Description: unknown [Arabidopsis thaliana]
  misc_feature (1)..(426): Homolog of NCBI NO: 18397535 NR Description: expressed protein

SEQ ID NO: 31214 - protein, 424 aa, Arabidopsis thaliana; identical to SEQ ID NO: 27624
  peptide (1)..(424): Ceres Seq. ID no. 12335469
  misc_feature (216)..(262): Pfam Name: Zinc finger, C3HC4 type (RING finger) Pfam Description: Zinc finger, C3HC4 type (RING finger)
  misc_feature (192)..(414): Homolog of NCBI NO: 9757769 NR Description: gene_id:MOK16.9~unknown protein [Arabidopsis
  misc_feature (192)..(414): Homolog of NCBI NO: 11290062 NR Description: hypothetical protein F15A17.210 - Arabidopsis
  misc_feature (68)..(414): Homolog of NCBI NO: 18398630 NR Description: expressed protein
  misc_feature (25)..(423): Homolog of NCBI NO: 32489688 NR Description: OSJNBb0004G23.1 [Oryza sativa (japonica
  misc_feature (124)..(416): Homolog of NCBI NO: 30697388 NR Description: zinc finger (C3HC4-type RING finger) protein
  misc_feature (52)..(416): Homolog of NCBI NO: 18424371 NR Description: putative protein
  misc_feature (1)..(424): Homolog of NCBI NO: 26452687 NR Description: unknown protein [Arabidopsis thaliana]
  misc_feature (1)..(424): Homolog of NCBI NO: 30686985 NR Description: zinc finger (C3HC4-type RING finger) protein
  misc_feature (1)..(424): Homolog of NCBI NO: 21594296 NR Description: unknown [Arabidopsis thaliana]
  misc_feature (1)..(424): Homolog of NCBI NO: 18397535 NR Description: expressed protein

SEQ ID NO: 31215 - protein, 315 aa, Arabidopsis thaliana; identical to SEQ ID NO: 27625
  peptide (1)..(315): Ceres Seq. ID no. 12335470
  misc_feature (107)..(153): Pfam Name: Zinc finger, C3HC4 type (RING finger) Pfam Description: Zinc finger, C3HC4 type (RING finger)
  misc_feature (83)..(305): Homolog of NCBI NO: 9757769 NR Description: gene_id:MOK16.9~unknown protein [Arabidopsis
  misc_feature (83)..(305): Homolog of NCBI NO: 11290062 NR Description: hypothetical protein F15A17.210 - Arabidopsis
  misc_feature (1)..(305): Homolog of NCBI NO: 18398630 NR Description: expressed protein
  misc_feature (1)..(314): Homolog of NCBI NO: 32489688 NR Description: OSJNBb0004G23.1 [Oryza sativa (japonica
  misc_feature (15)..(307): Homolog of NCBI NO: 30697388 NR Description: zinc finger (C3HC4-type RING finger) protein
  misc_feature (1)..(307): Homolog of NCBI NO: 18424371 NR Description: putative protein
  misc_feature (1)..(315): Homolog of NCBI NO: 26452687 NR Description: unknown protein [Arabidopsis thaliana]
  misc_feature (1)..(315): Homolog of NCBI NO: 30686985 NR Description: zinc finger (C3HC4-type RING finger) protein
  misc_feature (1)..(315): Homolog of NCBI NO: 21594296 NR Description: unknown [Arabidopsis thaliana]
  misc_feature (1)..(315): Homolog of NCBI NO: 18397535 NR Description: expressed protein

SEQ ID NO: 31216 - DNA, 1086 bp, Arabidopsis thaliana; identical to SEQ ID NO: 27626
  misc_feature (1)..(1086): Ceres Seq. ID no. 12335862
  misc_feature: MA Experiment ID: 108462 Result: Down-regulated in Transcription
  misc_feature: MA Experiment 108462 PARAMETER Experiment Name: At_Germinating_Seeds_cDNA_P Parameter: Age (day) Value: 2 vs. 0
  misc_feature: MA Experiment 108462 PARAMETER Experiment Name: At_Germinating_Seeds_cDNA_P Parameter: Tissue Value: Germinating Seeds
  misc_feature: MA Experiment ID: 108463 Result: Down-regulated in Transcription
  misc_feature: MA Experiment 108463 PARAMETER Experiment Name: At_Germinating_Seeds_cDNA_P Parameter: Age (day) Value: 3 vs. 0
  misc_feature: MA Experiment 108463 PARAMETER Experiment Name: At_Germinating_Seeds_cDNA_P Parameter: Tissue Value: Germinating Seeds
  misc_feature: MA Experiment ID: 108464 Result: Down-regulated in Transcription
  misc_feature: MA Experiment 108464 PARAMETER Experiment Name: At_Germinating_Seeds_cDNA_P Parameter: Age (day) Value: 4 vs. 0
  misc_feature: MA Experiment 108464 PARAMETER Experiment Name: At_Germinating_Seeds_cDNA_P Parameter: Tissue Value: Germinating Seeds
  misc_feature: MA Experiment ID: 20000113 Result: Up-regulated in Transcription
  misc_feature: MA Experiment 20000113 PARAMETER Experiment Name: At_42deg_Heat_cDNA_P Parameter: Temperature (deg C) Value: 42 vs. 22
  misc_feature: MA Experiment 20000113 PARAMETER Experiment Name: At_42deg_Heat_cDNA_P Parameter: Timepoint (hr) Value: 8
  misc_feature: MA Experiment 20000113 PARAMETER Experiment Name: At_42deg_Heat_cDNA_P Parameter: Tissue Value: Aerial
  misc_feature: MA Experiment ID: 20000144 Result: Up-regulated in Transcription
  misc_feature: MA Experiment 20000144 PARAMETER Experiment Name: At_42deg_Heat_cDNA_P Parameter: Temperature (deg C) Value: 42 vs. 22
  misc_feature: MA Experiment 20000144 PARAMETER Experiment Name: At_42deg_Heat_cDNA_P Parameter: Timepoint (hr) Value: 1
  misc_feature: MA Experiment 20000144 PARAMETER Experiment Name: At_42deg_Heat_cDNA_P Parameter: Tissue Value: Aerial
  misc_feature: MA Experiment ID: 20000171 Result: Up-regulated in Transcription
  misc_feature: MA Experiment 20000171 PARAMETER Experiment Name: At_42deg_Heat_P Parameter: Age (day) Value: 14
  misc_feature: MA Experiment 20000171 PARAMETER Experiment Name: At_42deg_Heat_P Parameter: Organism Value: A. thaliana
  misc_feature: MA Experiment 20000171 PARAMETER Experiment Name: At_42deg_Heat_P Parameter: Plant Line Value: WS
  misc_feature: MA Experiment 20000171 PARAMETER Experiment Name: At_42deg_Heat_P Parameter: Temperature (deg C) Value: 42 vs. 22
  misc_feature: MA Experiment 20000171 PARAMETER Experiment Name: At_42deg_Heat_P Parameter: Timepoint (hr) Value: 1
  misc_feature: MA Experiment 20000171 PARAMETER Experiment Name: At_42deg_Heat_P Parameter: Tissue Value: Aerial
  misc_feature: MA Experiment ID: 20000173 Result: Up-regulated in Transcription
  misc_feature: MA Experiment 20000173 PARAMETER Experiment Name: At_42deg_Heat_P Parameter: Age (day) Value: 14
  misc_feature: MA Experiment 20000173 PARAMETER Experiment Name: At_42deg_Heat_P Parameter: Organism Value: A. thaliana
  misc_feature: MA Experiment 20000173 PARAMETER Experiment Name: At_42deg_Heat_P Parameter: Plant Line Value: WS
  misc_feature: MA Experiment 20000173 PARAMETER Experiment Name: At_42deg_Heat_P Parameter: Temperature (deg C) Value: 42 vs. 22
  misc_feature: MA Experiment 20000173 PARAMETER Experiment Name: At_42deg_Heat_P Parameter: Timepoint (hr) Value: 6
  misc_feature: MA Experiment 20000173 PARAMETER Experiment Name: At_42deg_Heat_P Parameter: Tissue Value: Aerial
  misc_feature: MA Experiment ID: 20000224 Result: Down-regulated in Transcription
  misc_feature: MA Experiment ID: 20000794 Result: Down-regulated in Transcription
  misc_feature: MA Experiment 20000794 PARAMETER Experiment Name: At_Petals_P Parameter: Age (day) Value: 23-25 days
  misc_feature: MA Experiment 20000794 PARAMETER Experiment Name: At_Petals_P Parameter: Plant Line Value: WS
  misc_feature: MA Experiment 20000794 PARAMETER Experiment Name: At_Petals_P Parameter: Tissue Value: Petals vs. Whole plant
  misc_feature: MA Experiment ID: 20001560 Result: Up-regulated in Transcription
  misc_feature: MA Experiment 20001560 PARAMETER Experiment Name: At_Drought_Soil_Dry_P Parameter: Age (day) Value: 28
  misc_feature: MA Experiment 20001560 PARAMETER Experiment Name: At_Drought_Soil_Dry_P Parameter: Organism Value: A. thaliana
  misc_feature: MA Experiment 20001560 PARAMETER Experiment Name: At_Drought_Soil_Dry_P Parameter: Plant Line Value: WS
  misc_feature: MA Experiment 20001560 PARAMETER Experiment Name: At_Drought_Soil_Dry_P Parameter: Post Timepoint (hr) Value: None
  misc_feature: MA Experiment 20001560 PARAMETER Experiment Name: At_Drought_Soil_Dry_P Parameter: Post-Treatment Value: None
  misc_feature: MA Experiment 20001560 PARAMETER Experiment Name: At_Drought_Soil_Dry_P Parameter: Timepoint (day) Value: 14
  misc_feature: MA Experiment 20001560 PARAMETER Experiment Name: At_Drought_Soil_Dry_P Parameter: Treatment Value: Drought vs. No Drought

SEQ ID NO: 31217 - protein, 188 aa, Arabidopsis thaliana; identical to SEQ ID NO: 27627
  peptide (1)..(188): Ceres Seq. ID no. 12335863
  misc_feature (49)..(182): Pfam Name: Tim17/Tim22/Tim23 family Pfam Description: Tim17/Tim22/Tim23 family
  misc_feature (124)..(187): Homolog of NCBI NO: 12039278 NR Description: putative inner mitochondrial membrane protein
  misc_feature (1)..(96): Homolog of NCBI NO: 38344267 NR Description: OSJNBa0005N02.5 [Oryza sativa (japonica
  misc_feature (88)..(187): Homolog of NCBI NO: 34394286 NR Description: hypothetical protein [Oryza sativa (japonica
  misc_feature (1)..(184): Homolog of NCBI NO: 19075496 NR Description: putative mitochondrial import inner membrane
  misc_feature (4)..(188): Homolog of NCBI NO: 15229350 NR Description: putative inner mitochondrial membrane protein
  misc_feature (2)..(187): Homolog of NCBI NO: 37536126 NR Description: putaive mitochondrial inner membrane protein
  misc_feature (1)..(187): Homolog of NCBI NO: 34902184 NR Description: Putative mitochondrial inner membrane protein
  misc_feature (1)..(188): Homolog of NCBI NO: 13641346 NR Description: translocase of inner mitochondrial membrane TIM23
  misc_feature (1)..(188): Homolog of NCBI NO: 18394498 NR Description: inner mitochondrial membrane protein, putative
  misc_feature (1)..(188): Homolog of NCBI NO: 15218593 NR Description: inner mitochondrial membrane protein

SEQ ID NO: 31218 - DNA, 1579 bp, Arabidopsis thaliana; identical to SEQ ID NO: 27628
  misc_feature (1)..(1579): Ceres Seq. ID no. 12335129
  misc_feature: MA Experiment ID: 20000166 Result: Down-regulated in Transcription
  misc_feature: MA Experiment 20000166 PARAMETER Experiment Name: At_100uM_ABA_P Parameter: Age (day) Value: 14
  misc_feature: MA Experiment 20000166 PARAMETER Experiment Name: At_100uM_ABA_P Parameter: Organism Value: A. thaliana
  misc_feature: MA Experiment 20000166 PARAMETER Experiment Name: At_100uM_ABA_P Parameter: Plant Line Value: WS
  misc_feature: MA Experiment 20000166 PARAMETER Experiment Name: At_100uM_ABA_P Parameter: Timepoint (hr) Value: 1
  misc_feature: MA Experiment 20000166 PARAMETER Experiment Name: At_100uM_ABA_P Parameter: Tissue Value: Aerial
  misc_feature: MA Experiment 20000166 PARAMETER Experiment Name: At_100uM_ABA_P Parameter: Treatment Value: 100uM ABA vs. No Treatment
  misc_feature: MA Experiment ID: 20000173 Result: Down-regulated in Transcription
  misc_feature: MA Experiment 20000173 PARAMETER Experiment Name: At_42deg_Heat_P Parameter: Age (day) Value: 14
  misc_feature: MA Experiment 20000173 PARAMETER Experiment Name: At_42deg_Heat_P Parameter: Organism Value: A. thaliana
  misc_feature: MA Experiment 20000173 PARAMETER Experiment Name: At_42deg_Heat_P Parameter: Plant Line Value: WS
  misc_feature: MA Experiment 20000173 PARAMETER Experiment Name: At_42deg_Heat_P Parameter: Temperature (deg C) Value: 42 vs. 22
  misc_feature: MA Experiment 20000173 PARAMETER Experiment Name: At_42deg_Heat_P Parameter: Timepoint (hr) Value: 6
  misc_feature: MA Experiment 20000173 PARAMETER Experiment Name: At_42deg_Heat_P Parameter: Tissue Value: Aerial
  misc_feature: MA Experiment ID: 20000179 Result: Down-regulated in Transcription
  misc_feature: MA Experiment 20000179 PARAMETER Experiment Name: At_Germinating_Seeds_P Parameter: Age (hr) Value: 6 vs. 0
  misc_feature: MA Experiment 20000179 PARAMETER Experiment Name: At_Germinating_Seeds_P Parameter: Tissue Value: Germinating Seeds
  misc_feature: MA Experiment ID: 20000184 Result: Down-regulated in Transcription
  misc_feature: MA Experiment 20000184 PARAMETER Experiment Name: At_Shoots__P Parameter: Age (day) Value: 7
  misc_feature: MA Experiment 20000184 PARAMETER Experiment Name: At_Shoots__P Parameter: Tissue Value: Shoots vs. Whole Plant
  misc_feature: MA Experiment ID: 20000227 Result: Down-regulated in Transcription
  misc_feature: MA Experiment 20000227 PARAMETER Experiment Name: At_Root-Tips-vs-Tops_P Parameter: Tissue Value: Root Tips vs. Root Tops
  misc_feature: MA Experiment ID: 20000234 Result: Down-regulated in Transcription
  misc_feature: MA Experiment 20000234 PARAMETER Experiment Name: At_Siliques_P Parameter: Age (day) Value: 21
  misc_feature: MA Experiment 20000234 PARAMETER Experiment Name: At_Siliques_P Parameter: Organism Value: A. thaliana
  misc_feature: MA Experiment 20000234 PARAMETER Experiment Name: At_Siliques_P Parameter: Plant Line Value: WS
  misc_feature: MA Experiment 20000234 PARAMETER Experiment Name: At_Siliques_P Parameter: Tissue Value: Less Than 5mm Siliques vs. Whole Plant
  misc_feature: MA Experiment ID: 20000235 Result: Down-regulated in Transcription
  misc_feature: MA Experiment 20000235 PARAMETER Experiment Name: At_Siliques_P Parameter: Age (day) Value: 21
  misc_feature: MA Experiment 20000235 PARAMETER Experiment Name: At_Siliques_P Parameter: Organism Value: A. thaliana
  misc_feature: MA Experiment 20000235 PARAMETER Experiment Name: At_Siliques_P Parameter: Plant Line Value: WS
  misc_feature: MA Experiment 20000235 PARAMETER Experiment Name: At_Siliques_P Parameter: Tissue Value: 5-10mm Siliques vs. Whole Plant
  misc_feature: MA Experiment ID: 20000264 Result: Down-regulated in Transcription
  misc_feature: MA Experiment 20000264 PARAMETER Experiment Name: At_Open_Flower_P Parameter: Age (day) Value: 21
  misc_feature: MA Experiment 20000264 PARAMETER Experiment Name: At_Open_Flower_P Parameter: Plant Line Value: WS
  misc_feature: MA Experiment 20000264 PARAMETER Experiment Name: At_Open_Flower_P Parameter: Tissue Value: Open Flower vs. Whole Plant
  misc_feature: MA Experiment ID: 20000265 Result: Down-regulated in Transcription
  misc_feature: MA Experiment 20000265 PARAMETER Experiment Name: At_Open_Flower_P Parameter: Age (day) Value: 21
  misc_feature: MA Experiment 20000265 PARAMETER Experiment Name: At_Open_Flower_P Parameter: Plant Line Value: WS
  misc_feature: MA Experiment 20000265 PARAMETER Experiment Name: At_Open_Flower_P Parameter: Tissue Value: Closed Flower vs. Whole Plant
  misc_feature: MA Experiment ID: 20000286 Result: Down-regulated in Transcription
  misc_feature: MA Experiment 20000286 PARAMETER Experiment Name: At_Open_Flower_P Parameter: Age (day) Value: 21
  misc_feature: MA Experiment 20000286 PARAMETER Experiment Name: At_Open_Flower_P Parameter: Plant Line Value: WS
  misc_feature: MA Experiment 20000286 PARAMETER Experiment Name: At_Open_Flower_P Parameter: Tissue Value: Half Open vs. Whole Plant
  misc_feature: MA Experiment ID: 20000438 Result: Down-regulated in Transcription
  misc_feature: MA Experiment 20000438 PARAMETER Experiment Name: At_Shoots__P Parameter: Age (day) Value: 14
  misc_feature: MA Experiment 20000438 PARAMETER Experiment Name: At_Shoots__P Parameter: Tissue Value: Shoots vs. Whole Plant
  misc_feature: MA Experiment ID: 20001248 Result: Up-regulated in Transcription
  misc_feature: MA Experiment 20001248 PARAMETER Experiment Name: At_Far-red-induction_P Parameter: Age (day) Value: 7
  misc_feature: MA Experiment 20001248 PARAMETER Experiment Name: At_Far-red-induction_P Parameter: Light Value: Far-red vs. White
  misc_feature: MA Experiment 20001248 PARAMETER Experiment Name: At_Far-red-induction_P Parameter: Organism Value: A. thaliana
  misc_feature: MA Experiment 20001248 PARAMETER Experiment Name: At_Far-red-induction_P Parameter: Plant Line Value: Columbia
  misc_feature: MA Experiment 20001248 PARAMETER Experiment Name: At_Far-red-induction_P Parameter: Timepoint (hr) Value: 4
  misc_feature: MA Experiment 20001248 PARAMETER Experiment Name: At_Far-red-induction_P Parameter: Tissue Value: Whole Plant
  misc_feature: MA Experiment ID: 20001905 Result: Down-regulated in Transcription
  misc_feature: MA Experiment 20001905 PARAMETER Experiment Name: At_Drought_Reproduction_P Parameter: Age (day) Value: 40
  misc_feature: MA Experiment 20001905 PARAMETER Experiment Name: At_Drought_Reproduction_P Parameter: Organism Value: A. thaliana
  misc_feature: MA Experiment 20001905 PARAMETER Experiment Name: At_Drought_Reproduction_P Parameter: Plant Line Value: WS
  misc_feature: MA Experiment 20001905 PARAMETER Experiment Name: At_Drought_Reproduction_P Parameter: Timepoint (day) Value: 10
  misc_feature: MA Experiment 20001905 PARAMETER Experiment Name: At_Drought_Reproduction_P Parameter: Tissue Value: Rosettes
  misc_feature: MA Experiment 20001905 PARAMETER Experiment Name: At_Drought_Reproduction_P Parameter: Treatment Value: Drought vs. No Drought

SEQ ID NO: 31219 - protein, 486 aa, Arabidopsis thaliana; identical to SEQ ID NO: 27629
  peptide (1)..(486): Ceres Seq. ID no. 12335130
  misc_feature (5)..(482): Homolog of NCBI NO: 20146091 NR Description: glucosyltransferase NTGT3 [Nicotiana tabacum]
  misc_feature (7)..(483): Homolog of NCBI NO: 21555082 NR Description: putative flavonol 3-O-glucosyltransferase
  misc_feature (7)..(483): Homolog of NCBI NO: 15227606 NR Description: putative flavonol 3-O-glucosyltransferase
  misc_feature (7)..(483): Homolog of NCBI NO: 15227610 NR Description: putative flavonol 3-O-glucosyltransferase
  misc_feature (6)..(478): Homolog of NCBI NO: 15227613 NR Description: putative flavonol 3-O-glucosyltransferase
  misc_feature (6)..(482): Homolog of NCBI NO: 15227616 NR Description: UDP-glycosyltransferase family; protein id:
  misc_feature (23)..(484): Homolog of NCBI NO: 21954072 NR Description: putative UDP-glucose glucosyltransferase
  misc_feature (7)..(483): Homolog of NCBI NO: 15222348 NR Description: UDP-glucose glucosyltransferase, putative
  misc_feature (7)..(484): Homolog of NCBI NO: 30680040 NR Description: glycosyltransferase family [Arabidopsis thaliana]
  misc_feature (7)..(486): Homolog of NCBI NO: 15222344 NR Description: UDP-glucose glucosyltransferase, putative

SEQ ID NO: 31220 - protein, 480 aa, Arabidopsis thaliana; identical to SEQ ID NO: 27630
  peptide (1)..(480): Ceres Seq. ID no. 12335131
  misc_feature (1)..(476): Homolog of NCBI NO: 20146091 NR Description: glucosyltransferase NTGT3 [Nicotiana tabacum]
  misc_feature (1)..(477): Homolog of NCBI NO: 21555082 NR Description: putative flavonol 3-O-glucosyltransferase
  misc_feature (1)..(477): Homolog of NCBI NO: 15227606 NR Description: putative flavonol 3-O-glucosyltransferase
  misc_feature (1)..(477): Homolog of NCBI NO: 15227610 NR Description: putative flavonol 3-O-glucosyltransferase
  misc_feature (1)..(472): Homolog of NCBI NO: 15227613 NR Description: putative flavonol 3-O-glucosyltransferase
  misc_feature (1)..(476): Homolog of NCBI NO: 15227616 NR Description: UDP-glycosyltransferase family; protein id:
  misc_feature (17)..(478): Homolog of NCBI NO: 21954072 NR Description: putative UDP-glucose glucosyltransferase
  misc_feature (1)..(477): Homolog of NCBI NO: 15222348 NR Description: UDP-glucose glucosyltransferase, putative
  misc_feature (1)..(478): Homolog of NCBI NO: 30680040 NR Description: glycosyltransferase family [Arabidopsis thaliana]
  misc_feature (1)..(480): Homolog of NCBI NO: 15222344 NR Description: UDP-glucose glucosyltransferase, putative

SEQ ID NO: 31221 - protein, 445 aa, Arabidopsis thaliana; identical to SEQ ID NO: 27631
  peptide (1)..(445): Ceres Seq. ID no. 12335132
  misc_feature (1)..(441): Homolog of NCBI NO: 20146091 NR Description: glucosyltransferase NTGT3 [Nicotiana tabacum]
  misc_feature (1)..(442): Homolog of NCBI NO: 21555082 NR Description: putative flavonol 3-O-glucosyltransferase
  misc_feature (1)..(442): Homolog of NCBI NO: 15227606 NR Description: putative flavonol 3-O-glucosyltransferase
  misc_feature (1)..(442): Homolog of NCBI NO: 15227610 NR Description: putative flavonol 3-O-glucosyltransferase
  misc_feature (1)..(437): Homolog of NCBI NO: 15227613 NR Description: putative flavonol 3-O-glucosyltransferase
  misc_feature (1)..(441): Homolog of NCBI NO: 15227616 NR Description: UDP-glycosyltransferase family; protein id:
  misc_feature (1)..(443): Homolog of NCBI NO: 21954072 NR Description: putative UDP-glucose glucosyltransferase
  misc_feature (1)..(442): Homolog of NCBI NO: 15222348 NR Description: UDP-glucose glucosyltransferase, putative
  misc_feature (1)..(443): Homolog of NCBI NO: 30680040 NR Description: glycosyltransferase family [Arabidopsis thaliana]
  misc_feature (1)..(445): Homolog of NCBI NO: 15222344 NR Description: UDP-glucose glucosyltransferase, putative

SEQ ID NO: 31222 - DNA, 1310 bp, Arabidopsis thaliana; identical to SEQ ID NO: 27632
  misc_feature (1)..(1310): Ceres Seq. ID no. 12332629
  misc_feature: MA Experiment ID: 20000111 Result: Down-regulated in Transcription
  misc_feature: MA Experiment 20000111 PARAMETER Experiment Name: At_42deg_Heat_cDNA_P Parameter: Temperature (deg C) Value: 42 vs. 22
  misc_feature: MA Experiment 20000111 PARAMETER Experiment Name: At_42deg_Heat_cDNA_P Parameter: Timepoint (hr) Value: 6
  misc_feature: MA Experiment 20000111 PARAMETER Experiment Name: At_42deg_Heat_cDNA_P Parameter: Tissue Value: Aerial
  misc_feature: MA Experiment ID: 20000173 Result: Down-regulated in Transcription
  misc_feature: MA Experiment 20000173 PARAMETER Experiment Name: At_42deg_Heat_P Parameter: Age (day) Value: 14
  misc_feature: MA Experiment 20000173 PARAMETER Experiment Name: At_42deg_Heat_P Parameter: Organism Value: A. thaliana
  misc_feature: MA Experiment 20000173 PARAMETER Experiment Name: At_42deg_Heat_P Parameter: Plant Line Value: WS
  misc_feature: MA Experiment 20000173 PARAMETER Experiment Name: At_42deg_Heat_P Parameter: Temperature (deg C) Value: 42 vs. 22
  misc_feature: MA Experiment 20000173 PARAMETER Experiment Name: At_42deg_Heat_P Parameter: Timepoint (hr) Value: 6
  misc_feature: MA Experiment 20000173 PARAMETER Experiment Name: At_42deg_Heat_P Parameter: Tissue Value: Aerial
  misc_feature: MA Experiment ID: 20000184 Result: Down-regulated in Transcription
  misc_feature: MA Experiment 20000184 PARAMETER Experiment Name: At_Shoots__P Parameter: Age (day) Value: 7
  misc_feature: MA Experiment 20000184 PARAMETER Experiment Name: At_Shoots__P Parameter: Tissue Value: Shoots vs. Whole Plant
  misc_feature: MA Experiment ID: 20000224 Result: Up-regulated in Transcription
  misc_feature: MA Experiment ID: 20000264 Result: Up-regulated in Transcription
  misc_feature: MA Experiment 20000264 PARAMETER Experiment Name: At_Open_Flower_P Parameter: Age (day) Value: 21
  misc_feature: MA Experiment 20000264 PARAMETER Experiment Name: At_Open_Flower_P Parameter: Plant Line Value: WS
  misc_feature: MA Experiment 20000264 PARAMETER Experiment Name: At_Open_Flower_P Parameter: Tissue Value: Open Flower vs. Whole Plant
  misc_feature: MA Experiment ID: 20000794 Result: Up-regulated in Transcription
  misc_feature: MA Experiment 20000794 PARAMETER Experiment Name: At_Petals_P Parameter: Age (day) Value: 23-25 days
  misc_feature: MA Experiment 20000794 PARAMETER Experiment Name: At_Petals_P Parameter: Plant Line Value: WS
  misc_feature: MA Experiment 20000794 PARAMETER Experiment Name: At_Petals_P Parameter: Tissue Value: Petals vs. Whole plant
  misc_feature: MA Experiment ID: 20001557 Result: Down-regulated in Transcription
  misc_feature: MA Experiment 20001557 PARAMETER Experiment Name: At_Drought_Soil_Dry_P Parameter: Age (day) Value: 27
  misc_feature: MA Experiment 20001557 PARAMETER Experiment Name: At_Drought_Soil_Dry_P Parameter: Organism Value: A. thaliana
  misc_feature: MA Experiment 20001557 PARAMETER Experiment Name: At_Drought_Soil_Dry_P Parameter: Plant Line Value: WS
  misc_feature: MA Experiment 20001557 PARAMETER Experiment Name: At_Drought_Soil_Dry_P Parameter: Post Timepoint (hr) Value: 3
  misc_feature: MA Experiment 20001557 PARAMETER Experiment Name: At_Drought_Soil_Dry_P Parameter: Post-Treatment Value: Re-Water vs. No Drought
  misc_feature: MA Experiment 20001557 PARAMETER Experiment Name: At_Drought_Soil_Dry_P Parameter: Timepoint (day) Value: 13
  misc_feature: MA Experiment 20001557 PARAMETER Experiment Name: At_Drought_Soil_Dry_P Parameter: Treatment Value: Drought vs. No Drought

SEQ ID NO: 31223 - protein, 350 aa, Arabidopsis thaliana; identical to SEQ ID NO: 27633
  peptide (1)..(350): Ceres Seq. ID no. 12332630
  misc_feature (105)..(324): Pfam Name: alpha/beta hydrolase fold Pfam Description: alpha/beta hydrolase fold
  misc_feature (230)..(335): Homolog of NCBI NO: 34858774 NR Description: similar to Protein phosphatase methylesterase 1
  misc_feature (45)..(236): Homolog of NCBI NO: 34858774 NR Description: similar to Protein phosphatase methylesterase 1
  misc_feature (230)..(335): Homolog of NCBI NO: 7706645 NR Description: protein phosphatase methylesterase-1 [Homo
  misc_feature (45)..(236): Homolog of NCBI NO: 7706645 NR Description: protein phosphatase methylesterase-1 [Homo
  misc_feature (230)..(335): Homolog of NCBI NO: 30794138 NR Description: protein phosphatase methylesterase 1 [Mus
  misc_feature (45)..(236): Homolog of NCBI NO: 30794138 NR Description: protein phosphatase methylesterase 1 [Mus
  misc_feature (310)..(340): Homolog of NCBI NO: 7487732 NR Description: hypothetical protein T5L19.180 - Arabidopsis
  misc_feature (212)..(261): Homolog of NCBI NO: 7487732 NR Description: hypothetical protein T5L19.180 - Arabidopsis
  misc_feature (1)..(184): Homolog of NCBI NO: 7487732 NR Description: hypothetical protein T5L19.180 - Arabidopsis
  misc_feature (1)..(350): Homolog of NCBI NO: 18413291 NR Description: lipase-like protein

SEQ ID NO: 31224 - protein, 278 aa, Arabidopsis thaliana; identical to SEQ ID NO: 27634
  peptide (1)..(278): Ceres Seq. ID no. 12332631
  misc_feature (33)..(252): Pfam Name: alpha/beta hydrolase fold Pfam Description: alpha/beta hydrolase fold
  misc_feature (158)..(263): Homolog of NCBI NO: 34858774 NR Description: similar to Protein phosphatase methylesterase 1
  misc_feature (1)..(164): Homolog of NCBI NO: 34858774 NR Description: similar to Protein phosphatase methylesterase 1
  misc_feature (158)..(263): Homolog of NCBI NO: 7706645 NR Description: protein phosphatase methylesterase-1 [Homo
  misc_feature (1)..(164): Homolog of NCBI NO: 7706645 NR Description: protein phosphatase methylesterase-1 [Homo
  misc_feature (158)..(263): Homolog of NCBI NO: 30794138 NR Description: protein phosphatase methylesterase 1 [Mus
  misc_feature (1)..(164): Homolog of NCBI NO: 30794138 NR Description: protein phosphatase methylesterase 1 [Mus
  misc_feature (238)..(268): Homolog of NCBI NO: 7487732 NR Description: hypothetical protein T5L19.180 - Arabidopsis
  misc_feature (140)..(189): Homolog of NCBI NO: 7487732 NR Description: hypothetical protein T5L19.180 - Arabidopsis
  misc_feature (1)..(112): Homolog of NCBI NO: 7487732 NR Description: hypothetical protein T5L19.180 - Arabidopsis
  misc_feature (1)..(278): Homolog of NCBI NO: 18413291 NR Description: lipase-like protein

SEQ ID NO: 31225 - protein, 241 aa, Arabidopsis thaliana; identical to SEQ ID NO: 27635
  peptide (1)..(241): Ceres Seq. ID no. 12332632
  misc_feature (1)..(215): Pfam Name: alpha/beta hydrolase fold Pfam Description: alpha/beta hydrolase fold
  misc_feature (121)..(226): Homolog of NCBI NO: 34858774 NR Description: similar to Protein phosphatase methylesterase 1
  misc_feature (1)..(127): Homolog of NCBI NO: 34858774 NR Description: similar to Protein phosphatase methylesterase 1
  misc_feature (121)..(226): Homolog of NCBI NO: 7706645 NR Description: protein phosphatase methylesterase-1 [Homo
  misc_feature (1)..(127): Homolog of NCBI NO: 7706645 NR Description: protein phosphatase methylesterase-1 [Homo
  misc_feature (121)..(226): Homolog of NCBI NO: 30794138 NR Description: protein phosphatase methylesterase 1 [Mus
  misc_feature (1)..(127): Homolog of NCBI NO: 30794138 NR Description: protein phosphatase methylesterase 1 [Mus
  misc_feature (201)..(231): Homolog of NCBI NO: 7487732 NR Description: hypothetical protein T5L19.180 - Arabidopsis
  misc_feature (103)..(152): Homolog of NCBI NO: 7487732 NR Description: hypothetical protein T5L19.180 - Arabidopsis
  misc_feature (1)..(75): Homolog of NCBI NO: 7487732 NR Description: hypothetical protein T5L19.180 - Arabidopsis
  misc_feature (1)..(241): Homolog of NCBI NO: 18413291 NR Description: lipase-like protein

SEQ ID NO: 31226 - DNA, 1210 bp, Arabidopsis thaliana; identical to SEQ ID NO: 27636
  misc_feature (1)..(1210): Ceres Seq. ID no. 12482774
  misc_feature: MA Experiment ID: 108434 Result: Up-regulated in Transcription
  misc_feature: MA Experiment 108434 PARAMETER Experiment Name: At_Root_Tips_cDNA_P Parameter: Tissue Value: Root Tips
  misc_feature: MA Experiment ID: 108461 Result: Up-regulated in Transcription
  misc_feature: MA Experiment 108461 PARAMETER Experiment Name: At_Germinating_Seeds_cDNA_P Parameter: Age (day) Value: 1 vs. 0
  misc_feature: MA Experiment 108461 PARAMETER Experiment Name: At_Germinating_Seeds_cDNA_P Parameter: Tissue Value: Germinating Seeds
  misc_feature: MA Experiment ID: 108462 Result: Up-regulated in Transcription
  misc_feature: MA Experiment 108462 PARAMETER Experiment Name: At_Germinating_Seeds_cDNA_P Parameter: Age (day) Value: 2 vs. 0
  misc_feature: MA Experiment 108462 PARAMETER Experiment Name: At_Germinating_Seeds_cDNA_P Parameter: Tissue Value: Germinating Seeds
  misc_feature: MA Experiment ID: 108579 Result: Down-regulated in Transcription
  misc_feature: MA Experiment 108579 PARAMETER Experiment Name: At_4deg_Cold_cDNA_P Parameter: Temperature (deg C) Value: 4 vs. 22
  misc_feature: MA Experiment 108579 PARAMETER Experiment Name: At_4deg_Cold_cDNA_P Parameter: Timepoint (hr) Value: 6
  misc_feature: MA Experiment 108579 PARAMETER Experiment Name: At_4deg_Cold_cDNA_P Parameter: Tissue Value: Aerial
  misc_feature: MA Experiment ID: 20000224 Result: Down-regulated in Transcription

SEQ ID NO: 31227 - protein, 221 aa, Arabidopsis thaliana; identical to SEQ ID NO: 27637
  peptide (1)..(221): Ceres Seq. ID no. 12482775
  misc_feature (16)..(177): Pfam Name: Ras family Pfam Description: Ras family
  misc_feature (6)..(220): Homolog of NCBI NO: 15224226 NR Description: Ras-related GTP-binding protein (ARA-4)
  misc_feature (5)..(221): Homolog of NCBI NO: 15225121 NR Description: GTP-binding protein, putative
  misc_feature (7)..(219): Homolog of NCBI NO: 29647488 NR Description: putative GTP-binding protein Rab11e
  misc_feature (1)..(221): Homolog of NCBI NO: 34913324 NR Description: putative Rab GTP-binding protein Rab11a
  misc_feature (1)..(221): Homolog of NCBI NO: 5714660 NR Description: Rab GTP-binding protein Rab11b [Gossypium
  misc_feature (1)..(221): Homolog of NCBI NO: 5714658 NR Description: Rab GTP-binding protein Rab11a [Gossypium
  misc_feature (1)..(221): Homolog of NCBI NO: 541980 NR Description: GTP-binding protein, ras-like (clone vfa-yptx) -
  misc_feature (1)..(221): Homolog of NCBI NO: 560504 NR Description: guanine nucleotide regulatory protein [Vicia
  misc_feature (1)..(221): Homolog of NCBI NO: 1370160 NR Description: RAB11J [Lotus japonicus]
  misc_feature (1)..(221): Homolog of NCBI NO: 15238115 NR Description: GTP-binding protein, putative; protein id:

SEQ ID NO: 31228 - protein, 166 aa, Arabidopsis thaliana; identical to SEQ ID NO: 27638
  peptide (1)..(166): Ceres Seq. ID no. 12482776
  misc_feature (1)..(122): Pfam Name: Ras family Pfam Description: Ras family
  misc_feature (1)..(165): Homolog of NCBI NO: 15224226 NR Description: Ras-related GTP-binding protein (ARA-4)
  misc_feature (1)..(166): Homolog of NCBI NO: 15225121 NR Description: GTP-binding protein, putative
  misc_feature (1)..(164): Homolog of NCBI NO: 29647488 NR Description: putative GTP-binding protein Rab11e
  misc_feature (1)..(166): Homolog of NCBI NO: 34913324 NR Description: putative Rab GTP-binding protein Rab11a
  misc_feature (1)..(166): Homolog of NCBI NO: 5714660 NR Description: Rab GTP-binding protein Rab11b [Gossypium
  misc_feature (1)..(166): Homolog of NCBI NO: 5714658 NR Description: Rab GTP-binding protein Rab11a [Gossypium
  misc_feature (1)..(166): Homolog of NCBI NO: 541980 NR Description: GTP-binding protein, ras-like (clone vfa-yptx) -
  misc_feature (1)..(166): Homolog of NCBI NO: 560504 NR Description: guanine nucleotide regulatory protein [Vicia
  misc_feature (1)..(166): Homolog of NCBI NO: 1370160 NR Description: RAB11J [Lotus japonicus]
  misc_feature (1)..(166): Homolog of NCBI NO: 15238115 NR Description: GTP-binding protein, putative; protein id:

SEQ ID NO: 31229 - DNA, 1264 bp, Arabidopsis thaliana; identical to SEQ ID NO: 27639
  misc_feature (1)..(1264): Ceres Seq. ID no. 13487494
  misc_feature: MA Experiment ID: 20000030 Result: Up-regulated in Transcription
  misc_feature: MA Experiment 20000030 PARAMETER Experiment Name: At_CS6630_Roots_cDNA_P Parameter: Plant Line Value: CS6630 vs. WS
  misc_feature: MA Experiment 20000030 PARAMETER Experiment Name: At_CS6630_Roots_cDNA_P Parameter: Tissue Value: Roots
  misc_feature: MA Experiment ID: 20000184 Result: Up-regulated in Transcription
  misc_feature: MA Experiment 20000184 PARAMETER Experiment Name: At_Shoots__P Parameter: Age (day) Value: 7
  misc_feature: MA Experiment 20000184 PARAMETER Experiment Name: At_Shoots__P Parameter: Tissue Value: Shoots vs. Whole Plant
  misc_feature: MA Experiment ID: 20000286 Result: Down-regulated in Transcription
  misc_feature: MA Experiment 20000286 PARAMETER Experiment Name: At_Open_Flower_P Parameter: Age (day) Value: 21
  misc_feature: MA Experiment 20000286 PARAMETER Experiment Name: At_Open_Flower_P Parameter: Plant Line Value: WS
  misc_feature: MA Experiment 20000286 PARAMETER Experiment Name: At_Open_Flower_P Parameter: Tissue Value: Half Open vs. Whole Plant
  misc_feature: MA Experiment ID: 20000437 Result: Down-regulated in Transcription
  misc_feature: MA Experiment 20000437 PARAMETER Experiment Name: At_Drought_P Parameter: Age (day) Value: 8
  misc_feature: MA Experiment 20000437 PARAMETER Experiment Name: At_Drought_P Parameter: Organism Value: A. thaliana
  misc_feature: MA Experiment 20000437 PARAMETER Experiment Name: At_Drought_P Parameter: Plant Line Value: WS
  misc_feature: MA Experiment 20000437 PARAMETER Experiment Name: At_Drought_P Parameter: Timepoint (hr) Value: 24
  misc_feature: MA Experiment 20000437 PARAMETER Experiment Name: At_Drought_P Parameter: Tissue Value: Whole Plant
  misc_feature: MA Experiment 20000437 PARAMETER Experiment Name: At_Drought_P Parameter: Treatment Value: Drought vs. No Drought
  misc_feature: MA Experiment ID: 20000438 Result: Up-regulated in Transcription
  misc_feature: MA Experiment 20000438 PARAMETER Experiment Name: At_Shoots__P Parameter: Age (day) Value: 14
  misc_feature: MA Experiment 20000438 PARAMETER Experiment Name: At_Shoots__P Parameter: Tissue Value: Shoots vs. Whole Plant
  misc_feature: MA Experiment ID: 20000451 Result: Up-regulated in Transcription
  misc_feature: MA Experiment 20000451 PARAMETER Experiment Name: At_CS6879_Shoots-Roots_P Parameter: Age (day) Value: 14
  misc_feature: MA Experiment 20000451 PARAMETER Experiment Name: At_CS6879_Shoots-Roots_P Parameter: Organism Value: A. thaliana
  misc_feature: MA Experiment 20000451 PARAMETER Experiment Name: At_CS6879_Shoots-Roots_P Parameter: Plant Line Value: CS6879 vs. WS
  misc_feature: MA Experiment 20000451 PARAMETER Experiment Name: At_CS6879_Shoots-Roots_P Parameter: Tissue Value: Roots
  misc_feature: MA Experiment ID: 20000452 Result: Up-regulated in Transcription
  misc_feature: MA Experiment 20000452 PARAMETER Experiment Name: At_CS6879_Shoots-Roots_P Parameter: Age (day) Value: 14
  misc_feature: MA Experiment 20000452 PARAMETER Experiment Name: At_CS6879_Shoots-Roots_P Parameter: Organism Value: A. thaliana
  misc_feature: MA Experiment 20000452 PARAMETER Experiment Name: At_CS6879_Shoots-Roots_P Parameter: Plant Line Value: CS6879 vs. WS
  misc_feature: MA Experiment 20000452 PARAMETER Experiment Name: At_CS6879_Shoots-Roots_P Parameter: Tissue Value: Shoots
  misc_feature: MA Experiment ID: 20000573 Result: Down-regulated in Transcription
  misc_feature: MA Experiment 20000573 PARAMETER Experiment Name: At_100uM_ABA_Mutants__P Parameter: Organism Value: A. thaliana
  misc_feature: MA Experiment 20000573 PARAMETER Experiment Name: At_100uM_ABA_Mutants__P Parameter: Plant Line Value: CS22 vs. Ler wt
  misc_feature: MA Experiment 20000573 PARAMETER Experiment Name: At_100uM_ABA_Mutants__P Parameter: Timepoint (hr) Value: N/A
  misc_feature: MA Experiment 20000573 PARAMETER Experiment Name: At_100uM_ABA_Mutants__P Parameter: Tissue Value: Whole Plant
  misc_feature: MA Experiment 20000573 PARAMETER Experiment Name: At_100uM_ABA_Mutants__P Parameter: Treatment Value: None
  misc_feature: MA Experiment ID: 20000574 Result: Down-regulated in Transcription
  misc_feature: MA Experiment 20000574 PARAMETER Experiment Name: At_100uM_ABA_Mutants__P Parameter: Organism Value: A. thaliana
  misc_feature: MA Experiment 20000574 PARAMETER Experiment Name: At_100uM_ABA_Mutants__P Parameter: Plant Line Value: CS23 vs. Ler wt
  misc_feature: MA Experiment 20000574 PARAMETER Experiment Name: At_100uM_ABA_Mutants__P Parameter: Timepoint (hr) Value: N/A
  misc_feature: MA Experiment 20000574 PARAMETER Experiment Name: At_100uM_ABA_Mutants__P Parameter: Tissue Value: Whole Plant
  misc_feature: MA Experiment 20000574 PARAMETER Experiment Name: At_100uM_ABA_Mutants__P Parameter: Treatment Value: None
  misc_feature: MA Experiment ID: 20001450 Result: Up-regulated in Transcription
  misc_feature: MA Experiment 20001450 PARAMETER Experiment Name: At_Far-red-induction_P Parameter: Age (day) Value: 7
  misc_feature: MA Experiment 20001450 PARAMETER Experiment Name: At_Far-red-induction_P Parameter: Light Value: Far-red vs. White
  misc_feature: MA Experiment 20001450 PARAMETER Experiment Name: At_Far-red-induction_P Parameter: Organism Value: A. thaliana
  misc_feature: MA Experiment 20001450 PARAMETER Experiment Name: At_Far-red-induction_P Parameter: Plant Line Value: Columbia
  misc_feature: MA Experiment 20001450 PARAMETER Experiment Name: At_Far-red-induction_P Parameter: Timepoint (hr) Value: 8
  misc_feature: MA Experiment 20001450 PARAMETER Experiment Name: At_Far-red-induction_P Parameter: Tissue Value: Whole Plant
  misc_feature: MA Experiment ID: 20001451 Result: Up-regulated in Transcription
  misc_feature: MA Experiment 20001451 PARAMETER Experiment Name: At_Far-red-induction_P Parameter: Age (day) Value: 7
  misc_feature: MA Experiment 20001451 PARAMETER Experiment Name: At_Far-red-induction_P Parameter: Light Value: Far-red vs. White
  misc_feature: MA Experiment 20001451 PARAMETER Experiment Name: At_Far-red-induction_P Parameter: Organism Value: A. thaliana
  misc_feature: MA Experiment 20001451 PARAMETER Experiment Name: At_Far-red-induction_P Parameter: Plant Line Value: Columbia
  misc_feature: MA Experiment 20001451 PARAMETER Experiment Name: At_Far-red-induction_P Parameter: Timepoint (hr) Value: 24
  misc_feature: MA Experiment 20001451 PARAMETER Experiment Name: At_Far-red-induction_P Parameter: Tissue Value: Whole Plant
  misc_feature: MA Experiment ID: 20001557 Result: Down-regulated in Transcription
  misc_feature: MA Experiment 20001557 PARAMETER Experiment Name: At_Drought_Soil_Dry_P Parameter: Age (day) Value: 27
  misc_feature: MA Experiment 20001557 PARAMETER Experiment Name: At_Drought_Soil_Dry_P Parameter: Organism Value: A. thaliana
  misc_feature: MA Experiment 20001557 PARAMETER Experiment Name: At_Drought_Soil_Dry_P Parameter: Plant Line Value: WS
  misc_feature: MA Experiment 20001557 PARAMETER Experiment Name: At_Drought_Soil_Dry_P Parameter: Post Timepoint (hr) Value: 3
  misc_feature: MA Experiment 20001557 PARAMETER Experiment Name: At_Drought_Soil_Dry_P Parameter: Post-Treatment Value: Re-Water vs. No Drought
  misc_feature: MA Experiment 20001557 PARAMETER Experiment Name: At_Drought_Soil_Dry_P Parameter: Timepoint (day) Value: 13
  misc_feature: MA Experiment 20001557 PARAMETER Experiment Name: At_Drought_Soil_Dry_P Parameter: Treatment Value: Drought vs. No Drought
  misc_feature: MA Experiment ID: 20001558 Result: Down-regulated in Transcription
  misc_feature: MA Experiment 20001558 PARAMETER Experiment Name: At_Drought_Soil_Dry_P Parameter: Age (day) Value: 27
  misc_feature: MA Experiment 20001558 PARAMETER Experiment Name: At_Drought_Soil_Dry_P Parameter: Organism Value: A. thaliana
  misc_feature: MA Experiment 20001558 PARAMETER Experiment Name: At_Drought_Soil_Dry_P Parameter: Plant Line Value: WS
  misc_feature: MA Experiment 20001558 PARAMETER Experiment Name: At_Drought_Soil_Dry_P Parameter: Post Timepoint (hr) Value: 6
  misc_feature: MA Experiment 20001558 PARAMETER Experiment Name: At_Drought_Soil_Dry_P Parameter: Post-Treatment Value: Re-Water vs. No Drought
  misc_feature: MA Experiment 20001558 PARAMETER Experiment Name: At_Drought_Soil_Dry_P Parameter: Timepoint (day) Value: 13
  misc_feature: MA Experiment 20001558 PARAMETER Experiment Name: At_Drought_Soil_Dry_P Parameter: Treatment Value: Drought vs. No Drought
  misc_feature: MA Experiment ID: 20001757 Result: Up-regulated in Transcription
  misc_feature: MA Experiment 20001757 PARAMETER Experiment Name: At_50mM_NH4NO3_L-to-H_P Parameter: Timepoint (hr) Value: 6
  misc_feature: MA Experiment 20001757 PARAMETER Experiment Name: At_50mM_NH4NO3_L-to-H_P Parameter: Tissue Value: Leaf
  misc_feature: MA Experiment 20001757 PARAMETER Experiment Name: At_50mM_NH4NO3_L-to-H_P Parameter: Treatment Value: 50mM NH4NO3 vs 100mM Mannitol

SEQ ID NO: 31230 - protein, 342 aa, Arabidopsis thaliana; identical to SEQ ID NO: 27640
  peptide (1)..(342): Ceres Seq. ID no. 13487495
  misc_feature (27)..(231): Homolog of NCBI NO: 11358653 NR Description: probable mitochondrial carrier protein -
  misc_feature (27)..(336): Homolog of NCBI NO: 18417739 NR Description: mitochondrial carrier protein family [Arabidopsis
  misc_feature (13)..(342): Homolog of NCBI NO: 18496651 NR Description: putative mitochondrial carrier protein [Triticum
  misc_feature (14)..(342): Homolog of NCBI NO: 12061241 NR Description: 36I5.1 [Oryza sativa (japonica cultivar-group)]
  misc_feature (14)..(342): Homolog of NCBI NO: 21326111 NR Description: putative mitochondrial carrier protein [Sorghum
  misc_feature (1)..(280): Homolog of NCBI NO: 37534064 NR Description: putative Tricarboxylate transport protein,
  misc_feature (1)..(342): Homolog of NCBI NO: 18410193 NR Description: mitochondrial carrier protein family [Arabidopsis
  misc_feature (7)..(342): Homolog of NCBI NO: 7486721 NR Description: hypothetical protein F9D12.12 - Arabidopsis
  misc_feature (1)..(342): Homolog of NCBI NO: 21594326 NR Description: mitochondrial carrier-like protein [Arabidopsis
  misc_feature (1)..(342): Homolog of NCBI NO: 15239622 NR Description: mitochondrial carrier protein family [Arabidopsis

SEQ ID NO: 31231 - protein, 336 aa, Arabidopsis thaliana; identical to SEQ ID NO: 27641
  peptide (1)..(336): Ceres Seq. ID no. 13487496
  misc_feature (21)..(225): Homolog of NCBI NO: 11358653 NR Description: probable mitochondrial carrier protein -
  misc_feature (21)..(330): Homolog of NCBI NO: 18417739 NR Description: mitochondrial carrier protein family [Arabidopsis
  misc_feature (7)..(336): Homolog of NCBI NO: 18496651 NR Description: putative mitochondrial carrier protein [Triticum
  misc_feature (8)..(336): Homolog of NCBI NO: 12061241 NR Description: 36I5.1 [Oryza sativa (japonica cultivar-group)]
  misc_feature (8)..(336): Homolog of NCBI NO: 21326111 NR Description: putative mitochondrial carrier protein [Sorghum
  misc_feature (1)..(274): Homolog of NCBI NO: 37534064 NR Description: putative Tricarboxylate transport protein,
  misc_feature (1)..(336): Homolog of NCBI NO: 18410193 NR Description: mitochondrial carrier protein family [Arabidopsis
  misc_feature (1)..(336): Homolog of NCBI NO: 7486721 NR Description: hypothetical protein F9D12.12 - Arabidopsis
  misc_feature (1)..(336): Homolog of NCBI NO: 21594326 NR Description: mitochondrial carrier-like protein [Arabidopsis
  misc_feature (1)..(336): Homolog of NCBI NO: 15239622 NR Description: mitochondrial carrier protein family [Arabidopsis

SEQ ID NO: 31232 - protein, 319 aa, Arabidopsis thaliana; identical to SEQ ID NO: 27642
  peptide (1)..(319): Ceres Seq. ID no. 13487497
  misc_feature (4)..(208): Homolog of NCBI NO: 11358653 NR Description: probable mitochondrial carrier protein -
  misc_feature (4)..(313): Homolog of NCBI NO: 18417739 NR Description: mitochondrial carrier protein family [Arabidopsis
  misc_feature (1)..(319): Homolog of NCBI NO: 18496651 NR Description: putative mitochondrial carrier protein [Triticum
  misc_feature (1)..(319): Homolog of NCBI NO: 12061241 NR Description: 36I5.1 [Oryza sativa (japonica cultivar-group)]
  misc_feature (1)..(319): Homolog of NCBI NO: 21326111 NR Description: putative mitochondrial carrier protein [Sorghum
  misc_feature (1)..(257): Homolog of NCBI NO: 37534064 NR Description: putative Tricarboxylate transport protein,
  misc_feature (1)..(319): Homolog of NCBI NO: 18410193 NR Description: mitochondrial carrier protein family [Arabidopsis
  misc_feature (1)..(319): Homolog of NCBI NO: 7486721 NR Description: hypothetical protein F9D12.12 - Arabidopsis
  misc_feature (1)..(319): Homolog of NCBI NO: 21594326 NR Description: mitochondrial carrier-like protein [Arabidopsis
  misc_feature (1)..(319): Homolog of NCBI NO: 15239622 NR Description: mitochondrial carrier protein family [Arabidopsis

SEQ ID NO: 31233 - DNA, 926 bp, Arabidopsis thaliana; identical to SEQ ID NO: 27643
  misc_feature (1)..(926): Ceres Seq. ID no. 12338033
  misc_feature: MA Experiment ID: 20000180 Result: Up-regulated in Transcription
  misc_feature: MA Experiment 20000180 PARAMETER Experiment Name: At_Germinating_Seeds_P Parameter: Age (hr) Value: 24 vs. 0
  misc_feature: MA Experiment 20000180 PARAMETER Experiment Name: At_Germinating_Seeds_P Parameter: Tissue Value: Germinating Seeds
  misc_feature: MA Experiment ID: 20000185 Result: Down-regulated in Transcription
  misc_feature: MA Experiment 20000185 PARAMETER Experiment Name: At_Roots__P Parameter: Age (day) Value: 7 vs. 21
  misc_feature: MA Experiment 20000185 PARAMETER Experiment Name: At_Roots__P Parameter: Organism Value: A. thaliana
  misc_feature: MA Experiment 20000185 PARAMETER Experiment Name: At_Roots__P Parameter: Tissue Value: Roots vs. Whole Plant

SEQ ID NO: 31234 - protein, 132 aa, Arabidopsis thaliana; identical to SEQ ID NO: 27644
  peptide (1)..(132): Ceres Seq. ID no. 12338034
  misc_feature (1)..(122): Homolog of NCBI NO: 26453108 NR Description: unknown protein [Arabidopsis thaliana]
  misc_feature (1)..(122): Homolog of NCBI NO: 30685853 NR Description: expressed protein [Arabidopsis thaliana]
  misc_feature (1)..(131): Homolog of NCBI NO: 30687503 NR Description: expressed protein [Arabidopsis thaliana]
  misc_feature (1)..(130): Homolog of NCBI NO: 40889732 NR Description: Chain A, Structure Of The Chloroplast Group Ii
  misc_feature (1)..(132): Homolog of NCBI NO: 40889731 NR Description: Chain A, Structure Of The Group Ii Intron
  misc_feature (1)..(132): Homolog of NCBI NO: 40889730 NR Description: Chain A, Crystal Structure Of The Chloroplast
  misc_feature (1)..(132): Homolog of NCBI NO: 6752919 NR Description: CRS2 [Zea mays]
  misc_feature (1)..(132): Homolog of NCBI NO: 26451849 NR Description: putative CRS2 [Arabidopsis thaliana]
  misc_feature (1)..(132): Homolog of NCBI NO: 15240875 NR Description: CRS2 -like protein; protein id: At5g38290.1
  misc_feature (1)..(132): Homolog of NCBI NO: 15237280 NR Description: CRS2-like protein; protein id: At5g16140.1

SEQ ID NO: 31235 - protein, 110 aa, Arabidopsis thaliana; identical to SEQ ID NO: 27645
  peptide (1)..(110): Ceres Seq. ID no. 12338035
  misc_feature (45)..(91): Homolog of NCBI NO: 26453108 NR Description: unknown protein [Arabidopsis thaliana]
  misc_feature (45)..(91): Homolog of NCBI NO: 30685853 NR Description: expressed protein [Arabidopsis thaliana]
  misc_feature (43)..(91): Homolog of NCBI NO: 30687503 NR Description: expressed protein [Arabidopsis thaliana]
  misc_feature (41)..(91): Homolog of NCBI NO: 40889732 NR Description: Chain A, Structure Of The Chloroplast Group Ii
  misc_feature (41)..(92): Homolog of NCBI NO: 40889731 NR Description: Chain A, Structure Of The Group Ii Intron
  misc_feature (41)..(92): Homolog of NCBI NO: 40889730 NR Description: Chain A, Crystal Structure Of The Chloroplast
  misc_feature (41)..(92): Homolog of NCBI NO: 6752919 NR Description: CRS2 [Zea mays]
  misc_feature (1)..(95): Homolog of NCBI NO: 26451849 NR Description: putative CRS2 [Arabidopsis thaliana]
  misc_feature (1)..(95): Homolog of NCBI NO: 15240875 NR Description: CRS2 -like protein; protein id: At5g38290.1
  misc_feature (1)..(92): Homolog of NCBI NO: 15237280 NR Description: CRS2-like protein; protein id: At5g16140.1

SEQ ID NO: 31236 - protein, 109 aa, Arabidopsis thaliana; identical to SEQ ID NO: 27646
  peptide (1)..(109): Ceres Seq. ID no. 12338036
  misc_feature (1)..(99): Homolog of NCBI NO: 26453108 NR Description: unknown protein [Arabidopsis thaliana]
  misc_feature (1)..(99): Homolog of NCBI NO: 30685853 NR Description: expressed protein [Arabidopsis thaliana]
  misc_feature (1)..(108): Homolog of NCBI NO: 30687503 NR Description: expressed protein [Arabidopsis thaliana]
  misc_feature (1)..(107): Homolog of NCBI NO: 40889732 NR Description: Chain A, Structure Of The Chloroplast Group Ii
  misc_feature (1)..(109): Homolog of NCBI NO: 40889731 NR Description: Chain A, Structure Of The Group Ii Intron
  misc_feature (1)..(109): Homolog of NCBI NO: 40889730 NR Description: Chain A, Crystal Structure Of The Chloroplast
  misc_feature (1)..(109): Homolog of NCBI NO: 6752919 NR Description: CRS2 [Zea mays]
  misc_feature (1)..(109): Homolog of NCBI NO: 26451849 NR Description: putative CRS2 [Arabidopsis thaliana]
  misc_feature (1)..(109): Homolog of NCBI NO: 15240875 NR Description: CRS2 -like protein; protein id: At5g38290.1
  misc_feature (1)..(109): Homolog of NCBI NO: 15237280 NR Description: CRS2-like protein; protein id: At5g16140.1

SEQ ID NO: 31237 - DNA, 1318 bp, Arabidopsis thaliana; identical to SEQ ID NO: 27647
  misc_feature (1)..(1318): Ceres Seq. ID no. 13490280
  misc_feature: MA Experiment ID: 20000173 Result: Down-regulated in Transcription
  misc_feature: MA Experiment 20000173 PARAMETER Experiment Name: At_42deg_Heat_P Parameter: Age (day) Value: 14
  misc_feature: MA Experiment 20000173 PARAMETER Experiment Name: At_42deg_Heat_P Parameter: Organism Value: A. thaliana
  misc_feature: MA Experiment 20000173 PARAMETER Experiment Name: At_42deg_Heat_P Parameter: Plant Line Value: WS
  misc_feature: MA Experiment 20000173 PARAMETER Experiment Name: At_42deg_Heat_P Parameter: Temperature (deg C) Value: 42 vs. 22
  misc_feature: MA Experiment 20000173 PARAMETER Experiment Name: At_42deg_Heat_P Parameter: Timepoint (hr) Value: 6
  misc_feature: MA Experiment 20000173 PARAMETER Experiment Name: At_42deg_Heat_P Parameter: Tissue Value: Aerial
  misc_feature: MA Experiment ID: 20000179 Result: Up-regulated in Transcription
  misc_feature: MA Experiment 20000179 PARAMETER Experiment Name: At_Germinating_Seeds_P Parameter: Age (hr) Value: 6 vs. 0
  misc_feature: MA Experiment 20000179 PARAMETER Experiment Name: At_Germinating_Seeds_P Parameter: Tissue Value: Germinating Seeds
  misc_feature: MA Experiment ID: 20000180 Result: Up-regulated in Transcription
  misc_feature: MA Experiment 20000180 PARAMETER Experiment Name: At_Germinating_Seeds_P Parameter: Age (hr) Value: 24 vs. 0
  misc_feature: MA Experiment 20000180 PARAMETER Experiment Name: At_Germinating_Seeds_P Parameter: Tissue Value: Germinating Seeds
  misc_feature: MA Experiment ID: 20000184 Result: Down-regulated in Transcription
  misc_feature: MA Experiment 20000184 PARAMETER Experiment Name: At_Shoots__P Parameter: Age (day) Value: 7
  misc_feature: MA Experiment 20000184 PARAMETER Experiment Name: At_Shoots__P Parameter: Tissue Value: Shoots vs. Whole Plant
  misc_feature: MA Experiment ID: 20000495 Result: Up-regulated in Transcription
  misc_feature: MA Experiment 20000495 PARAMETER Experiment Name: At_Guard_Cells_P Parameter: Harvest Date Value: 8/2/2002
  misc_feature: MA Experiment 20000495 PARAMETER Experiment Name: At_Guard_Cells_P Parameter: Organism Value: A. thaliana
  misc_feature: MA Experiment 20000495 PARAMETER Experiment Name: At_Guard_Cells_P Parameter: Tissue Value: Guard Cells vs. Leaves
  misc_feature: MA Experiment ID: 20001248 Result: Up-regulated in Transcription
  misc_feature: MA Experiment 20001248 PARAMETER Experiment Name: At_Far-red-induction_P Parameter: Age (day) Value: 7
  misc_feature: MA Experiment 20001248 PARAMETER Experiment Name: At_Far-red-induction_P Parameter: Light Value: Far-red vs. White
  misc_feature: MA Experiment 20001248 PARAMETER Experiment Name: At_Far-red-induction_P Parameter: Organism Value: A. thaliana
  misc_feature: MA Experiment 20001248 PARAMETER Experiment Name: At_Far-red-induction_P Parameter: Plant Line Value: Columbia
  misc_feature: MA Experiment 20001248 PARAMETER Experiment Name: At_Far-red-induction_P Parameter: Timepoint (hr) Value: 4
  misc_feature: MA Experiment 20001248 PARAMETER Experiment Name: At_Far-red-induction_P Parameter: Tissue Value: Whole Plant
  misc_feature: MA Experiment ID: 20001450 Result: Up-regulated in Transcription
  misc_feature: MA Experiment 20001450 PARAMETER Experiment Name: At_Far-red-induction_P Parameter: Age (day) Value: 7
  misc_feature: MA Experiment 20001450 PARAMETER Experiment Name: At_Far-red-induction_P Parameter: Light Value: Far-red vs. White
  misc_feature: MA Experiment 20001450 PARAMETER Experiment Name: At_Far-red-induction_P Parameter: Organism Value: A. thaliana
  misc_feature: MA Experiment 20001450 PARAMETER Experiment Name: At_Far-red-induction_P Parameter: Plant Line Value: Columbia
  misc_feature: MA Experiment 20001450 PARAMETER Experiment Name: At_Far-red-induction_P Parameter: Timepoint (hr) Value: 8
  misc_feature: MA Experiment 20001450 PARAMETER Experiment Name: At_Far-red-induction_P Parameter: Tissue Value: Whole Plant
  misc_feature: MA Experiment ID: 20001557 Result: Down-regulated in Transcription
  misc_feature: MA Experiment 20001557 PARAMETER Experiment Name: At_Drought_Soil_Dry_P Parameter: Age (day) Value: 27
  misc_feature: MA Experiment 20001557 PARAMETER Experiment Name: At_Drought_Soil_Dry_P Parameter: Organism Value: A. thaliana
  misc_feature: MA Experiment 20001557 PARAMETER Experiment Name: At_Drought_Soil_Dry_P Parameter: Plant Line Value: WS
  misc_feature: MA Experiment 20001557 PARAMETER Experiment Name: At_Drought_Soil_Dry_P Parameter: Post Timepoint (hr) Value: 3
  misc_feature: MA Experiment 20001557 PARAMETER Experiment Name: At_Drought_Soil_Dry_P Parameter: Post-Treatment Value: Re-Water vs. No Drought
  misc_feature: MA Experiment 20001557 PARAMETER Experiment Name: At_Drought_Soil_Dry_P Parameter: Timepoint (day) Value: 13
  misc_feature: MA Experiment 20001557 PARAMETER Experiment Name: At_Drought_Soil_Dry_P Parameter: Treatment Value: Drought vs. No Drought

SEQ ID NO: 31238 - protein, 384 aa, Arabidopsis thaliana; identical to SEQ ID NO: 27648
  peptide (1)..(384): Ceres Seq. ID no. 13490281
  misc_feature (189)..(288): Homolog of NCBI NO: 20453175 NR Description: At3g19895 [Arabidopsis thaliana]
  misc_feature (47)..(239): Homolog of NCBI NO: 30680842 NR Description: expressed protein [Arabidopsis thaliana]
  misc_feature (47)..(239): Homolog of NCBI NO: 10176735 NR Description: gene_id:K18I23.3~unknown protein [Arabidopsis
  misc_feature (211)..(369): Homolog of NCBI NO: 11994201 NR Description: gb|AAF35943.1~gene_id:MPN9.14~similar to unknown
  misc_feature (189)..(369): Homolog of NCBI NO: 30685540 NR Description: expressed protein [Arabidopsis thaliana]
  misc_feature (94)..(384): Homolog of NCBI NO: 28876015 NR Description: hypothetical protein [Oryza sativa (japonica
  misc_feature (33)..(212): Homolog of NCBI NO: 25370811 NR Description: hypothetical protein At2g40640 [imported] -
  misc_feature (2)..(344): Homolog of NCBI NO: 30688358 NR Description: expressed protein [Arabidopsis thaliana]
  misc_feature (2)..(384): Homolog of NCBI NO: 27413505 NR Description: hypothetical protein [Arabidopsis thaliana]
  misc_feature (2)..(384): Homolog of NCBI NO: 30688352 NR Description: expressed protein [Arabidopsis thaliana]

SEQ ID NO: 31239 - protein, 383 aa, Arabidopsis thaliana; identical to SEQ ID NO: 27649
  peptide (1)..(383): Ceres Seq. ID no. 13490282
  misc_feature (188)..(287): Homolog of NCBI NO: 20453175 NR Description: At3g19895 [Arabidopsis thaliana]
  misc_feature (46)..(238): Homolog of NCBI NO: 30680842 NR Description: expressed protein [Arabidopsis thaliana]
  misc_feature (46)..(238): Homolog of NCBI NO: 10176735 NR Description: gene_id:K18I23.3~unknown protein [Arabidopsis
  misc_feature (210)..(368): Homolog of NCBI NO: 11994201 NR Description: gb|AAF35943.1~gene_id:MPN9.14~similar to unknown
  misc_feature (188)..(368): Homolog of NCBI NO: 30685540 NR Description: expressed protein [Arabidopsis thaliana]
  misc_feature (93)..(383): Homolog of NCBI NO: 28876015 NR Description: hypothetical protein [Oryza sativa (japonica
  misc_feature (32)..(211): Homolog of NCBI NO: 25370811 NR Description: hypothetical protein At2g40640 [imported] -
  misc_feature (1)..(343): Homolog of NCBI NO: 30688358 NR Description: expressed protein [Arabidopsis thaliana]
  misc_feature (1)..(383): Homolog of NCBI NO: 27413505 NR Description: hypothetical protein [Arabidopsis thaliana]
  misc_feature (1)..(383): Homolog of NCBI NO: 30688352 NR Description: expressed protein [Arabidopsis thaliana]

SEQ ID NO: 31240 - protein, 352 aa, Arabidopsis thaliana; identical to SEQ ID NO: 27650
  peptide (1)..(352): Ceres Seq. ID no. 13490283
  misc_feature (157)..(256): Homolog of NCBI NO: 20453175 NR Description: At3g19895 [Arabidopsis thaliana]
  misc_feature (15)..(207): Homolog of NCBI NO: 30680842 NR Description: expressed protein [Arabidopsis thaliana]
  misc_feature (15)..(207): Homolog of NCBI NO: 10176735 NR Description: gene_id:K18I23.3~unknown protein [Arabidopsis
  misc_feature (179)..(337): Homolog of NCBI NO: 11994201 NR Description: gb|AAF35943.1~gene_id:MPN9.14~similar to unknown
  misc_feature (157)..(337): Homolog of NCBI NO: 30685540 NR Description: expressed protein [Arabidopsis thaliana]
  misc_feature (62)..(352): Homolog of NCBI NO: 28876015 NR Description: hypothetical protein [Oryza sativa (japonica
  misc_feature (1)..(180): Homolog of NCBI NO: 25370811 NR Description: hypothetical protein At2g40640 [imported] -
  misc_feature (1)..(312): Homolog of NCBI NO: 30688358 NR Description: expressed protein [Arabidopsis thaliana]
  misc_feature (1)..(352): Homolog of NCBI NO: 27413505 NR Description: hypothetical protein [Arabidopsis thaliana]
  misc_feature (1)..(352): Homolog of NCBI NO: 30688352 NR Description: expressed protein [Arabidopsis thaliana]

SEQ ID NO: 31241 - DNA, 835 bp, Arabidopsis thaliana; identical to SEQ ID NO: 27651
  misc_feature (1)..(835): Ceres Seq. ID no. 12421619
  misc_feature: MA Experiment ID: 20000227 Result: Down-regulated in Transcription
  misc_feature: MA Experiment 20000227 PARAMETER Experiment Name: At_Root-Tips-vs-Tops_P Parameter: Tissue Value: Root Tips vs. Root Tops
  misc_feature: MA Experiment ID: 20000495 Result: Down-regulated in Transcription
  misc_feature: MA Experiment 20000495 PARAMETER Experiment Name: At_Guard_Cells_P Parameter: Harvest Date Value: 8/2/2002
  misc_feature: MA Experiment 20000495 PARAMETER Experiment Name: At_Guard_Cells_P Parameter: Organism Value: A. thaliana
  misc_feature: MA Experiment 20000495 PARAMETER Experiment Name: At_Guard_Cells_P Parameter: Tissue Value: Guard Cells vs. Leaves
  misc_feature: MA Experiment ID: 20000496 Result: Down-regulated in Transcription
  misc_feature: MA Experiment 20000496 PARAMETER Experiment Name: At_Guard_Cells_P Parameter: Harvest Date Value: 7/19/2002
  misc_feature: MA Experiment 20000496 PARAMETER Experiment Name: At_Guard_Cells_P Parameter: Organism Value: Canola
  misc_feature: MA Experiment 20000496 PARAMETER Experiment Name: At_Guard_Cells_P Parameter: Tissue Value: Guard Cells vs. Leaves

SEQ ID NO: 31242 - protein, 181 aa, Arabidopsis thaliana; identical to SEQ ID NO: 27652
  peptide (1)..(181): Ceres Seq. ID no. 12421620
  misc_feature (17)..(135): Homolog of NCBI NO: 13878119 NR Description: putative oxidoreductase [Arabidopsis thaliana]
  misc_feature (17)..(135): Homolog of NCBI NO: 15224575 NR Description: putative dioxygenase; protein id: At2g30830.1
  misc_feature (8)..(135): Homolog of NCBI NO: 5031283 NR Description: unknown [Prunus armeniaca]
  misc_feature (14)..(135): Homolog of NCBI NO: 15224576 NR Description: putative dioxygenase; protein id: At2g30840.1
  misc_feature (17)..(135): Homolog of NCBI NO: 15218794 NR Description: putative 1-aminocyclopropane-1-carboxylate oxidase
  misc_feature (17)..(135): Homolog of NCBI NO: 15218795 NR Description: putative 1-aminocyclopropane-1-carboxylate oxidase
  misc_feature (15)..(135): Homolog of NCBI NO: 15233096 NR Description: 1-aminocyclopropane-1-carboxylate oxidase-like
  misc_feature (17)..(135): Homolog of NCBI NO: 9280671 NR Description: F21B7.3 [Arabidopsis thaliana]
  misc_feature (6)..(135): Homolog of NCBI NO: 25406927 NR Description: protein F12K11.6 [imported] - Arabidopsis
  misc_feature (6)..(135): Homolog of NCBI NO: 30679748 NR Description: 2-oxoglutarate-dependent dioxygenase, putative

SEQ ID NO: 31243 - protein, 176 aa, Arabidopsis thaliana; identical to SEQ ID NO: 27653
  peptide (1)..(176): Ceres Seq. ID no. 12421621
  misc_feature (12)..(130): Homolog of NCBI NO: 13878119 NR Description: putative oxidoreductase [Arabidopsis thaliana]
  misc_feature (12)..(130): Homolog of NCBI NO: 15224575 NR Description: putative dioxygenase; protein id: At2g30830.1
  misc_feature (3)..(130): Homolog of NCBI NO: 5031283 NR Description: unknown [Prunus armeniaca]
  misc_feature (9)..(130): Homolog of NCBI NO: 15224576 NR Description: putative dioxygenase; protein id: At2g30840.1
  misc_feature (12)..(130): Homolog of NCBI NO: 15218794 NR Description: putative 1-aminocyclopropane-1-carboxylate oxidase
  misc_feature (12)..(130): Homolog of NCBI NO: 15218795 NR Description: putative 1-aminocyclopropane-1-carboxylate oxidase
  misc_feature (10)..(130): Homolog of NCBI NO: 15233096 NR Description: 1-aminocyclopropane-1-carboxylate oxidase-like
  misc_feature (12)..(130): Homolog of NCBI NO: 9280671 NR Description: F21B7.3 [Arabidopsis thaliana]
  misc_feature (1)..(130): Homolog of NCBI NO: 25406927 NR Description: protein F12K11.6 [imported] - Arabidopsis
  misc_feature (1)..(130): Homolog of NCBI NO: 30679748 NR Description: 2-oxoglutarate-dependent dioxygenase, putative

SEQ ID NO: 31244 - protein, 138 aa, Arabidopsis thaliana; identical to SEQ ID NO: 27654
  peptide (1)..(138): Ceres Seq. ID no. 12421622
  misc_feature (79)..(129): Pfam Name: 2OG-Fe(II) oxygenase superfamily Pfam Description: 2OG-Fe(II) oxygenase superfamily
  misc_feature (1)..(137): Homolog of NCBI NO: 15218794 NR Description: putative 1-aminocyclopropane-1-carboxylate oxidase
  misc_feature (1)..(137): Homolog of NCBI NO: 15218795 NR Description: putative 1-aminocyclopropane-1-carboxylate oxidase
  misc_feature (1)..(137): Homolog of NCBI NO: 9280671 NR Description: F21B7.3 [Arabidopsis thaliana]
  misc_feature (1)..(137): Homolog of NCBI NO: 15233096 NR Description: 1-aminocyclopropane-1-carboxylate oxidase-like
  misc_feature (1)..(137): Homolog of NCBI NO: 9280671 NR Description: F21B7.3 [Arabidopsis thaliana]
  misc_feature (41)..(137): Homolog of NCBI NO: 25406927 NR Description: protein F12K11.6 [imported] - Arabidopsis
  misc_feature (41)..(129): Homolog of NCBI NO: 25406927 NR Description: protein F12K11.6 [imported] - Arabidopsis
  misc_feature (1)..(137): Homolog of NCBI NO: 25406927 NR Description: protein F12K11.6 [imported] - Arabidopsis
  misc_feature (1)..(137): Homolog of NCBI NO: 25406927 NR Description: protein F12K11.6 [imported] - Arabidopsis
  misc_feature (1)..(137): Homolog of NCBI NO: 30679748 NR Description: 2-oxoglutarate-dependent dioxygenase, putative

SEQ ID NO: 31245 - DNA, 1510 bp, Arabidopsis thaliana; identical to SEQ ID NO: 27655
  misc_feature (1)..(1510): Ceres Seq. ID no. 12370594
  misc_feature: MA Experiment ID: 20000182 Result: Up-regulated in Transcription
  misc_feature: MA Experiment 20000182 PARAMETER Experiment Name: At_2mM_SA_P Parameter: Age (day) Value: 14
  misc_feature: MA Experiment 20000182 PARAMETER Experiment Name: At_2mM_SA_P Parameter: Organism Value: A. thaliana
  misc_feature: MA Experiment 20000182 PARAMETER Experiment Name: At_2mM_SA_P Parameter: Plant Line Value: WS
  misc_feature: MA Experiment 20000182 PARAMETER Experiment Name: At_2mM_SA_P Parameter: Timepoint (hr) Value: 6
  misc_feature: MA Experiment 20000182 PARAMETER Experiment Name: At_2mM_SA_P Parameter: Tissue Value: Aerial
  misc_feature: MA Experiment 20000182 PARAMETER Experiment Name: At_2mM_SA_P Parameter: Treatment Value: 2mM SA vs. No Treatment
  misc_feature: MA Experiment ID: 20000184 Result: Down-regulated in Transcription
  misc_feature: MA Experiment 20000184 PARAMETER Experiment Name: At_Shoots__P Parameter: Age (day) Value: 7
  misc_feature: MA Experiment 20000184 PARAMETER Experiment Name: At_Shoots__P Parameter: Tissue Value: Shoots vs. Whole Plant
  misc_feature: MA Experiment ID: 20000234 Result: Down-regulated in Transcription
  misc_feature: MA Experiment 20000234 PARAMETER Experiment Name: At_Siliques_P Parameter: Age (day) Value: 21
  misc_feature: MA Experiment 20000234 PARAMETER Experiment Name: At_Siliques_P Parameter: Organism Value: A. thaliana
  misc_feature: MA Experiment 20000234 PARAMETER Experiment Name: At_Siliques_P Parameter: Plant Line Value: WS
  misc_feature: MA Experiment 20000234 PARAMETER Experiment Name: At_Siliques_P Parameter: Tissue Value: Less Than 5mm Siliques vs. Whole Plant
  misc_feature: MA Experiment ID: 20000264 Result: Down-regulated in Transcription
  misc_feature: MA Experiment 20000264 PARAMETER Experiment Name: At_Open_Flower_P Parameter: Age (day) Value: 21
  misc_feature: MA Experiment 20000264 PARAMETER Experiment Name: At_Open_Flower_P Parameter: Plant Line Value: WS
  misc_feature: MA Experiment 20000264 PARAMETER Experiment Name: At_Open_Flower_P Parameter: Tissue Value: Open Flower vs. Whole Plant
  misc_feature: MA Experiment ID: 20000265 Result: Down-regulated in Transcription
  misc_feature: MA Experiment 20000265 PARAMETER Experiment Name: At_Open_Flower_P Parameter: Age (day) Value: 21
  misc_feature: MA Experiment 20000265 PARAMETER Experiment Name: At_Open_Flower_P Parameter: Plant Line Value: WS
  misc_feature: MA Experiment 20000265 PARAMETER Experiment Name: At_Open_Flower_P Parameter: Tissue Value: Closed Flower vs. Whole Plant
  misc_feature: MA Experiment ID: 20000267 Result: Up-regulated in Transcription
  misc_feature: MA Experiment 20000267 PARAMETER Experiment Name: At_Drought_P Parameter: Age (day) Value: 7
  misc_feature: MA Experiment 20000267 PARAMETER Experiment Name: At_Drought_P Parameter: Organism Value: A. thaliana
  misc_feature: MA Experiment 20000267 PARAMETER Experiment Name: At_Drought_P Parameter: Plant Line Value: WS
  misc_feature: MA Experiment 20000267 PARAMETER Experiment Name: At_Drought_P Parameter: Timepoint (hr) Value: 6
  misc_feature: MA Experiment 20000267 PARAMETER Experiment Name: At_Drought_P Parameter: Tissue Value: Whole Plant
  misc_feature: MA Experiment 20000267 PARAMETER Experiment Name: At_Drought_P Parameter: Treatment Value: Drought vs. No Drought
  misc_feature: MA Experiment ID: 20000286 Result: Down-regulated in Transcription
  misc_feature: MA Experiment 20000286 PARAMETER Experiment Name: At_Open_Flower_P Parameter: Age (day) Value: 21
  misc_feature: MA Experiment 20000286 PARAMETER Experiment Name: At_Open_Flower_P Parameter: Plant Line Value: WS
  misc_feature: MA Experiment 20000286 PARAMETER Experiment Name: At_Open_Flower_P Parameter: Tissue Value: Half Open vs. Whole Plant
  misc_feature: MA Experiment ID: 20000436 Result: Up-regulated in Transcription
  misc_feature: MA Experiment 20000436 PARAMETER Experiment Name: At_Drought_P Parameter: Age (day) Value: 7
  misc_feature: MA Experiment 20000436 PARAMETER Experiment Name: At_Drought_P Parameter: Organism Value: A. thaliana
  misc_feature: MA Experiment 20000436 PARAMETER Experiment Name: At_Drought_P Parameter: Plant Line Value: WS
  misc_feature: MA Experiment 20000436 PARAMETER Experiment Name: At_Drought_P Parameter: Timepoint (hr) Value: 12
  misc_feature: MA Experiment 20000436 PARAMETER Experiment Name: At_Drought_P Parameter: Tissue Value: Whole Plant
  misc_feature: MA Experiment 20000436 PARAMETER Experiment Name: At_Drought_P Parameter: Treatment Value: Drought vs. No Drought
  misc_feature: MA Experiment ID: 20000437 Result: Up-regulated in Transcription
  misc_feature: MA Experiment 20000437 PARAMETER Experiment Name: At_Drought_P Parameter: Age (day) Value: 8
  misc_feature: MA Experiment 20000437 PARAMETER Experiment Name: At_Drought_P Parameter: Organism Value: A. thaliana
  misc_feature: MA Experiment 20000437 PARAMETER Experiment Name: At_Drought_P Parameter: Plant Line Value: WS
  misc_feature: MA Experiment 20000437 PARAMETER Experiment Name: At_Drought_P Parameter: Timepoint (hr) Value: 24
  misc_feature: MA Experiment 20000437 PARAMETER Experiment Name: At_Drought_P Parameter: Tissue Value: Whole Plant
  misc_feature: MA Experiment 20000437 PARAMETER Experiment Name: At_Drought_P Parameter: Treatment Value: Drought vs. No Drought
  misc_feature: MA Experiment ID: 20000438 Result: Down-regulated in Transcription
  misc_feature: MA Experiment 20000438 PARAMETER Experiment Name: At_Shoots__P Parameter: Age (day) Value: 14
  misc_feature: MA Experiment 20000438 PARAMETER Experiment Name: At_Shoots__P Parameter: Tissue Value: Shoots vs. Whole Plant
  misc_feature: MA Experiment ID: 20000445 Result: Up-regulated in Transcription
  misc_feature: MA Experiment 20000445 PARAMETER Experiment Name: At_100uM_NAA__P Parameter: Age (day) Value: 14
  misc_feature: MA Experiment 20000445 PARAMETER Experiment Name: At_100uM_NAA__P Parameter: Organism Value: A. thaliana
  misc_feature: MA Experiment 20000445 PARAMETER Experiment Name: At_100uM_NAA__P Parameter: Plant Line Value: WS
  misc_feature: MA Experiment 20000445 PARAMETER Experiment Name: At_100uM_NAA__P Parameter: Timepoint (hr) Value: 6
  misc_feature: MA Experiment 20000445 PARAMETER Experiment Name: At_100uM_NAA__P Parameter: Tissue Value: Aerial
  misc_feature: MA Experiment 20000445 PARAMETER Experiment Name: At_100uM_NAA__P Parameter: Treatment Value: 100uM NAA vs. No Treatment
  misc_feature: MA Experiment ID: 20000453 Result: Up-regulated in Transcription
  misc_feature: MA Experiment 20000453 PARAMETER Experiment Name: At_100uM_ABA_P Parameter: Age (day) Value: 15
  misc_feature: MA Experiment 20000453 PARAMETER Experiment Name: At_100uM_ABA_P Parameter: Organism Value: A. thaliana
  misc_feature: MA Experiment 20000453 PARAMETER Experiment Name: At_100uM_ABA_P Parameter: Plant Line Value: WS
  misc_feature: MA Experiment 20000453 PARAMETER Experiment Name: At_100uM_ABA_P Parameter: Timepoint (hr) Value: 24
  misc_feature: MA Experiment 20000453 PARAMETER Experiment Name: At_100uM_ABA_P Parameter: Tissue Value: Aerial
  misc_feature: MA Experiment 20000453 PARAMETER Experiment Name: At_100uM_ABA_P Parameter: Treatment Value: 100uM ABA vs. No Treatment
  misc_feature: MA Experiment ID: 20000460 Result: Up-regulated in Transcription
  misc_feature: MA Experiment 20000460 PARAMETER Experiment Name: At_10percent_PEG_P Parameter: Age (day) Value: 12
  misc_feature: MA Experiment 20000460 PARAMETER Experiment Name: At_10percent_PEG_P Parameter: Organism Value: A. thaliana
  misc_feature: MA Experiment 20000460 PARAMETER Experiment Name: At_10percent_PEG_P Parameter: Plant Line Value: WS
  misc_feature: MA Experiment 20000460 PARAMETER Experiment Name: At_10percent_PEG_P Parameter: Timepoint (day) Value: 12
  misc_feature: MA Experiment 20000460 PARAMETER Experiment Name: At_10percent_PEG_P Parameter: Tissue Value: Whole Plant
  misc_feature: MA Experiment 20000460 PARAMETER Experiment Name: At_10percent_PEG_P Parameter: Treatment Value: 10percent PEG vs. No Treatment
  misc_feature: MA Experiment ID: 20000573 Result: Down-regulated in Transcription
  misc_feature: MA Experiment 20000573 PARAMETER Experiment Name: At_100uM_ABA_Mutants__P Parameter: Organism Value: A. thaliana
  misc_feature: MA Experiment 20000573 PARAMETER Experiment Name: At_100uM_ABA_Mutants__P Parameter: Plant Line Value: CS22 vs. Ler wt
  misc_feature: MA Experiment 20000573 PARAMETER Experiment Name: At_100uM_ABA_Mutants__P Parameter: Timepoint (hr) Value: N/A
  misc_feature: MA Experiment 20000573 PARAMETER Experiment Name: At_100uM_ABA_Mutants__P Parameter: Tissue Value: Whole Plant
  misc_feature: MA Experiment 20000573 PARAMETER Experiment Name: At_100uM_ABA_Mutants__P Parameter: Treatment Value: None
  misc_feature: MA Experiment ID: 20000574 Result: Down-regulated in Transcription
  misc_feature: MA Experiment 20000574 PARAMETER Experiment Name: At_100uM_ABA_Mutants__P Parameter: Organism Value: A. thaliana
  misc_feature: MA Experiment 20000574 PARAMETER Experiment Name: At_100uM_ABA_Mutants__P Parameter: Plant Line Value: CS23 vs. Ler wt
  misc_feature: MA Experiment 20000574 PARAMETER Experiment Name: At_100uM_ABA_Mutants__P Parameter: Timepoint (hr) Value: N/A
  misc_feature: MA Experiment 20000574 PARAMETER Experiment Name: At_100uM_ABA_Mutants__P Parameter: Tissue Value: Whole Plant
  misc_feature: MA Experiment 20000574 PARAMETER Experiment Name: At_100uM_ABA_Mutants__P Parameter: Treatment Value: None
  misc_feature: MA Experiment ID: 20001554 Result: Up-regulated in Transcription
  misc_feature: MA Experiment 20001554 PARAMETER Experiment Name: At_Drought_Soil_Dry_P Parameter: Age (day) Value: 21
  misc_feature: MA Experiment 20001554 PARAMETER Experiment Name: At_Drought_Soil_Dry_P Parameter: Organism Value: A. thaliana
  misc_feature: MA Experiment 20001554 PARAMETER Experiment Name: At_Drought_Soil_Dry_P Parameter: Plant Line Value: WS
  misc_feature: MA Experiment 20001554 PARAMETER Experiment Name: At_Drought_Soil_Dry_P Parameter: Post Timepoint (hr) Value: None
  misc_feature: MA Experiment 20001554 PARAMETER Experiment Name: At_Drought_Soil_Dry_P Parameter: Post-Treatment Value: None
  misc_feature: MA Experiment 20001554 PARAMETER Experiment Name: At_Drought_Soil_Dry_P Parameter: Timepoint (day) Value: 7
  misc_feature: MA Experiment 20001554 PARAMETER Experiment Name: At_Drought_Soil_Dry_P Parameter: Treatment Value: Drought vs. No Drought
  misc_feature: MA Experiment ID: 20001555 Result: Up-regulated in Transcription
  misc_feature: MA Experiment 20001555 PARAMETER Experiment Name: At_Drought_Soil_Dry_P Parameter: Age (day) Value: 24
  misc_feature: MA Experiment 20001555 PARAMETER Experiment Name: At_Drought_Soil_Dry_P Parameter: Organism Value: A. thaliana
  misc_feature: MA Experiment 20001555 PARAMETER Experiment Name: At_Drought_Soil_Dry_P Parameter: Plant Line Value: WS
  misc_feature: MA Experiment 20001555 PARAMETER Experiment Name: At_Drought_Soil_Dry_P Parameter: Post Timepoint (hr) Value: None
  misc_feature: MA Experiment 20001555 PARAMETER Experiment Name: At_Drought_Soil_Dry_P Parameter: Post-Treatment Value: None
  misc_feature: MA Experiment 20001555 PARAMETER Experiment Name: At_Drought_Soil_Dry_P Parameter: Timepoint (day) Value: 10
  misc_feature: MA Experiment 20001555 PARAMETER Experiment Name: At_Drought_Soil_Dry_P Parameter: Treatment Value: Drought vs. No Drought
  misc_feature: MA Experiment ID: 20001560 Result: Down-regulated in Transcription
  misc_feature: MA Experiment 20001560 PARAMETER Experiment Name: At_Drought_Soil_Dry_P Parameter: Age (day) Value: 28
  misc_feature: MA Experiment 20001560 PARAMETER Experiment Name: At_Drought_Soil_Dry_P Parameter: Organism Value: A. thaliana
  misc_feature: MA Experiment 20001560 PARAMETER Experiment Name: At_Drought_Soil_Dry_P Parameter: Plant Line Value: WS
  misc_feature: MA Experiment 20001560 PARAMETER Experiment Name: At_Drought_Soil_Dry_P Parameter: Post Timepoint (hr) Value: None
  misc_feature: MA Experiment 20001560 PARAMETER Experiment Name: At_Drought_Soil_Dry_P Parameter: Post-Treatment Value: None
  misc_feature: MA Experiment 20001560 PARAMETER Experiment Name: At_Drought_Soil_Dry_P Parameter: Timepoint (day) Value: 14
  misc_feature: MA Experiment 20001560 PARAMETER Experiment Name: At_Drought_Soil_Dry_P Parameter: Treatment Value: Drought vs. No Drought
  misc_feature: MA Experiment ID: 20001905 Result: Up-regulated in Transcription
  misc_feature: MA Experiment 20001905 PARAMETER Experiment Name: At_Drought_Reproduction_P Parameter: Age (day) Value: 40
  misc_feature: MA Experiment 20001905 PARAMETER Experiment Name: At_Drought_Reproduction_P Parameter: Organism Value: A. thaliana
  misc_feature: MA Experiment 20001905 PARAMETER Experiment Name: At_Drought_Reproduction_P Parameter: Plant Line Value: WS
  misc_feature: MA Experiment 20001905 PARAMETER Experiment Name: At_Drought_Reproduction_P Parameter: Timepoint (day) Value: 10
  misc_feature: MA Experiment 20001905 PARAMETER Experiment Name: At_Drought_Reproduction_P Parameter: Tissue Value: Rosettes
  misc_feature: MA Experiment 20001905 PARAMETER Experiment Name: At_Drought_Reproduction_P Parameter: Treatment Value: Drought vs. No Drought
  misc_feature: MA Experiment ID: 20001911 Result: Up-regulated in Transcription
  misc_feature: MA Experiment 20001911 PARAMETER Experiment Name: At_Drought_Reproduction_P Parameter: Age (day) Value: 40
  misc_feature: MA Experiment 20001911 PARAMETER Experiment Name: At_Drought_Reproduction_P Parameter: Organism Value: A. thaliana
  misc_feature: MA Experiment 20001911 PARAMETER Experiment Name: At_Drought_Reproduction_P Parameter: Plant Line Value: WS
  misc_feature: MA Experiment 20001911 PARAMETER Experiment Name: At_Drought_Reproduction_P Parameter: Timepoint (day) Value: 10
  misc_feature: MA Experiment 20001911 PARAMETER Experiment Name: At_Drought_Reproduction_P Parameter: Tissue Value: Flowers
  misc_feature: MA Experiment 20001911 PARAMETER Experiment Name: At_Drought_Reproduction_P Parameter: Treatment Value: Drought vs. No Drought

SEQ ID NO: 31246 - protein, 349 aa, Arabidopsis thaliana; identical to SEQ ID NO: 27656
  peptide (1)..(349): Ceres Seq. ID no. 12370595
  misc_feature (289)..(348): Homolog of NCBI NO: 13161401 NR Description: CPRD48 [Vigna unguiculata]
  misc_feature (228)..(312): Homolog of NCBI NO: 7488804 NR Description: gda-1 protein - garden pea
  misc_feature (145)..(343): Homolog of NCBI NO: 21665866 NR Description: GDA2 protein [Pisum sativum]
  misc_feature (96)..(343): Homolog of NCBI NO: 21592623 NR Description: gda-1, putative [Arabidopsis thaliana]
  misc_feature (96)..(343): Homolog of NCBI NO: 15232081 NR Description: gda-1, putative
  misc_feature (96)..(343): Homolog of NCBI NO: 2369766 NR Description: hypothetical protein [Citrus x paradisi]
  misc_feature (157)..(346): Homolog of NCBI NO: 584825 NR Description: B2 PROTEIN
  misc_feature (9)..(336): Homolog of NCBI NO: 34913876 NR Description: B1156H12.22 [Oryza sativa (japonica
  misc_feature (146)..(349): Homolog of NCBI NO: 9757950 NR Description: gene_id:MJC20.15~similar to unknown
  misc_feature (1)..(349): Homolog of NCBI NO: 18422167 NR Description: putative protein

SEQ ID NO: 31247 - protein, 263 aa, Arabidopsis thaliana; identical to SEQ ID NO: 27657
  peptide (1)..(263): Ceres Seq. ID no. 12370596
  misc_feature (203)..(262): Homolog of NCBI NO: 13161401 NR Description: CPRD48 [Vigna unguiculata]
  misc_feature (142)..(226): Homolog of NCBI NO: 7488804 NR Description: gda-1 protein - garden pea
  misc_feature (59)..(257): Homolog of NCBI NO: 21665866 NR Description: GDA2 protein [Pisum sativum]
  misc_feature (10)..(257): Homolog of NCBI NO: 21592623 NR Description: gda-1, putative [Arabidopsis thaliana]
  misc_feature (10)..(257): Homolog of NCBI NO: 15232081 NR Description: gda-1, putative
  misc_feature (10)..(257): Homolog of NCBI NO: 2369766 NR Description: hypothetical protein [Citrus x paradisi]
  misc_feature (71)..(260): Homolog of NCBI NO: 584825 NR Description: B2 PROTEIN
  misc_feature (1)..(250): Homolog of NCBI NO: 34913876 NR Description: B1156H12.22 [Oryza sativa (japonica
  misc_feature (60)..(263): Homolog of NCBI NO: 9757950 NR Description: gene_id:MJC20.15~similar to unknown
  misc_feature (1)..(263): Homolog of NCBI NO: 18422167 NR Description: putative protein

SEQ ID NO: 31248 - protein, 204 aa, Arabidopsis thaliana; identical to SEQ ID NO: 27658
  peptide (1)..(204): Ceres Seq. ID no. 12370597
  misc_feature (144)..(203): Homolog of NCBI NO: 13161401 NR Description: CPRD48 [Vigna unguiculata]
  misc_feature (83)..(167): Homolog of NCBI NO: 7488804 NR Description: gda-1 protein - garden pea
  misc_feature (1)..(198): Homolog of NCBI NO: 21665866 NR Description: GDA2 protein [Pisum sativum]
  misc_feature (1)..(198): Homolog of NCBI NO: 21592623 NR Description: gda-1, putative [Arabidopsis thaliana]
  misc_feature (1)..(198): Homolog of NCBI NO: 15232081 NR Description: gda-1, putative
  misc_feature (1)..(198): Homolog of NCBI NO: 2369766 NR Description: hypothetical protein [Citrus x paradisi]
  misc_feature (12)..(201): Homolog of NCBI NO: 584825 NR Description: B2 PROTEIN
  misc_feature (1)..(191): Homolog of NCBI NO: 34913876 NR Description: B1156H12.22 [Oryza sativa (japonica
  misc_feature (1)..(204): Homolog of NCBI NO: 9757950 NR Description: gene_id:MJC20.15~similar to unknown
  misc_feature (1)..(204): Homolog of NCBI NO: 18422167 NR Description: putative protein

SEQ ID NO: 31249 - DNA, 1219 bp, Arabidopsis thaliana; identical to SEQ ID NO: 27659
  misc_feature (1)..(1219): Ceres Seq. ID no. 12562073
  misc_feature: MA Experiment ID: 20000173 Result: Down-regulated in Transcription
  misc_feature: MA Experiment 20000173 PARAMETER Experiment Name: At_42deg_Heat_P Parameter: Age (day) Value: 14
  misc_feature: MA Experiment 20000173 PARAMETER Experiment Name: At_42deg_Heat_P Parameter: Organism Value: A. thaliana
  misc_feature: MA Experiment 20000173 PARAMETER Experiment Name: At_42deg_Heat_P Parameter: Plant Line Value: WS
  misc_feature: MA Experiment 20000173 PARAMETER Experiment Name: At_42deg_Heat_P Parameter: Temperature (deg C) Value: 42 vs. 22
  misc_feature: MA Experiment 20000173 PARAMETER Experiment Name: At_42deg_Heat_P Parameter: Timepoint (hr) Value: 6
  misc_feature: MA Experiment 20000173 PARAMETER Experiment Name: At_42deg_Heat_P Parameter: Tissue Value: Aerial
  misc_feature: MA Experiment ID: 20000179 Result: Down-regulated in Transcription
  misc_feature: MA Experiment 20000179 PARAMETER Experiment Name: At_Germinating_Seeds_P Parameter: Age (hr) Value: 6 vs. 0
  misc_feature: MA Experiment 20000179 PARAMETER Experiment Name: At_Germinating_Seeds_P Parameter: Tissue Value: Germinating Seeds
  misc_feature: MA Experiment ID: 20000185 Result: Up-regulated in Transcription
  misc_feature: MA Experiment 20000185 PARAMETER Experiment Name: At_Roots__P Parameter: Age (day) Value: 7 vs. 21
  misc_feature: MA Experiment 20000185 PARAMETER Experiment Name: At_Roots__P Parameter: Organism Value: A. thaliana
  misc_feature: MA Experiment 20000185 PARAMETER Experiment Name: At_Roots__P Parameter: Tissue Value: Roots vs. Whole Plant
  misc_feature: MA Experiment ID: 20000234 Result: Up-regulated in Transcription
  misc_feature: MA Experiment 20000234 PARAMETER Experiment Name: At_Siliques_P Parameter: Age (day) Value: 21
  misc_feature: MA Experiment 20000234 PARAMETER Experiment Name: At_Siliques_P Parameter: Organism Value: A. thaliana
  misc_feature: MA Experiment 20000234 PARAMETER Experiment Name: At_Siliques_P Parameter: Plant Line Value: WS
  misc_feature: MA Experiment 20000234 PARAMETER Experiment Name: At_Siliques_P Parameter: Tissue Value: Less Than 5mm Siliques vs. Whole Plant
  misc_feature: MA Experiment ID: 20000235 Result: Up-regulated in Transcription
  misc_feature: MA Experiment 20000235 PARAMETER Experiment Name: At_Siliques_P Parameter: Age (day) Value: 21
  misc_feature: MA Experiment 20000235 PARAMETER Experiment Name: At_Siliques_P Parameter: Organism Value: A. thaliana
  misc_feature: MA Experiment 20000235 PARAMETER Experiment Name: At_Siliques_P Parameter: Plant Line Value: WS
  misc_feature: MA Experiment 20000235 PARAMETER Experiment Name: At_Siliques_P Parameter: Tissue Value: 5-10mm Siliques vs. Whole Plant
  misc_feature: MA Experiment ID: 20000264 Result: Up-regulated in Transcription
  misc_feature: MA Experiment 20000264 PARAMETER Experiment Name: At_Open_Flower_P Parameter: Age (day) Value: 21
  misc_feature: MA Experiment 20000264 PARAMETER Experiment Name: At_Open_Flower_P Parameter: Plant Line Value: WS
  misc_feature: MA Experiment 20000264 PARAMETER Experiment Name: At_Open_Flower_P Parameter: Tissue Value: Open Flower vs. Whole Plant
  misc_feature: MA Experiment ID: 20000794 Result: Up-regulated in Transcription
  misc_feature: MA Experiment 20000794 PARAMETER Experiment Name: At_Petals_P Parameter: Age (day) Value: 23-25 days
  misc_feature: MA Experiment 20000794 PARAMETER Experiment Name: At_Petals_P Parameter: Plant Line Value: WS
  misc_feature: MA Experiment 20000794 PARAMETER Experiment Name: At_Petals_P Parameter: Tissue Value: Petals vs. Whole plant

SEQ ID NO: 31250 - protein, 330 aa, Arabidopsis thaliana; identical to SEQ ID NO: 27660
  peptide (1)..(330): Ceres Seq. ID no. 12562074
  misc_feature (114)..(320): Homolog of NCBI NO: 34856025 NR Description: similar to 2310044H10Rik protein [Rattus
  misc_feature (150)..(320): Homolog of NCBI NO: 13543832 NR Description: Unknown (protein for IMAGE:3591916) [Mus musculus]
  misc_feature (114)..(320): Homolog of NCBI NO: 37574074 NR Description: RIKEN cDNA 2310044H10 [Mus musculus]
  misc_feature (96)..(320): Homolog of NCBI NO: 38181935 NR Description: Unknown (protein for MGC:76288) [Silurana
  misc_feature (96)..(322): Homolog of NCBI NO: 27503262 NR Description: Unknown (protein for IMAGE:5570892) [Xenopus
  misc_feature (39)..(330): Homolog of NCBI NO: 18408239 NR Description: expressed protein
  misc_feature (39)..(330): Homolog of NCBI NO: 21594383 NR Description: unknown [Arabidopsis thaliana]

SEQ ID NO: 31251 - protein, 292 aa, Arabidopsis thaliana; identical to SEQ ID NO: 27661
  peptide (1)..(292): Ceres Seq. ID no. 12562075
  misc_feature (76)..(282): Homolog of NCBI NO: 34856025 NR Description: similar to 2310044H10Rik protein [Rattus
  misc_feature (112)..(282): Homolog of NCBI NO: 13543832 NR Description: Unknown (protein for IMAGE:3591916) [Mus musculus]
  misc_feature (76)..(282): Homolog of NCBI NO: 37574074 NR Description: RIKEN cDNA 2310044H10 [Mus musculus]
  misc_feature (58)..(282): Homolog of NCBI NO: 38181935 NR Description: Unknown (protein for MGC:76288) [Silurana
  misc_feature (58)..(284): Homolog of NCBI NO: 27503262 NR Description: Unknown (protein for IMAGE:5570892) [Xenopus
  misc_feature (1)..(292): Homolog of NCBI NO: 18408239 NR Description: expressed protein
  misc_feature (1)..(292): Homolog of NCBI NO: 21594383 NR Description: unknown [Arabidopsis thaliana]

SEQ ID NO: 31252 - DNA, 1302 bp, Arabidopsis thaliana; identical to SEQ ID NO: 27662
  misc_feature (1)..(1302): Ceres Seq. ID no. 12333724
  misc_feature: MA Experiment ID: 20000171 Result: Down-regulated in Transcription
  misc_feature: MA Experiment 20000171 PARAMETER Experiment Name: At_42deg_Heat_P Parameter: Age (day) Value: 14
  misc_feature: MA Experiment 20000171 PARAMETER Experiment Name: At_42deg_Heat_P Parameter: Organism Value: A. thaliana
  misc_feature: MA Experiment 20000171 PARAMETER Experiment Name: At_42deg_Heat_P Parameter: Plant Line Value: WS
  misc_feature: MA Experiment 20000171 PARAMETER Experiment Name: At_42deg_Heat_P Parameter: Temperature (deg C) Value: 42 vs. 22
  misc_feature: MA Experiment 20000171 PARAMETER Experiment Name: At_42deg_Heat_P Parameter: Timepoint (hr) Value: 1
  misc_feature: MA Experiment 20000171 PARAMETER Experiment Name: At_42deg_Heat_P Parameter: Tissue Value: Aerial
  misc_feature: MA Experiment ID: 20000173 Result: Down-regulated in Transcription
  misc_feature: MA Experiment 20000173 PARAMETER Experiment Name: At_42deg_Heat_P Parameter: Age (day) Value: 14
  misc_feature: MA Experiment 20000173 PARAMETER Experiment Name: At_42deg_Heat_P Parameter: Organism Value: A. thaliana
  misc_feature: MA Experiment 20000173 PARAMETER Experiment Name: At_42deg_Heat_P Parameter: Plant Line Value: WS
  misc_feature: MA Experiment 20000173 PARAMETER Experiment Name: At_42deg_Heat_P Parameter: Temperature (deg C) Value: 42 vs. 22
  misc_feature: MA Experiment 20000173 PARAMETER Experiment Name: At_42deg_Heat_P Parameter: Timepoint (hr) Value: 6
  misc_feature: MA Experiment 20000173 PARAMETER Experiment Name: At_42deg_Heat_P Parameter: Tissue Value: Aerial
  misc_feature: MA Experiment ID: 20000185 Result: Up-regulated in Transcription
  misc_feature: MA Experiment 20000185 PARAMETER Experiment Name: At_Roots__P Parameter: Age (day) Value: 7 vs. 21
  misc_feature: MA Experiment 20000185 PARAMETER Experiment Name: At_Roots__P Parameter: Organism Value: A. thaliana
  misc_feature: MA Experiment 20000185 PARAMETER Experiment Name: At_Roots__P Parameter: Tissue Value: Roots vs. Whole Plant
  misc_feature: MA Experiment ID: 20000227 Result: Up-regulated in Transcription
  misc_feature: MA Experiment 20000227 PARAMETER Experiment Name: At_Root-Tips-vs-Tops_P Parameter: Tissue Value: Root Tips vs. Root Tops
  misc_feature: MA Experiment ID: 20000234 Result: Up-regulated in Transcription
  misc_feature: MA Experiment 20000234 PARAMETER Experiment Name: At_Siliques_P Parameter: Age (day) Value: 21
  misc_feature: MA Experiment 20000234 PARAMETER Experiment Name: At_Siliques_P Parameter: Organism Value: A. thaliana
  misc_feature: MA Experiment 20000234 PARAMETER Experiment Name: At_Siliques_P Parameter: Plant Line Value: WS
  misc_feature: MA Experiment 20000234 PARAMETER Experiment Name: At_Siliques_P Parameter: Tissue Value: Less Than 5mm Siliques vs. Whole Plant
  misc_feature: MA Experiment ID: 20000235 Result: Up-regulated in Transcription
  misc_feature: MA Experiment 20000235 PARAMETER Experiment Name: At_Siliques_P Parameter: Age (day) Value: 21
  misc_feature: MA Experiment 20000235 PARAMETER Experiment Name: At_Siliques_P Parameter: Organism Value: A. thaliana
  misc_feature: MA Experiment 20000235 PARAMETER Experiment Name: At_Siliques_P Parameter: Plant Line Value: WS
  misc_feature: MA Experiment 20000235 PARAMETER Experiment Name: At_Siliques_P Parameter: Tissue Value: 5-10mm Siliques vs. Whole Plant
  misc_feature: MA Experiment ID: 20000437 Result: Down-regulated in Transcription
  misc_feature: MA Experiment 20000437 PARAMETER Experiment Name: At_Drought_P Parameter: Age (day) Value: 8
  misc_feature: MA Experiment 20000437 PARAMETER Experiment Name: At_Drought_P Parameter: Organism Value: A. thaliana
  misc_feature: MA Experiment 20000437 PARAMETER Experiment Name: At_Drought_P Parameter: Plant Line Value: WS
  misc_feature: MA Experiment 20000437 PARAMETER Experiment Name: At_Drought_P Parameter: Timepoint (hr) Value: 24
  misc_feature: MA Experiment 20000437 PARAMETER Experiment Name: At_Drought_P Parameter: Tissue Value: Whole Plant
  misc_feature: MA Experiment 20000437 PARAMETER Experiment Name: At_Drought_P Parameter: Treatment Value: Drought vs. No Drought
  misc_feature: MA Experiment ID: 20000439 Result: Up-regulated in Transcription
  misc_feature: MA Experiment 20000439 PARAMETER Experiment Name: At_Roots__P Parameter: Age (day) Value: 14 vs. 21
  misc_feature: MA Experiment 20000439 PARAMETER Experiment Name: At_Roots__P Parameter: Organism Value: A. thaliana
  misc_feature: MA Experiment 20000439 PARAMETER Experiment Name: At_Roots__P Parameter: Tissue Value: Roots vs. Whole Plant
  misc_feature: MA Experiment ID: 20000445 Result: Up-regulated in Transcription
  misc_feature: MA Experiment 20000445 PARAMETER Experiment Name: At_100uM_NAA__P Parameter: Age (day) Value: 14
  misc_feature: MA Experiment 20000445 PARAMETER Experiment Name: At_100uM_NAA__P Parameter: Organism Value: A. thaliana
  misc_feature: MA Experiment 20000445 PARAMETER Experiment Name: At_100uM_NAA__P Parameter: Plant Line Value: WS
  misc_feature: MA Experiment 20000445 PARAMETER Experiment Name: At_100uM_NAA__P Parameter: Timepoint (hr) Value: 6
  misc_feature: MA Experiment 20000445 PARAMETER Experiment Name: At_100uM_NAA__P Parameter: Tissue Value: Aerial
  misc_feature: MA Experiment 20000445 PARAMETER Experiment Name: At_100uM_NAA__P Parameter: Treatment Value: 100uM NAA vs. No Treatment
  misc_feature: MA Experiment ID: 20000573 Result: Down-regulated in Transcription
  misc_feature: MA Experiment 20000573 PARAMETER Experiment Name: At_100uM_ABA_Mutants__P Parameter: Organism Value: A. thaliana
  misc_feature: MA Experiment 20000573 PARAMETER Experiment Name: At_100uM_ABA_Mutants__P Parameter: Plant Line Value: CS22 vs. Ler wt
  misc_feature: MA Experiment 20000573 PARAMETER Experiment Name: At_100uM_ABA_Mutants__P Parameter: Timepoint (hr) Value: N/A
  misc_feature: MA Experiment 20000573 PARAMETER Experiment Name: At_100uM_ABA_Mutants__P Parameter: Tissue Value: Whole Plant
  misc_feature: MA Experiment 20000573 PARAMETER Experiment Name: At_100uM_ABA_Mutants__P Parameter: Treatment Value: None
  misc_feature: MA Experiment ID: 20001248 Result: Up-regulated in Transcription
  misc_feature: MA Experiment 20001248 PARAMETER Experiment Name: At_Far-red-induction_P Parameter: Age (day) Value: 7
  misc_feature: MA Experiment 20001248 PARAMETER Experiment Name: At_Far-red-induction_P Parameter: Light Value: Far-red vs. White
  misc_feature: MA Experiment 20001248 PARAMETER Experiment Name: At_Far-red-induction_P Parameter: Organism Value: A. thaliana
  misc_feature: MA Experiment 20001248 PARAMETER Experiment Name: At_Far-red-induction_P Parameter: Plant Line Value: Columbia
  misc_feature: MA Experiment 20001248 PARAMETER Experiment Name: At_Far-red-induction_P Parameter: Timepoint (hr) Value: 4
  misc_feature: MA Experiment 20001248 PARAMETER Experiment Name: At_Far-red-induction_P Parameter: Tissue Value: Whole Plant
  misc_feature: MA Experiment ID: 20001450 Result: Up-regulated in Transcription
  misc_feature: MA Experiment 20001450 PARAMETER Experiment Name: At_Far-red-induction_P Parameter: Age (day) Value: 7
  misc_feature: MA Experiment 20001450 PARAMETER Experiment Name: At_Far-red-induction_P Parameter: Light Value: Far-red vs. White
  misc_feature: MA Experiment 20001450 PARAMETER Experiment Name: At_Far-red-induction_P Parameter: Organism Value: A. thaliana
  misc_feature: MA Experiment 20001450 PARAMETER Experiment Name: At_Far-red-induction_P Parameter: Plant Line Value: Columbia
  misc_feature: MA Experiment 20001450 PARAMETER Experiment Name: At_Far-red-induction_P Parameter: Timepoint (hr) Value: 8
  misc_feature: MA Experiment 20001450 PARAMETER Experiment Name: At_Far-red-induction_P Parameter: Tissue Value: Whole Plant
  misc_feature: MA Experiment ID: 20001556 Result: Down-regulated in Transcription
  misc_feature: MA Experiment 20001556 PARAMETER Experiment Name: At_Drought_Soil_Dry_P Parameter: Age (day) Value: 26
  misc_feature: MA Experiment 20001556 PARAMETER Experiment Name: At_Drought_Soil_Dry_P Parameter: Organism Value: A. thaliana
  misc_feature: MA Experiment 20001556 PARAMETER Experiment Name: At_Drought_Soil_Dry_P Parameter: Plant Line Value: WS
  misc_feature: MA Experiment 20001556 PARAMETER Experiment Name: At_Drought_Soil_Dry_P Parameter: Post Timepoint (hr) Value: None
  misc_feature: MA Experiment 20001556 PARAMETER Experiment Name: At_Drought_Soil_Dry_P Parameter: Post-Treatment Value: None
  misc_feature: MA Experiment 20001556 PARAMETER Experiment Name: At_Drought_Soil_Dry_P Parameter: Timepoint (day) Value: 12
  misc_feature: MA Experiment 20001556 PARAMETER Experiment Name: At_Drought_Soil_Dry_P Parameter: Treatment Value: Drought vs. No Drought
  misc_feature: MA Experiment ID: 20001557 Result: Up-regulated in Transcription
  misc_feature: MA Experiment 20001557 PARAMETER Experiment Name: At_Drought_Soil_Dry_P Parameter: Age (day) Value: 27
  misc_feature: MA Experiment 20001557 PARAMETER Experiment Name: At_Drought_Soil_Dry_P Parameter: Organism Value: A. thaliana
  misc_feature: MA Experiment 20001557 PARAMETER Experiment Name: At_Drought_Soil_Dry_P Parameter: Plant Line Value: WS
  misc_feature: MA Experiment 20001557 PARAMETER Experiment Name: At_Drought_Soil_Dry_P Parameter: Post Timepoint (hr) Value: 3
  misc_feature: MA Experiment 20001557 PARAMETER Experiment Name: At_Drought_Soil_Dry_P Parameter: Post-Treatment Value: Re-Water vs. No Drought
  misc_feature: MA Experiment 20001557 PARAMETER Experiment Name: At_Drought_Soil_Dry_P Parameter: Timepoint (day) Value: 13
  misc_feature: MA Experiment 20001557 PARAMETER Experiment Name: At_Drought_Soil_Dry_P Parameter: Treatment Value: Drought vs. No Drought
  misc_feature: MA Experiment ID: 20001560 Result: Up-regulated in Transcription
  misc_feature: MA Experiment 20001560 PARAMETER Experiment Name: At_Drought_Soil_Dry_P Parameter: Age (day) Value: 28
  misc_feature: MA Experiment 20001560 PARAMETER Experiment Name: At_Drought_Soil_Dry_P Parameter: Organism Value: A. thaliana
  misc_feature: MA Experiment 20001560 PARAMETER Experiment Name: At_Drought_Soil_Dry_P Parameter: Plant Line Value: WS
  misc_feature: MA Experiment 20001560 PARAMETER Experiment Name: At_Drought_Soil_Dry_P Parameter: Post Timepoint (hr) Value: None
  misc_feature: MA Experiment 20001560 PARAMETER Experiment Name: At_Drought_Soil_Dry_P Parameter: Post-Treatment Value: None
  misc_feature: MA Experiment 20001560 PARAMETER Experiment Name: At_Drought_Soil_Dry_P Parameter: Timepoint (day) Value: 14
  misc_feature: MA Experiment 20001560 PARAMETER Experiment Name: At_Drought_Soil_Dry_P Parameter: Treatment Value: Drought vs. No Drought

SEQ ID NO: 31253 - protein, 326 aa, Arabidopsis thaliana; identical to SEQ ID NO: 27663
  peptide (1)..(326): Ceres Seq. ID no. 12333725
  misc_feature (20)..(325): Pfam Name: Homocysteine S-methyltransferase Pfam Description: Homocysteine S-methyltransferase
  misc_feature (10)..(324): Homolog of NCBI NO: 10732791 NR Description: homocysteine S-methyltransferase-4 [Zea mays]
  misc_feature (14)..(325): Homolog of NCBI NO: 10732789 NR Description: homocysteine S-methyltransferase-3 [Zea mays]
  misc_feature (14)..(325): Homolog of NCBI NO: 10732787 NR Description: homocysteine S-methyltransferase-2 [Zea mays]
  misc_feature (10)..(326): Homolog of NCBI NO: 25453566 NR Description: homocysteine S-methyltransferase (EC 2.1.1.10)
  misc_feature (10)..(326): Homolog of NCBI NO: 15229396 NR Description: homocysteine S-methyltransferase AtHMT-2
  misc_feature (2)..(323): Homolog of NCBI NO: 21593147 NR Description: putative selenocysteine methyltransferase
  misc_feature (2)..(323): Homolog of NCBI NO: 18403505 NR Description: putative selenocysteine methyltransferase
  misc_feature (9)..(326): Homolog of NCBI NO: 10732785 NR Description: homocysteine S-methyltransferase-1 [Zea mays]
  misc_feature (10)..(324): Homolog of NCBI NO: 22748320 NR Description: Putative homocysteine S-methyltransferase-1
  misc_feature (1)..(326): Homolog of NCBI NO: 15230929 NR Description: homocysteine S-methyltransferase AtHMT-1

SEQ ID NO: 31254 - protein, 267 aa, Arabidopsis thaliana; identical to SEQ ID NO: 27664
  peptide (1)..(267): Ceres Seq. ID no. 12333726
  misc_feature (1)..(266): Pfam Name: Homocysteine S-methyltransferase Pfam Description: Homocysteine S-methyltransferase
  misc_feature (1)..(265): Homolog of NCBI NO: 10732791 NR Description: homocysteine S-methyltransferase-4 [Zea mays]
  misc_feature (1)..(266): Homolog of NCBI NO: 10732789 NR Description: homocysteine S-methyltransferase-3 [Zea mays]
  misc_feature (1)..(266): Homolog of NCBI NO: 10732787 NR Description: homocysteine S-methyltransferase-2 [Zea mays]
  misc_feature (1)..(267): Homolog of NCBI NO: 25453566 NR Description: homocysteine S-methyltransferase (EC 2.1.1.10)
  misc_feature (1)..(267): Homolog of NCBI NO: 15229396 NR Description: homocysteine S-methyltransferase AtHMT-2
  misc_feature (1)..(264): Homolog of NCBI NO: 21593147 NR Description: putative selenocysteine methyltransferase
  misc_feature (1)..(264): Homolog of NCBI NO: 18403505 NR Description: putative selenocysteine methyltransferase
  misc_feature (1)..(267): Homolog of NCBI NO: 10732785 NR Description: homocysteine S-methyltransferase-1 [Zea mays]
  misc_feature (1)..(265): Homolog of NCBI NO: 22748320 NR Description: Putative homocysteine S-methyltransferase-1
  misc_feature (1)..(267): Homolog of NCBI NO: 15230929 NR Description: homocysteine S-methyltransferase AtHMT-1

SEQ ID NO: 31255 - DNA, 827 bp, Arabidopsis thaliana; identical to SEQ ID NO: 27665
  misc_feature (1)..(827): Ceres Seq. ID no. 12370590
  misc_feature: MA Experiment ID: 20000173 Result: Down-regulated in Transcription
  misc_feature: MA Experiment 20000173 PARAMETER Experiment Name: At_42deg_Heat_P Parameter: Age (day) Value: 14
  misc_feature: MA Experiment 20000173 PARAMETER Experiment Name: At_42deg_Heat_P Parameter: Organism Value: A. thaliana
  misc_feature: MA Experiment 20000173 PARAMETER Experiment Name: At_42deg_Heat_P Parameter: Plant Line Value: WS
  misc_feature: MA Experiment 20000173 PARAMETER Experiment Name: At_42deg_Heat_P Parameter: Temperature (deg C) Value: 42 vs. 22
  misc_feature: MA Experiment 20000173 PARAMETER Experiment Name: At_42deg_Heat_P Parameter: Timepoint (hr) Value: 6
  misc_feature: MA Experiment 20000173 PARAMETER Experiment Name: At_42deg_Heat_P Parameter: Tissue Value: Aerial
  misc_feature: MA Experiment ID: 20000184 Result: Up-regulated in Transcription
  misc_feature: MA Experiment 20000184 PARAMETER Experiment Name: At_Shoots__P Parameter: Age (day) Value: 7
  misc_feature: MA Experiment 20000184 PARAMETER Experiment Name: At_Shoots__P Parameter: Tissue Value: Shoots vs. Whole Plant
  misc_feature: MA Experiment ID: 20000265 Result: Down-regulated in Transcription
  misc_feature: MA Experiment 20000265 PARAMETER Experiment Name: At_Open_Flower_P Parameter: Age (day) Value: 21
  misc_feature: MA Experiment 20000265 PARAMETER Experiment Name: At_Open_Flower_P Parameter: Plant Line Value: WS
  misc_feature: MA Experiment 20000265 PARAMETER Experiment Name: At_Open_Flower_P Parameter: Tissue Value: Closed Flower vs. Whole Plant
  misc_feature: MA Experiment ID: 20000286 Result: Down-regulated in Transcription
  misc_feature: MA Experiment 20000286 PARAMETER Experiment Name: At_Open_Flower_P Parameter: Age (day) Value: 21
  misc_feature: MA Experiment 20000286 PARAMETER Experiment Name: At_Open_Flower_P Parameter: Plant Line Value: WS
  misc_feature: MA Experiment 20000286 PARAMETER Experiment Name: At_Open_Flower_P Parameter: Tissue Value: Half Open vs. Whole Plant
  misc_feature: MA Experiment ID: 20000439 Result: Down-regulated in Transcription
  misc_feature: MA Experiment 20000439 PARAMETER Experiment Name: At_Roots__P Parameter: Age (day) Value: 14 vs. 21
  misc_feature: MA Experiment 20000439 PARAMETER Experiment Name: At_Roots__P Parameter: Organism Value: A. thaliana
  misc_feature: MA Experiment 20000439 PARAMETER Experiment Name: At_Roots__P Parameter: Tissue Value: Roots vs. Whole Plant
  misc_feature: MA Experiment ID: 20000794 Result: Down-regulated in Transcription
  misc_feature: MA Experiment 20000794 PARAMETER Experiment Name: At_Petals_P Parameter: Age (day) Value: 23-25 days
  misc_feature: MA Experiment 20000794 PARAMETER Experiment Name: At_Petals_P Parameter: Plant Line Value: WS
  misc_feature: MA Experiment 20000794 PARAMETER Experiment Name: At_Petals_P Parameter: Tissue Value: Petals vs. Whole plant
  misc_feature: MA Experiment ID: 20001248 Result: Down-regulated in Transcription
  misc_feature: MA Experiment 20001248 PARAMETER Experiment Name: At_Far-red-induction_P Parameter: Age (day) Value: 7
  misc_feature: MA Experiment 20001248 PARAMETER Experiment Name: At_Far-red-induction_P Parameter: Light Value: Far-red vs. White
  misc_feature: MA Experiment 20001248 PARAMETER Experiment Name: At_Far-red-induction_P Parameter: Organism Value: A. thaliana
  misc_feature: MA Experiment 20001248 PARAMETER Experiment Name: At_Far-red-induction_P Parameter: Plant Line Value: Columbia
  misc_feature: MA Experiment 20001248 PARAMETER Experiment Name: At_Far-red-induction_P Parameter: Timepoint (hr) Value: 4
  misc_feature: MA Experiment 20001248 PARAMETER Experiment Name: At_Far-red-induction_P Parameter: Tissue Value: Whole Plant
  misc_feature: MA Experiment ID: 20001557 Result: Up-regulated in Transcription
  misc_feature: MA Experiment 20001557 PARAMETER Experiment Name: At_Drought_Soil_Dry_P Parameter: Age (day) Value: 27
  misc_feature: MA Experiment 20001557 PARAMETER Experiment Name: At_Drought_Soil_Dry_P Parameter: Organism Value: A. thaliana
  misc_feature: MA Experiment 20001557 PARAMETER Experiment Name: At_Drought_Soil_Dry_P Parameter: Plant Line Value: WS
  misc_feature: MA Experiment 20001557 PARAMETER Experiment Name: At_Drought_Soil_Dry_P Parameter: Post Timepoint (hr) Value: 3
  misc_feature: MA Experiment 20001557 PARAMETER Experiment Name: At_Drought_Soil_Dry_P Parameter: Post-Treatment Value: Re-Water vs. No Drought
  misc_feature: MA Experiment 20001557 PARAMETER Experiment Name: At_Drought_Soil_Dry_P Parameter: Timepoint (day) Value: 13
  misc_feature: MA Experiment 20001557 PARAMETER Experiment Name: At_Drought_Soil_Dry_P Parameter: Treatment Value: Drought vs. No Drought
  misc_feature: MA Experiment ID: 20001558 Result: Up-regulated in Transcription
  misc_feature: MA Experiment 20001558 PARAMETER Experiment Name: At_Drought_Soil_Dry_P Parameter: Age (day) Value: 27
  misc_feature: MA Experiment 20001558 PARAMETER Experiment Name: At_Drought_Soil_Dry_P Parameter: Organism Value: A. thaliana
  misc_feature: MA Experiment 20001558 PARAMETER Experiment Name: At_Drought_Soil_Dry_P Parameter: Plant Line Value: WS
  misc_feature: MA Experiment 20001558 PARAMETER Experiment Name: At_Drought_Soil_Dry_P Parameter: Post Timepoint (hr) Value: 6
  misc_feature: MA Experiment 20001558 PARAMETER Experiment Name: At_Drought_Soil_Dry_P Parameter: Post-Treatment Value: Re-Water vs. No Drought
  misc_feature: MA Experiment 20001558 PARAMETER Experiment Name: At_Drought_Soil_Dry_P Parameter: Timepoint (day) Value: 13
  misc_feature: MA Experiment 20001558 PARAMETER Experiment Name: At_Drought_Soil_Dry_P Parameter: Treatment Value: Drought vs. No Drought

SEQ ID NO: 31256 - protein, 225 aa, Arabidopsis thaliana; identical to SEQ ID NO: 27666
  peptide (1)..(225): Ceres Seq. ID no. 12370591
  misc_feature (59)..(202): Pfam Name: Chalcone and stilbene synthases, C-terminal domain Pfam Description: Chalcone and stilbene synthases, C-terminal
  misc_feature (1)..(224): Homolog of NCBI NO: 14495235 NR Description: beta-ketoacyl-CoA synthase [Brassica napus]
  misc_feature (1)..(224): Homolog of NCBI NO: 19919732 NR Description: 3-ketoacyl-CoA synthase [Brassica napus]
  misc_feature (1)..(224): Homolog of NCBI NO: 30424122 NR Description: beta-ketoacyl-CoA synthase FAE1.2 [Brassica
  misc_feature (1)..(224): Homolog of NCBI NO: 19919736 NR Description: 3-ketoacyl-CoA synthase [Brassica rapa]
  misc_feature (1)..(224): Homolog of NCBI NO: 30424120 NR Description: beta-ketoacyl-CoA synthase FAE1.1 [Brassica
  misc_feature (1)..(224): Homolog of NCBI NO: 19919734 NR Description: 3-ketoacyl-CoA synthase [Brassica oleracea]
  misc_feature (1)..(223): Homolog of NCBI NO: 32172502 NR Description: FAE1 [Marchantia polymorpha]
  misc_feature (1)..(224): Homolog of NCBI NO: 15236133 NR Description: putative ketoacyl-CoA synthase; protein id:
  misc_feature (1)..(225): Homolog of NCBI NO: 15223556 NR Description: very-long-chain fatty acid condensing enzyme
  misc_feature (1)..(225): Homolog of NCBI NO: 15226724 NR Description: putative beta-ketoacyl-CoA synthase; protein id:

SEQ ID NO: 31257 - protein, 160 aa, Arabidopsis thaliana; identical to SEQ ID NO: 27667
  peptide (1)..(160): Ceres Seq. ID no. 12370592
  misc_feature (1)..(137): Pfam Name: Chalcone and stilbene synthases, C-terminal domain Pfam Description: Chalcone and stilbene synthases, C-terminal
  misc_feature (1)..(159): Homolog of NCBI NO: 14495235 NR Description: beta-ketoacyl-CoA synthase [Brassica napus]
  misc_feature (1)..(159): Homolog of NCBI NO: 19919732 NR Description: 3-ketoacyl-CoA synthase [Brassica napus]
  misc_feature (1)..(159): Homolog of NCBI NO: 30424122 NR Description: beta-ketoacyl-CoA synthase FAE1.2 [Brassica
  misc_feature (1)..(159): Homolog of NCBI NO: 19919736 NR Description: 3-ketoacyl-CoA synthase [Brassica rapa]
  misc_feature (1)..(159): Homolog of NCBI NO: 30424120 NR Description: beta-ketoacyl-CoA synthase FAE1.1 [Brassica
  misc_feature (1)..(159): Homolog of NCBI NO: 19919734 NR Description: 3-ketoacyl-CoA synthase [Brassica oleracea]
  misc_feature (1)..(158): Homolog of NCBI NO: 32172502 NR Description: FAE1 [Marchantia polymorpha]
  misc_feature (1)..(159): Homolog of NCBI NO: 15236133 NR Description: putative ketoacyl-CoA synthase; protein id:
  misc_feature (1)..(160): Homolog of NCBI NO: 15223556 NR Description: very-long-chain fatty acid condensing enzyme
  misc_feature (1)..(160): Homolog of NCBI NO: 15226724 NR Description: putative beta-ketoacyl-CoA synthase; protein id:

SEQ ID NO: 31258 - protein, 131 aa, Arabidopsis thaliana; identical to SEQ ID NO: 27668
  peptide (1)..(131): Ceres Seq. ID no. 12370593
  misc_feature (1)..(108): Pfam Name: Chalcone and stilbene synthases, C-terminal domain Pfam Description: Chalcone and stilbene synthases, C-terminal
  misc_feature (1)..(130): Homolog of NCBI NO: 14495235 NR Description: beta-ketoacyl-CoA synthase [Brassica napus]
  misc_feature (1)..(130): Homolog of NCBI NO: 19919732 NR Description: 3-ketoacyl-CoA synthase [Brassica napus]
  misc_feature (1)..(130): Homolog of NCBI NO: 30424122 NR Description: beta-ketoacyl-CoA synthase FAE1.2 [Brassica
  misc_feature (1)..(130): Homolog of NCBI NO: 30424120 NR Description: beta-ketoacyl-CoA synthase FAE1.1 [Brassica
  misc_feature (1)..(130): Homolog of NCBI NO: 19919736 NR Description: 3-ketoacyl-CoA synthase [Brassica rapa]
  misc_feature (1)..(130): Homolog of NCBI NO: 19919734 NR Description: 3-ketoacyl-CoA synthase [Brassica oleracea]
  misc_feature (1)..(129): Homolog of NCBI NO: 32172502 NR Description: FAE1 [Marchantia polymorpha]
  misc_feature (1)..(130): Homolog of NCBI NO: 15236133 NR Description: putative ketoacyl-CoA synthase; protein id:
  misc_feature (1)..(131): Homolog of NCBI NO: 15223556 NR Description: very-long-chain fatty acid condensing enzyme
  misc_feature (1)..(131): Homolog of NCBI NO: 15226724 NR Description: putative beta-ketoacyl-CoA synthase; protein id:

SEQ ID NO: 31259 - DNA, 1117 bp, Arabidopsis thaliana; identical to SEQ ID NO: 27669
  misc_feature (1)..(1117): Ceres Seq. ID no. 12357628
  misc_feature: MA Experiment ID: 20000171 Result: Up-regulated in Transcription
  misc_feature: MA Experiment 20000171 PARAMETER Experiment Name: At_42deg_Heat_P Parameter: Age (day) Value: 14
  misc_feature: MA Experiment 20000171 PARAMETER Experiment Name: At_42deg_Heat_P Parameter: Organism Value: A. thaliana
  misc_feature: MA Experiment 20000171 PARAMETER Experiment Name: At_42deg_Heat_P Parameter: Plant Line Value: WS
  misc_feature: MA Experiment 20000171 PARAMETER Experiment Name: At_42deg_Heat_P Parameter: Temperature (deg C) Value: 42 vs. 22
  misc_feature: MA Experiment 20000171 PARAMETER Experiment Name: At_42deg_Heat_P Parameter: Timepoint (hr) Value: 1
  misc_feature: MA Experiment 20000171 PARAMETER Experiment Name: At_42deg_Heat_P Parameter: Tissue Value: Aerial
  misc_feature: MA Experiment ID: 20000173 Result: Up-regulated in Transcription
  misc_feature: MA Experiment 20000173 PARAMETER Experiment Name: At_42deg_Heat_P Parameter: Age (day) Value: 14
  misc_feature: MA Experiment 20000173 PARAMETER Experiment Name: At_42deg_Heat_P Parameter: Organism Value: A. thaliana
  misc_feature: MA Experiment 20000173 PARAMETER Experiment Name: At_42deg_Heat_P Parameter: Plant Line Value: WS
  misc_feature: MA Experiment 20000173 PARAMETER Experiment Name: At_42deg_Heat_P Parameter: Temperature (deg C) Value: 42 vs. 22
  misc_feature: MA Experiment 20000173 PARAMETER Experiment Name: At_42deg_Heat_P Parameter: Timepoint (hr) Value: 6
  misc_feature: MA Experiment 20000173 PARAMETER Experiment Name: At_42deg_Heat_P Parameter: Tissue Value: Aerial
  misc_feature: MA Experiment ID: 20001557 Result: Up-regulated in Transcription
  misc_feature: MA Experiment 20001557 PARAMETER Experiment Name: At_Drought_Soil_Dry_P Parameter: Age (day) Value: 27
  misc_feature: MA Experiment 20001557 PARAMETER Experiment Name: At_Drought_Soil_Dry_P Parameter: Organism Value: A. thaliana
  misc_feature: MA Experiment 20001557 PARAMETER Experiment Name: At_Drought_Soil_Dry_P Parameter: Plant Line Value: WS
  misc_feature: MA Experiment 20001557 PARAMETER Experiment Name: At_Drought_Soil_Dry_P Parameter: Post Timepoint (hr) Value: 3
  misc_feature: MA Experiment 20001557 PARAMETER Experiment Name: At_Drought_Soil_Dry_P Parameter: Post-Treatment Value: Re-Water vs. No Drought
  misc_feature: MA Experiment 20001557 PARAMETER Experiment Name: At_Drought_Soil_Dry_P Parameter: Timepoint (day) Value: 13
  misc_feature: MA Experiment 20001557 PARAMETER Experiment Name: At_Drought_Soil_Dry_P Parameter: Treatment Value: Drought vs. No Drought

SEQ ID NO: 31260 - protein, 260 aa, Arabidopsis thaliana; identical to SEQ ID NO: 27670
  peptide (1)..(260): Ceres Seq. ID no. 12357629
  misc_feature (64)..(230): Pfam Name: CcmE Pfam Description: CcmE
  misc_feature (213)..(240): Homolog of NCBI NO: 24461536 NR Description: putative cytochrome C-type biogenesis protein
  misc_feature (80)..(184): Homolog of NCBI NO: 24461536 NR Description: putative cytochrome C-type biogenesis protein
  misc_feature (213)..(251): Homolog of NCBI NO: 22965493 NR Description: hypothetical protein [Rhodospirillum rubrum]
  misc_feature (80)..(184): Homolog of NCBI NO: 22965493 NR Description: hypothetical protein [Rhodospirillum rubrum]
  misc_feature (210)..(253): Homolog of NCBI NO: 38637881 NR Description: cytochrome C-type biogenesis protein [Ralstonia
  misc_feature (80)..(200): Homolog of NCBI NO: 38637881 NR Description: cytochrome C-type biogenesis protein [Ralstonia
  misc_feature (210)..(240): Homolog of NCBI NO: 30248771 NR Description: CcmE/CycJ proteins [Nitrosomonas europaea ATCC
  misc_feature (80)..(193): Homolog of NCBI NO: 30248771 NR Description: CcmE/CycJ proteins [Nitrosomonas europaea ATCC
  misc_feature (10)..(260): Homolog of NCBI NO: 37536592 NR Description: putative cytochrome c-type biogenesis protein
  misc_feature (1)..(255): Homolog of NCBI NO: 15231037 NR Description: putative transmembrane protein G1p

SEQ ID NO: 31261 - protein, 182 aa, Arabidopsis thaliana; identical to SEQ ID NO: 27671
  peptide (1)..(182): Ceres Seq. ID no. 12357630
  misc_feature (1)..(152): Pfam Name: CcmE Pfam Description: CcmE
  misc_feature (135)..(162): Homolog of NCBI NO: 24461536 NR Description: putative cytochrome C-type biogenesis protein
  misc_feature (2)..(106): Homolog of NCBI NO: 24461536 NR Description: putative cytochrome C-type biogenesis protein
  misc_feature (135)..(173): Homolog of NCBI NO: 22965493 NR Description: hypothetical protein [Rhodospirillum rubrum]
  misc_feature (2)..(106): Homolog of NCBI NO: 22965493 NR Description: hypothetical protein [Rhodospirillum rubrum]
  misc_feature (132)..(175): Homolog of NCBI NO: 38637881 NR Description: cytochrome C-type biogenesis protein [Ralstonia
  misc_feature (2)..(122): Homolog of NCBI NO: 38637881 NR Description: cytochrome C-type biogenesis protein [Ralstonia
  misc_feature (132)..(162): Homolog of NCBI NO: 30248771 NR Description: CcmE/CycJ proteins [Nitrosomonas europaea ATCC
  misc_feature (2)..(115): Homolog of NCBI NO: 30248771 NR Description: CcmE/CycJ proteins [Nitrosomonas europaea ATCC
  misc_feature (1)..(182): Homolog of NCBI NO: 37536592 NR Description: putative cytochrome c-type biogenesis protein
  misc_feature (1)..(177): Homolog of NCBI NO: 15231037 NR Description: putative transmembrane protein G1p

SEQ ID NO: 31262 - protein, 142 aa, Arabidopsis thaliana; identical to SEQ ID NO: 27672
  peptide (1)..(142): Ceres Seq. ID no. 12357631
  misc_feature (1)..(112): Pfam Name: CcmE Pfam Description: CcmE
  misc_feature (95)..(122): Homolog of NCBI NO: 24461536 NR Description: putative cytochrome C-type biogenesis protein
  misc_feature (1)..(66): Homolog of NCBI NO: 24461536 NR Description: putative cytochrome C-type biogenesis protein
  misc_feature (95)..(133): Homolog of NCBI NO: 22965493 NR Description: hypothetical protein [Rhodospirillum rubrum]
  misc_feature (1)..(66): Homolog of NCBI NO: 22965493 NR Description: hypothetical protein [Rhodospirillum rubrum]
  misc_feature (92)..(135): Homolog of NCBI NO: 38637881 NR Description: cytochrome C-type biogenesis protein [Ralstonia
  misc_feature (1)..(82): Homolog of NCBI NO: 38637881 NR Description: cytochrome C-type biogenesis protein [Ralstonia
  misc_feature (92)..(122): Homolog of NCBI NO: 30248771 NR Description: CcmE/CycJ proteins [Nitrosomonas europaea ATCC
  misc_feature (1)..(75): Homolog of NCBI NO: 30248771 NR Description: CcmE/CycJ proteins [Nitrosomonas europaea ATCC
  misc_feature (1)..(142): Homolog of NCBI NO: 37536592 NR Description: putative cytochrome c-type biogenesis protein
  misc_feature (1)..(137): Homolog of NCBI NO: 15231037 NR Description: putative transmembrane protein G1p

SEQ ID NO: 31263 - DNA, 1272 bp, Arabidopsis thaliana; identical to SEQ ID NO: 27673
  misc_feature (1)..(1272): Ceres Seq. ID no. 12324965
  misc_feature: MA Experiment ID: 108434 Result: Down-regulated in Transcription
  misc_feature: MA Experiment 108434 PARAMETER Experiment Name: At_Root_Tips_cDNA_P Parameter: Tissue Value: Root Tips
  misc_feature: MA Experiment ID: 108462 Result: Up-regulated in Transcription
  misc_feature: MA Experiment 108462 PARAMETER Experiment Name: At_Germinating_Seeds_cDNA_P Parameter: Age (day) Value: 2 vs. 0
  misc_feature: MA Experiment 108462 PARAMETER Experiment Name: At_Germinating_Seeds_cDNA_P Parameter: Tissue Value: Germinating Seeds
  misc_feature: MA Experiment ID: 108463 Result: Up-regulated in Transcription
  misc_feature: MA Experiment 108463 PARAMETER Experiment Name: At_Germinating_Seeds_cDNA_P Parameter: Age (day) Value: 3 vs. 0
  misc_feature: MA Experiment 108463 PARAMETER Experiment Name: At_Germinating_Seeds_cDNA_P Parameter: Tissue Value: Germinating Seeds
  misc_feature: MA Experiment ID: 108464 Result: Up-regulated in Transcription
  misc_feature: MA Experiment 108464 PARAMETER Experiment Name: At_Germinating_Seeds_cDNA_P Parameter: Age (day) Value: 4 vs. 0
  misc_feature: MA Experiment 108464 PARAMETER Experiment Name: At_Germinating_Seeds_cDNA_P Parameter: Tissue Value: Germinating Seeds
  misc_feature: MA Experiment ID: 108573 Result: Up-regulated in Transcription
  misc_feature: MA Experiment 108573 PARAMETER Experiment Name: At_Drought_cDNA_P Parameter: Timepoint (hr) Value: 6
  misc_feature: MA Experiment 108573 PARAMETER Experiment Name: At_Drought_cDNA_P Parameter: Tissue Value: Aerial
  misc_feature: MA Experiment 108573 PARAMETER Experiment Name: At_Drought_cDNA_P Parameter: Treatment Value: Drought vs. No Drought
  misc_feature: MA Experiment ID: 108579 Result: Down-regulated in Transcription
  misc_feature: MA Experiment 108579 PARAMETER Experiment Name: At_4deg_Cold_cDNA_P Parameter: Temperature (deg C) Value: 4 vs. 22
  misc_feature: MA Experiment 108579 PARAMETER Experiment Name: At_4deg_Cold_cDNA_P Parameter: Timepoint (hr) Value: 6
  misc_feature: MA Experiment 108579 PARAMETER Experiment Name: At_4deg_Cold_cDNA_P Parameter: Tissue Value: Aerial
  misc_feature: MA Experiment ID: 108595 Result: Down-regulated in Transcription
  misc_feature: MA Experiment 108595 PARAMETER Experiment Name: At_Ler-pi_Ovule_cDNA_P Parameter: Plant Line Value: null
  misc_feature: MA Experiment ID: 20000214 Result: Down-regulated in Transcription
  misc_feature: MA Experiment 20000214 PARAMETER Experiment Name: At_4deg_Cold_P Parameter: Timepoint (hr) Value: 6
  misc_feature: MA Experiment ID: 20000224 Result: Down-regulated in Transcription
  misc_feature: MA Experiment ID: 20000234 Result: Down-regulated in Transcription
  misc_feature: MA Experiment 20000234 PARAMETER Experiment Name: At_Siliques_P Parameter: Age (day) Value: 21
  misc_feature: MA Experiment 20000234 PARAMETER Experiment Name: At_Siliques_P Parameter: Organism Value: A. thaliana
  misc_feature: MA Experiment 20000234 PARAMETER Experiment Name: At_Siliques_P Parameter: Plant Line Value: WS
  misc_feature: MA Experiment 20000234 PARAMETER Experiment Name: At_Siliques_P Parameter: Tissue Value: Less Than 5mm Siliques vs. Whole Plant
  misc_feature: MA Experiment ID: 20000264 Result: Down-regulated in Transcription
  misc_feature: MA Experiment 20000264 PARAMETER Experiment Name: At_Open_Flower_P Parameter: Age (day) Value: 21
  misc_feature: MA Experiment 20000264 PARAMETER Experiment Name: At_Open_Flower_P Parameter: Plant Line Value: WS
  misc_feature: MA Experiment 20000264 PARAMETER Experiment Name: At_Open_Flower_P Parameter: Tissue Value: Open Flower vs. Whole Plant
  misc_feature: MA Experiment ID: 20000265 Result: Down-regulated in Transcription
  misc_feature: MA Experiment 20000265 PARAMETER Experiment Name: At_Open_Flower_P Parameter: Age (day) Value: 21
  misc_feature: MA Experiment 20000265 PARAMETER Experiment Name: At_Open_Flower_P Parameter: Plant Line Value: WS
  misc_feature: MA Experiment 20000265 PARAMETER Experiment Name: At_Open_Flower_P Parameter: Tissue Value: Closed Flower vs. Whole Plant
  misc_feature: MA Experiment ID: 20000286 Result: Down-regulated in Transcription
  misc_feature: MA Experiment 20000286 PARAMETER Experiment Name: At_Open_Flower_P Parameter: Age (day) Value: 21
  misc_feature: MA Experiment 20000286 PARAMETER Experiment Name: At_Open_Flower_P Parameter: Plant Line Value: WS
  misc_feature: MA Experiment 20000286 PARAMETER Experiment Name: At_Open_Flower_P Parameter: Tissue Value: Half Open vs. Whole Plant
  misc_feature: MA Experiment ID: 20001557 Result: Down-regulated in Transcription
  misc_feature: MA Experiment 20001557 PARAMETER Experiment Name: At_Drought_Soil_Dry_P Parameter: Age (day) Value: 27
  misc_feature: MA Experiment 20001557 PARAMETER Experiment Name: At_Drought_Soil_Dry_P Parameter: Organism Value: A. thaliana
  misc_feature: MA Experiment 20001557 PARAMETER Experiment Name: At_Drought_Soil_Dry_P Parameter: Plant Line Value: WS
  misc_feature: MA Experiment 20001557 PARAMETER Experiment Name: At_Drought_Soil_Dry_P Parameter: Post Timepoint (hr) Value: 3
  misc_feature: MA Experiment 20001557 PARAMETER Experiment Name: At_Drought_Soil_Dry_P Parameter: Post-Treatment Value: Re-Water vs. No Drought
  misc_feature: MA Experiment 20001557 PARAMETER Experiment Name: At_Drought_Soil_Dry_P Parameter: Timepoint (day) Value: 13
  misc_feature: MA Experiment 20001557 PARAMETER Experiment Name: At_Drought_Soil_Dry_P Parameter: Treatment Value: Drought vs. No Drought
  misc_feature: MA Experiment ID: 20001559 Result: Down-regulated in Transcription
  misc_feature: MA Experiment 20001559 PARAMETER Experiment Name: At_Drought_Soil_Dry_P Parameter: Age (day) Value: 28
  misc_feature: MA Experiment 20001559 PARAMETER Experiment Name: At_Drought_Soil_Dry_P Parameter: Organism Value: A. thaliana
  misc_feature: MA Experiment 20001559 PARAMETER Experiment Name: At_Drought_Soil_Dry_P Parameter: Plant Line Value: WS
  misc_feature: MA Experiment 20001559 PARAMETER Experiment Name: At_Drought_Soil_Dry_P Parameter: Post Timepoint (hr) Value: 29
  misc_feature: MA Experiment 20001559 PARAMETER Experiment Name: At_Drought_Soil_Dry_P Parameter: Post-Treatment Value: Re-Water vs. No Drought
  misc_feature: MA Experiment 20001559 PARAMETER Experiment Name: At_Drought_Soil_Dry_P Parameter: Timepoint (day) Value: 14
  misc_feature: MA Experiment 20001559 PARAMETER Experiment Name: At_Drought_Soil_Dry_P Parameter: Treatment Value: Drought vs. No Drought
  misc_feature: MA Experiment ID: 20001560 Result: Down-regulated in Transcription
  misc_feature: MA Experiment 20001560 PARAMETER Experiment Name: At_Drought_Soil_Dry_P Parameter: Age (day) Value: 28
  misc_feature: MA Experiment 20001560 PARAMETER Experiment Name: At_Drought_Soil_Dry_P Parameter: Organism Value: A. thaliana
  misc_feature: MA Experiment 20001560 PARAMETER Experiment Name: At_Drought_Soil_Dry_P Parameter: Plant Line Value: WS
  misc_feature: MA Experiment 20001560 PARAMETER Experiment Name: At_Drought_Soil_Dry_P Parameter: Post Timepoint (hr) Value: None
  misc_feature: MA Experiment 20001560 PARAMETER Experiment Name: At_Drought_Soil_Dry_P Parameter: Post-Treatment Value: None
  misc_feature: MA Experiment 20001560 PARAMETER Experiment Name: At_Drought_Soil_Dry_P Parameter: Timepoint (day) Value: 14
  misc_feature: MA Experiment 20001560 PARAMETER Experiment Name: At_Drought_Soil_Dry_P Parameter: Treatment Value: Drought vs. No Drought

SEQ ID NO: 31264 - protein, 270 aa, Arabidopsis thaliana; identical to SEQ ID NO: 27674
  peptide (1)..(270): Ceres Seq. ID no. 12324966
  misc_feature (14)..(194): Pfam Name: Tetraspanin family Pfam Description: Tetraspanin family
  misc_feature (142)..(222): Homolog of NCBI NO: 25411991 NR Description: hypothetical protein At2g20740 [imported] -
  misc_feature (95)..(257): Homolog of NCBI NO: 32487399 NR Description: OSJNBb0017I01.13 [Oryza sativa (japonica
  misc_feature (6)..(268): Homolog of NCBI NO: 18398417 NR Description: expressed protein
  misc_feature (94)..(222): Homolog of NCBI NO: 30681117 NR Description: expressed protein [Arabidopsis thaliana]
  misc_feature (1)..(268): Homolog of NCBI NO: 15235419 NR Description: putative protein
  misc_feature (35)..(270): Homolog of NCBI NO: 25360978 NR Description: hypothetical protein At2g20230 [imported] -
  misc_feature (1)..(270): Homolog of NCBI NO: 18399283 NR Description: expressed protein

SEQ ID NO: 31265 - protein, 236 aa, Arabidopsis thaliana; identical to SEQ ID NO: 27675
  peptide (1)..(236): Ceres Seq. ID no. 12324967
  misc_feature (1)..(160): Pfam Name: Tetraspanin family Pfam Description: Tetraspanin family
  misc_feature (108)..(188): Homolog of NCBI NO: 25411991 NR Description: hypothetical protein At2g20740 [imported] -
  misc_feature (61)..(223): Homolog of NCBI NO: 32487399 NR Description: OSJNBb0017I01.13 [Oryza sativa (japonica
  misc_feature (1)..(234): Homolog of NCBI NO: 18398417 NR Description: expressed protein
  misc_feature (60)..(188): Homolog of NCBI NO: 30681117 NR Description: expressed protein [Arabidopsis thaliana]
  misc_feature (1)..(234): Homolog of NCBI NO: 15235419 NR Description: putative protein
  misc_feature (1)..(236): Homolog of NCBI NO: 25360978 NR Description: hypothetical protein At2g20230 [imported] -
  misc_feature (1)..(236): Homolog of NCBI NO: 18399283 NR Description: expressed protein

SEQ ID NO: 31266 - protein, 166 aa, Arabidopsis thaliana; identical to SEQ ID NO: 27676
  peptide (1)..(166): Ceres Seq. ID no. 12324968
  misc_feature (1)..(90): Pfam Name: Tetraspanin family Pfam Description: Tetraspanin family
  misc_feature (38)..(118): Homolog of NCBI NO: 25411991 NR Description: hypothetical protein At2g20740 [imported] -
  misc_feature (1)..(153): Homolog of NCBI NO: 32487399 NR Description: OSJNBb0017I01.13 [Oryza sativa (japonica
  misc_feature (1)..(164): Homolog of NCBI NO: 18398417 NR Description: expressed protein
  misc_feature (1)..(118): Homolog of NCBI NO: 30681117 NR Description: expressed protein [Arabidopsis thaliana]
  misc_feature (1)..(164): Homolog of NCBI NO: 15235419 NR Description: putative protein
  misc_feature (1)..(166): Homolog of NCBI NO: 25360978 NR Description: hypothetical protein At2g20230 [imported] -
  misc_feature (1)..(166): Homolog of NCBI NO: 18399283 NR Description: expressed protein

SEQ ID NO: 31267 - DNA, 742 bp, Arabidopsis thaliana; identical to SEQ ID NO: 27677
  misc_feature (1)..(742): Ceres Seq. ID no. 13621920
  misc_feature: MA Experiment ID: 108488 Result: Down-regulated in Transcription
  misc_feature: MA Experiment ID: 108573 Result: Down-regulated in Transcription
  misc_feature: MA Experiment 108573 PARAMETER Experiment Name: At_Drought_cDNA_P Parameter: Timepoint (hr) Value: 6
  misc_feature: MA Experiment 108573 PARAMETER Experiment Name: At_Drought_cDNA_P Parameter: Tissue Value: Aerial
  misc_feature: MA Experiment 108573 PARAMETER Experiment Name: At_Drought_cDNA_P Parameter: Treatment Value: Drought vs. No Drought
  misc_feature: MA Experiment ID: 108595 Result: Up-regulated in Transcription
  misc_feature: MA Experiment 108595 PARAMETER Experiment Name: At_Ler-pi_Ovule_cDNA_P Parameter: Plant Line Value: null
  misc_feature: MA Experiment ID: 20000069 Result: Up-regulated in Transcription
  misc_feature: MA Experiment 20000069 PARAMETER Experiment Name: At_100uM_ABA_Mutants_cDNA_P Parameter: Plant Line Value: CS23
  misc_feature: MA Experiment 20000069 PARAMETER Experiment Name: At_100uM_ABA_Mutants_cDNA_P Parameter: Timepoint (hr) Value: 6
  misc_feature: MA Experiment 20000069 PARAMETER Experiment Name: At_100uM_ABA_Mutants_cDNA_P Parameter: Tissue Value: Aerial
  misc_feature: MA Experiment 20000069 PARAMETER Experiment Name: At_100uM_ABA_Mutants_cDNA_P Parameter: Treatment Value: 100uM ABA vs. No Treatment
  misc_feature: MA Experiment ID: 20000070 Result: Up-regulated in Transcription
  misc_feature: MA Experiment 20000070 PARAMETER Experiment Name: At_100uM_ABA_Mutants_cDNA_P Parameter: Plant Line Value: CS24
  misc_feature: MA Experiment 20000070 PARAMETER Experiment Name: At_100uM_ABA_Mutants_cDNA_P Parameter: Timepoint (hr) Value: 6
  misc_feature: MA Experiment 20000070 PARAMETER Experiment Name: At_100uM_ABA_Mutants_cDNA_P Parameter: Tissue Value: Aerial
  misc_feature: MA Experiment 20000070 PARAMETER Experiment Name: At_100uM_ABA_Mutants_cDNA_P Parameter: Treatment Value: 100uM ABA vs. No Treatment
  misc_feature: MA Experiment ID: 20000071 Result: Up-regulated in Transcription
  misc_feature: MA Experiment 20000071 PARAMETER Experiment Name: At_100uM_ABA_Mutants_cDNA_P Parameter: Plant Line Value: CS8104
  misc_feature: MA Experiment 20000071 PARAMETER Experiment Name: At_100uM_ABA_Mutants_cDNA_P Parameter: Timepoint (hr) Value: 6
  misc_feature: MA Experiment 20000071 PARAMETER Experiment Name: At_100uM_ABA_Mutants_cDNA_P Parameter: Tissue Value: Aerial
  misc_feature: MA Experiment 20000071 PARAMETER Experiment Name: At_100uM_ABA_Mutants_cDNA_P Parameter: Treatment Value: 100uM ABA vs. No Treatment
  misc_feature: MA Experiment ID: 20000086 Result: Up-regulated in Transcription
  misc_feature: MA Experiment 20000086 PARAMETER Experiment Name: At_100uM_ABA_Mutants_cDNA_P Parameter: Plant Line Value: CS22
  misc_feature: MA Experiment 20000086 PARAMETER Experiment Name: At_100uM_ABA_Mutants_cDNA_P Parameter: Timepoint (hr) Value: 6
  misc_feature: MA Experiment 20000086 PARAMETER Experiment Name: At_100uM_ABA_Mutants_cDNA_P Parameter: Tissue Value: Aerial
  misc_feature: MA Experiment 20000086 PARAMETER Experiment Name: At_100uM_ABA_Mutants_cDNA_P Parameter: Treatment Value: 100uM ABA vs. No Treatment
  misc_feature: MA Experiment ID: 20000087 Result: Up-regulated in Transcription
  misc_feature: MA Experiment 20000087 PARAMETER Experiment Name: At_100uM_ABA_Mutants_cDNA_P Parameter: Plant Line Value: WS
  misc_feature: MA Experiment 20000087 PARAMETER Experiment Name: At_100uM_ABA_Mutants_cDNA_P Parameter: Timepoint (hr) Value: 6
  misc_feature: MA Experiment 20000087 PARAMETER Experiment Name: At_100uM_ABA_Mutants_cDNA_P Parameter: Tissue Value: Aerial
  misc_feature: MA Experiment 20000087 PARAMETER Experiment Name: At_100uM_ABA_Mutants_cDNA_P Parameter: Treatment Value: 100uM ABA vs. No Treatment
  misc_feature: MA Experiment ID: 20000088 Result: Up-regulated in Transcription
  misc_feature: MA Experiment 20000088 PARAMETER Experiment Name: At_100uM_ABA_Mutants_cDNA_P Parameter: Plant Line Value: Landsberg
  misc_feature: MA Experiment 20000088 PARAMETER Experiment Name: At_100uM_ABA_Mutants_cDNA_P Parameter: Timepoint (hr) Value: 6
  misc_feature: MA Experiment 20000088 PARAMETER Experiment Name: At_100uM_ABA_Mutants_cDNA_P Parameter: Tissue Value: Aerial
  misc_feature: MA Experiment 20000088 PARAMETER Experiment Name: At_100uM_ABA_Mutants_cDNA_P Parameter: Treatment Value: 100uM ABA vs. No Treatment
  misc_feature: MA Experiment ID: 20000089 Result: Up-regulated in Transcription
  misc_feature: MA Experiment ID: 20000090 Result: Up-regulated in Transcription
  misc_feature: MA Experiment ID: 20000117 Result: Up-regulated in Transcription
  misc_feature: MA Experiment 20000117 PARAMETER Experiment Name: At_100uM_ABA_Mutants_cDNA_P Parameter: Plant Line Value: Columbia
  misc_feature: MA Experiment 20000117 PARAMETER Experiment Name: At_100uM_ABA_Mutants_cDNA_P Parameter: Timepoint (hr) Value: 6
  misc_feature: MA Experiment 20000117 PARAMETER Experiment Name: At_100uM_ABA_Mutants_cDNA_P Parameter: Tissue Value: Aerial
  misc_feature: MA Experiment 20000117 PARAMETER Experiment Name: At_100uM_ABA_Mutants_cDNA_P Parameter: Treatment Value: 100uM ABA vs. No Treatment
  misc_feature: MA Experiment ID: 20000184 Result: Down-regulated in Transcription
  misc_feature: MA Experiment 20000184 PARAMETER Experiment Name: At_Shoots__P Parameter: Age (day) Value: 7
  misc_feature: MA Experiment 20000184 PARAMETER Experiment Name: At_Shoots__P Parameter: Tissue Value: Shoots vs. Whole Plant
  misc_feature: MA Experiment ID: 20000438 Result: Down-regulated in Transcription
  misc_feature: MA Experiment 20000438 PARAMETER Experiment Name: At_Shoots__P Parameter: Age (day) Value: 14
  misc_feature: MA Experiment 20000438 PARAMETER Experiment Name: At_Shoots__P Parameter: Tissue Value: Shoots vs. Whole Plant

SEQ ID NO: 31268 - protein, 149 aa, Arabidopsis thaliana; identical to SEQ ID NO: 27678
  peptide (1)..(149): Ceres Seq. ID no. 13621921
  misc_feature (12)..(40): Pfam Name: EF hand Pfam Description: EF hand
  misc_feature (1)..(149): Homolog of NCBI NO: 3121848 NR Description: CALMODULIN
  misc_feature (1)..(149): Homolog of NCBI NO: 30683369 NR Description: calmodulin [Arabidopsis thaliana]
  misc_feature (1)..(149): Homolog of NCBI NO: 1076793 NR Description: calmodulin cam2 - maize
  misc_feature (1)..(149): Homolog of NCBI NO: 34304715 NR Description: calmodulin 4 [Daucus carota]
  misc_feature (1)..(149): Homolog of NCBI NO: 15229784 NR Description: calmodulin [Arabidopsis thaliana]
  misc_feature (1)..(149): Homolog of NCBI NO: 20186 NR Description: calmodulin [Oryza sativa]
  misc_feature (1)..(149): Homolog of NCBI NO: 2809481 NR Description: calmodulin [Oryza sativa]
  misc_feature (1)..(149): Homolog of NCBI NO: 115515 NR Description: Calmodulin
  misc_feature (1)..(149): Homolog of NCBI NO: 479693 NR Description: calmodulin 4 - Arabidopsis thaliana
  misc_feature (1)..(149): Homolog of NCBI NO: 15219652 NR Description: calmodulin 4 [Arabidopsis thaliana]

SEQ ID NO: 31269 - protein, 113 aa, Arabidopsis thaliana; identical to SEQ ID NO: 27679
  peptide (1)..(113): Ceres Seq. ID no. 13621922
  misc_feature (1)..(113): Homolog of NCBI NO: 3121848 NR Description: CALMODULIN
  misc_feature (1)..(113): Homolog of NCBI NO: 30683369 NR Description: calmodulin [Arabidopsis thaliana]
  misc_feature (1)..(113): Homolog of NCBI NO: 1076793 NR Description: calmodulin cam2 - maize
  misc_feature (1)..(113): Homolog of NCBI NO: 34304715 NR Description: calmodulin 4 [Daucus carota]
  misc_feature (1)..(113): Homolog of NCBI NO: 15229784 NR Description: calmodulin [Arabidopsis thaliana]
  misc_feature (1)..(113): Homolog of NCBI NO: 20186 NR Description: calmodulin [Oryza sativa]
  misc_feature (1)..(113): Homolog of NCBI NO: 2809481 NR Description: calmodulin [Oryza sativa]
  misc_feature (1)..(113): Homolog of NCBI NO: 115515 NR Description: Calmodulin
  misc_feature (1)..(113): Homolog of NCBI NO: 479693 NR Description: calmodulin 4 - Arabidopsis thaliana
  misc_feature (1)..(113): Homolog of NCBI NO: 15219652 NR Description: calmodulin 4 [Arabidopsis thaliana]

SEQ ID NO: 31270 - protein, 98 aa, Arabidopsis thaliana; identical to SEQ ID NO: 27680
  peptide (1)..(98): Ceres Seq. ID no. 13621923
  misc_feature (1)..(98): Homolog of NCBI NO: 30683369 NR Description: calmodulin [Arabidopsis thaliana]
  misc_feature (1)..(98): Homolog of NCBI NO: 3121848 NR Description: CALMODULIN
  misc_feature (1)..(98): Homolog of NCBI NO: 1076793 NR Description: calmodulin cam2 - maize
  misc_feature (1)..(98): Homolog of NCBI NO: 34304715 NR Description: calmodulin 4 [Daucus carota]
  misc_feature (1)..(98): Homolog of NCBI NO: 15229784 NR Description: calmodulin [Arabidopsis thaliana]
  misc_feature (1)..(98): Homolog of NCBI NO: 20186 NR Description: calmodulin [Oryza sativa]
  misc_feature (1)..(98): Homolog of NCBI NO: 2809481 NR Description: calmodulin [Oryza sativa]
  misc_feature (1)..(98): Homolog of NCBI NO: 115515 NR Description: Calmodulin
  misc_feature (1)..(98): Homolog of NCBI NO: 479693 NR Description: calmodulin 4 - Arabidopsis thaliana
  misc_feature (1)..(98): Homolog of NCBI NO: 15219652 NR Description: calmodulin 4 [Arabidopsis thaliana]

SEQ ID NO: 31271 - DNA, 514 bp, Arabidopsis thaliana; identical to SEQ ID NO: 27681
  misc_feature (1)..(514): Ceres Seq. ID no. 12335955
  misc_feature: MA Experiment ID: 108434 Result: Down-regulated in Transcription
  misc_feature: MA Experiment 108434 PARAMETER Experiment Name: At_Root_Tips_cDNA_P Parameter: Tissue Value: Root Tips
  misc_feature: MA Experiment ID: 108462 Result: Up-regulated in Transcription
  misc_feature: MA Experiment 108462 PARAMETER Experiment Name: At_Germinating_Seeds_cDNA_P Parameter: Age (day) Value: 2 vs. 0
  misc_feature: MA Experiment 108462 PARAMETER Experiment Name: At_Germinating_Seeds_cDNA_P Parameter: Tissue Value: Germinating Seeds
  misc_feature: MA Experiment ID: 108464 Result: Up-regulated in Transcription
  misc_feature: MA Experiment 108464 PARAMETER Experiment Name: At_Germinating_Seeds_cDNA_P Parameter: Age (day) Value: 4 vs. 0
  misc_feature: MA Experiment 108464 PARAMETER Experiment Name: At_Germinating_Seeds_cDNA_P Parameter: Tissue Value: Germinating Seeds
  misc_feature: MA Experiment ID: 108579 Result: Up-regulated in Transcription
  misc_feature: MA Experiment 108579 PARAMETER Experiment Name: At_4deg_Cold_cDNA_P Parameter: Temperature (deg C) Value: 4 vs. 22
  misc_feature: MA Experiment 108579 PARAMETER Experiment Name: At_4deg_Cold_cDNA_P Parameter: Timepoint (hr) Value: 6
  misc_feature: MA Experiment 108579 PARAMETER Experiment Name: At_4deg_Cold_cDNA_P Parameter: Tissue Value: Aerial
  misc_feature: MA Experiment ID: 108594 Result: Down-regulated in Transcription
  misc_feature: MA Experiment 108594 PARAMETER Experiment Name: At_Ler-rhl_Root_cDNA_P Parameter: Plant Line Value: null
  misc_feature: MA Experiment ID: 108595 Result: Up-regulated in Transcription
  misc_feature: MA Experiment 108595 PARAMETER Experiment Name: At_Ler-pi_Ovule_cDNA_P Parameter: Plant Line Value: null
  misc_feature: MA Experiment ID: 20000069 Result: Up-regulated in Transcription
  misc_feature: MA Experiment 20000069 PARAMETER Experiment Name: At_100uM_ABA_Mutants_cDNA_P Parameter: Plant Line Value: CS23
  misc_feature: MA Experiment 20000069 PARAMETER Experiment Name: At_100uM_ABA_Mutants_cDNA_P Parameter: Timepoint (hr) Value: 6
  misc_feature: MA Experiment 20000069 PARAMETER Experiment Name: At_100uM_ABA_Mutants_cDNA_P Parameter: Tissue Value: Aerial
  misc_feature: MA Experiment 20000069 PARAMETER Experiment Name: At_100uM_ABA_Mutants_cDNA_P Parameter: Treatment Value: 100uM ABA vs. No Treatment
  misc_feature: MA Experiment ID: 20000070 Result: Up-regulated in Transcription
  misc_feature: MA Experiment 20000070 PARAMETER Experiment Name: At_100uM_ABA_Mutants_cDNA_P Parameter: Plant Line Value: CS24
  misc_feature: MA Experiment 20000070 PARAMETER Experiment Name: At_100uM_ABA_Mutants_cDNA_P Parameter: Timepoint (hr) Value: 6
  misc_feature: MA Experiment 20000070 PARAMETER Experiment Name: At_100uM_ABA_Mutants_cDNA_P Parameter: Tissue Value: Aerial
  misc_feature: MA Experiment 20000070 PARAMETER Experiment Name: At_100uM_ABA_Mutants_cDNA_P Parameter: Treatment Value: 100uM ABA vs. No Treatment
  misc_feature: MA Experiment ID: 20000072 Result: Up-regulated in Transcription
  misc_feature: MA Experiment 20000072 PARAMETER Experiment Name: At_100uM_ABA_Mutants_cDNA_P Parameter: Plant Line Value: CS8105
  misc_feature: MA Experiment 20000072 PARAMETER Experiment Name: At_100uM_ABA_Mutants_cDNA_P Parameter: Timepoint (hr) Value: 6
  misc_feature: MA Experiment 20000072 PARAMETER Experiment Name: At_100uM_ABA_Mutants_cDNA_P Parameter: Tissue Value: Aerial
  misc_feature: MA Experiment 20000072 PARAMETER Experiment Name: At_100uM_ABA_Mutants_cDNA_P Parameter: Treatment Value: 100uM ABA vs. No Treatment
  misc_feature: MA Experiment ID: 20000086 Result: Up-regulated in Transcription
  misc_feature: MA Experiment 20000086 PARAMETER Experiment Name: At_100uM_ABA_Mutants_cDNA_P Parameter: Plant Line Value: CS22
  misc_feature: MA Experiment 20000086 PARAMETER Experiment Name: At_100uM_ABA_Mutants_cDNA_P Parameter: Timepoint (hr) Value: 6
  misc_feature: MA Experiment 20000086 PARAMETER Experiment Name: At_100uM_ABA_Mutants_cDNA_P Parameter: Tissue Value: Aerial
  misc_feature: MA Experiment 20000086 PARAMETER Experiment Name: At_100uM_ABA_Mutants_cDNA_P Parameter: Treatment Value: 100uM ABA vs. No Treatment
  misc_feature: MA Experiment ID: 20000087 Result: Up-regulated in Transcription
  misc_feature: MA Experiment 20000087 PARAMETER Experiment Name: At_100uM_ABA_Mutants_cDNA_P Parameter: Plant Line Value: WS
  misc_feature: MA Experiment 20000087 PARAMETER Experiment Name: At_100uM_ABA_Mutants_cDNA_P Parameter: Timepoint (hr) Value: 6
  misc_feature: MA Experiment 20000087 PARAMETER Experiment Name: At_100uM_ABA_Mutants_cDNA_P Parameter: Tissue Value: Aerial
  misc_feature: MA Experiment 20000087 PARAMETER Experiment Name: At_100uM_ABA_Mutants_cDNA_P Parameter: Treatment Value: 100uM ABA vs. No Treatment
  misc_feature: MA Experiment ID: 20000088 Result: Up-regulated in Transcription
  misc_feature: MA Experiment 20000088 PARAMETER Experiment Name: At_100uM_ABA_Mutants_cDNA_P Parameter: Plant Line Value: Landsberg
  misc_feature: MA Experiment 20000088 PARAMETER Experiment Name: At_100uM_ABA_Mutants_cDNA_P Parameter: Timepoint (hr) Value: 6
  misc_feature: MA Experiment 20000088 PARAMETER Experiment Name: At_100uM_ABA_Mutants_cDNA_P Parameter: Tissue Value: Aerial
  misc_feature: MA Experiment 20000088 PARAMETER Experiment Name: At_100uM_ABA_Mutants_cDNA_P Parameter: Treatment Value: 100uM ABA vs. No Treatment
  misc_feature: MA Experiment ID: 20000089 Result: Up-regulated in Transcription
  misc_feature: MA Experiment ID: 20000090 Result: Up-regulated in Transcription
  misc_feature: MA Experiment ID: 20000111 Result: Down-regulated in Transcription
  misc_feature: MA Experiment 20000111 PARAMETER Experiment Name: At_42deg_Heat_cDNA_P Parameter: Temperature (deg C) Value: 42 vs. 22
  misc_feature: MA Experiment 20000111 PARAMETER Experiment Name: At_42deg_Heat_cDNA_P Parameter: Timepoint (hr) Value: 6
  misc_feature: MA Experiment 20000111 PARAMETER Experiment Name: At_42deg_Heat_cDNA_P Parameter: Tissue Value: Aerial
  misc_feature: MA Experiment ID: 20000117 Result: Up-regulated in Transcription
  misc_feature: MA Experiment 20000117 PARAMETER Experiment Name: At_100uM_ABA_Mutants_cDNA_P Parameter: Plant Line Value: Columbia
  misc_feature: MA Experiment 20000117 PARAMETER Experiment Name: At_100uM_ABA_Mutants_cDNA_P Parameter: Timepoint (hr) Value: 6
  misc_feature: MA Experiment 20000117 PARAMETER Experiment Name: At_100uM_ABA_Mutants_cDNA_P Parameter: Tissue Value: Aerial
  misc_feature: MA Experiment 20000117 PARAMETER Experiment Name: At_100uM_ABA_Mutants_cDNA_P Parameter: Treatment Value: 100uM ABA vs. No Treatment
  misc_feature: MA Experiment ID: 20000179 Result: Up-regulated in Transcription
  misc_feature: MA Experiment 20000179 PARAMETER Experiment Name: At_Germinating_Seeds_P Parameter: Age (hr) Value: 6 vs. 0
  misc_feature: MA Experiment 20000179 PARAMETER Experiment Name: At_Germinating_Seeds_P Parameter: Tissue Value: Germinating Seeds
  misc_feature: MA Experiment ID: 20000227 Result: Down-regulated in Transcription
  misc_feature: MA Experiment 20000227 PARAMETER Experiment Name: At_Root-Tips-vs-Tops_P Parameter: Tissue Value: Root Tips vs. Root Tops
  misc_feature: MA Experiment ID: 20000265 Result: Up-regulated in Transcription
  misc_feature: MA Experiment 20000265 PARAMETER Experiment Name: At_Open_Flower_P Parameter: Age (day) Value: 21
  misc_feature: MA Experiment 20000265 PARAMETER Experiment Name: At_Open_Flower_P Parameter: Plant Line Value: WS
  misc_feature: MA Experiment 20000265 PARAMETER Experiment Name: At_Open_Flower_P Parameter: Tissue Value: Closed Flower vs. Whole Plant
  misc_feature: MA Experiment ID: 20000286 Result: Up-regulated in Transcription
  misc_feature: MA Experiment 20000286 PARAMETER Experiment Name: At_Open_Flower_P Parameter: Age (day) Value: 21
  misc_feature: MA Experiment 20000286 PARAMETER Experiment Name: At_Open_Flower_P Parameter: Plant Line Value: WS
  misc_feature: MA Experiment 20000286 PARAMETER Experiment Name: At_Open_Flower_P Parameter: Tissue Value: Half Open vs. Whole Plant
  misc_feature: MA Experiment ID: 20001248 Result: Up-regulated in Transcription
  misc_feature: MA Experiment 20001248 PARAMETER Experiment Name: At_Far-red-induction_P Parameter: Age (day) Value: 7
  misc_feature: MA Experiment 20001248 PARAMETER Experiment Name: At_Far-red-induction_P Parameter: Light Value: Far-red vs. White
  misc_feature: MA Experiment 20001248 PARAMETER Experiment Name: At_Far-red-induction_P Parameter: Organism Value: A. thaliana
  misc_feature: MA Experiment 20001248 PARAMETER Experiment Name: At_Far-red-induction_P Parameter: Plant Line Value: Columbia
  misc_feature: MA Experiment 20001248 PARAMETER Experiment Name: At_Far-red-induction_P Parameter: Timepoint (hr) Value: 4
  misc_feature: MA Experiment 20001248 PARAMETER Experiment Name: At_Far-red-induction_P Parameter: Tissue Value: Whole Plant
  misc_feature: MA Experiment ID: 20001560 Result: Up-regulated in Transcription
  misc_feature: MA Experiment 20001560 PARAMETER Experiment Name: At_Drought_Soil_Dry_P Parameter: Age (day) Value: 28
  misc_feature: MA Experiment 20001560 PARAMETER Experiment Name: At_Drought_Soil_Dry_P Parameter: Organism Value: A. thaliana
  misc_feature: MA Experiment 20001560 PARAMETER Experiment Name: At_Drought_Soil_Dry_P Parameter: Plant Line Value: WS
  misc_feature: MA Experiment 20001560 PARAMETER Experiment Name: At_Drought_Soil_Dry_P Parameter: Post Timepoint (hr) Value: None
  misc_feature: MA Experiment 20001560 PARAMETER Experiment Name: At_Drought_Soil_Dry_P Parameter: Post-Treatment Value: None
  misc_feature: MA Experiment 20001560 PARAMETER Experiment Name: At_Drought_Soil_Dry_P Parameter: Timepoint (day) Value: 14
  misc_feature: MA Experiment 20001560 PARAMETER Experiment Name: At_Drought_Soil_Dry_P Parameter: Treatment Value: Drought vs. No Drought
  misc_feature: MA Experiment ID: 20001908 Result: Up-regulated in Transcription
  misc_feature: MA Experiment 20001908 PARAMETER Experiment Name: At_Drought_Reproduction_P Parameter: Age (day) Value: 40
  misc_feature: MA Experiment 20001908 PARAMETER Experiment Name: At_Drought_Reproduction_P Parameter: Organism Value: A. thaliana
  misc_feature: MA Experiment 20001908 PARAMETER Experiment Name: At_Drought_Reproduction_P Parameter: Plant Line Value: WS
  misc_feature: MA Experiment 20001908 PARAMETER Experiment Name: At_Drought_Reproduction_P Parameter: Timepoint (day) Value: 10
  misc_feature: MA Experiment 20001908 PARAMETER Experiment Name: At_Drought_Reproduction_P Parameter: Tissue Value: Siliques
  misc_feature: MA Experiment 20001908 PARAMETER Experiment Name: At_Drought_Reproduction_P Parameter: Treatment Value: Drought vs. No Drought

SEQ ID NO: 31272 - protein, 77 aa, Arabidopsis thaliana; identical to SEQ ID NO: 27682
  peptide (1)..(77): Ceres Seq. ID no. 12335956
  misc_feature (31)..(77): Pfam Name: Gamma-thionins family Pfam Description: Gamma-thionins family
  misc_feature (1)..(77): Homolog of NCBI NO: 22330359 NR Description: plant defensin protein, putative (PDF2.4)
  misc_feature (1)..(77): Homolog of NCBI NO: 3915102 NR Description: Gamma-thionin homolog PPT precursor
  misc_feature (1)..(77): Homolog of NCBI NO: 21553559 NR Description: protease inhibitor II [Arabidopsis thaliana]
  misc_feature (1)..(77): Homolog of NCBI NO: 16225423 NR Description: putative gamma-thionin [Castanea sativa]
  misc_feature (1)..(77): Homolog of NCBI NO: 11387188 NR Description: Flower-specific gamma-thionin precursor (Defensin
  misc_feature (1)..(77): Homolog of NCBI NO: 28624546 NR Description: defensin protein 1 [Prunus persica]
  misc_feature (1)..(77): Homolog of NCBI NO: 15226876 NR Description: plant defensin protein, putative (PDF2.1)
  misc_feature (1)..(77): Homolog of NCBI NO: 15226878 NR Description: plant defensin protein, putative (PDF2.3)
  misc_feature (1)..(77): Homolog of NCBI NO: 7488534 NR Description: proteinase inhibitor II - turnip
  misc_feature (1)..(77): Homolog of NCBI NO: 15226872 NR Description: plant defensin protein, putative (PDF2.2)

SEQ ID NO: 31273 - protein, 73 aa, Arabidopsis thaliana; identical to SEQ ID NO: 27683
  peptide (1)..(73): Ceres Seq. ID no. 12335957
  misc_feature (27)..(73): Pfam Name: Gamma-thionins family Pfam Description: Gamma-thionins family
  misc_feature (1)..(73): Homolog of NCBI NO: 22330359 NR Description: plant defensin protein, putative (PDF2.4)
  misc_feature (1)..(73): Homolog of NCBI NO: 3915102 NR Description: Gamma-thionin homolog PPT precursor
  misc_feature (1)..(73): Homolog of NCBI NO: 21553559 NR Description: protease inhibitor II [Arabidopsis thaliana]
  misc_feature (1)..(73): Homolog of NCBI NO: 16225423 NR Description: putative gamma-thionin [Castanea sativa]
  misc_feature (1)..(73): Homolog of NCBI NO: 11387188 NR Description: Flower-specific gamma-thionin precursor (Defensin
  misc_feature (1)..(73): Homolog of NCBI NO: 28624546 NR Description: defensin protein 1 [Prunus persica]
  misc_feature (1)..(73): Homolog of NCBI NO: 15226876 NR Description: plant defensin protein, putative (PDF2.1)
  misc_feature (1)..(73): Homolog of NCBI NO: 15226878 NR Description: plant defensin protein, putative (PDF2.3)
  misc_feature (1)..(73): Homolog of NCBI NO: 7488534 NR Description: proteinase inhibitor II - turnip
  misc_feature (1)..(73): Homolog of NCBI NO: 15226872 NR Description: plant defensin protein, putative (PDF2.2)

SEQ ID NO: 31274 - protein, 64 aa, Arabidopsis thaliana; identical to SEQ ID NO: 27684
  peptide (1)..(64): Ceres Seq. ID no. 12335958
  misc_feature (18)..(64): Pfam Name: Gamma-thionins family Pfam Description: Gamma-thionins family
  misc_feature (1)..(64): Homolog of NCBI NO: 22330359 NR Description: plant defensin protein, putative (PDF2.4)
  misc_feature (1)..(64): Homolog of NCBI NO: 3915102 NR Description: Gamma-thionin homolog PPT precursor
  misc_feature (1)..(64): Homolog of NCBI NO: 21553559 NR Description: protease inhibitor II [Arabidopsis thaliana]
  misc_feature (1)..(64): Homolog of NCBI NO: 16225423 NR Description: putative gamma-thionin [Castanea sativa]
  misc_feature (1)..(64): Homolog of NCBI NO: 11387188 NR Description: Flower-specific gamma-thionin precursor (Defensin
  misc_feature (1)..(64): Homolog of NCBI NO: 28624546 NR Description: defensin protein 1 [Prunus persica]
  misc_feature (1)..(64): Homolog of NCBI NO: 15226876 NR Description: plant defensin protein, putative (PDF2.1)
  misc_feature (1)..(64): Homolog of NCBI NO: 15226878 NR Description: plant defensin protein, putative (PDF2.3)
  misc_feature (1)..(64): Homolog of NCBI NO: 7488534 NR Description: proteinase inhibitor II - turnip
  misc_feature (1)..(64): Homolog of NCBI NO: 15226872 NR Description: plant defensin protein, putative (PDF2.2)

SEQ ID NO: 31275 - protein, 55 aa, Arabidopsis thaliana; identical to SEQ ID NO: 27685
  peptide (1)..(55): Ceres Seq. ID no. 12335959

SEQ ID NO: 31276 - DNA, 795 bp, Arabidopsis thaliana; identical to SEQ ID NO: 27686
  misc_feature (1)..(795): Ceres Seq. ID no. 12321153
  misc_feature: MA Experiment ID: 108561 Result: Down-regulated in Transcription
  misc_feature: MA Experiment 108561 PARAMETER Experiment Name: At_100uM_ABA_cDNA_P Parameter: Timepoint (hr) Value: 6
  misc_feature: MA Experiment 108561 PARAMETER Experiment Name: At_100uM_ABA_cDNA_P Parameter: Tissue Value: Aerial
  misc_feature: MA Experiment 108561 PARAMETER Experiment Name: At_100uM_ABA_cDNA_P Parameter: Treatment Value: 100uM ABA vs. No Treatment
  misc_feature: MA Experiment ID: 108573 Result: Down-regulated in Transcription
  misc_feature: MA Experiment 108573 PARAMETER Experiment Name: At_Drought_cDNA_P Parameter: Timepoint (hr) Value: 6
  misc_feature: MA Experiment 108573 PARAMETER Experiment Name: At_Drought_cDNA_P Parameter: Tissue Value: Aerial
  misc_feature: MA Experiment 108573 PARAMETER Experiment Name: At_Drought_cDNA_P Parameter: Treatment Value: Drought vs. No Drought
  misc_feature: MA Experiment ID: 20000087 Result: Up-regulated in Transcription
  misc_feature: MA Experiment 20000087 PARAMETER Experiment Name: At_100uM_ABA_Mutants_cDNA_P Parameter: Plant Line Value: WS
  misc_feature: MA Experiment 20000087 PARAMETER Experiment Name: At_100uM_ABA_Mutants_cDNA_P Parameter: Timepoint (hr) Value: 6
  misc_feature: MA Experiment 20000087 PARAMETER Experiment Name: At_100uM_ABA_Mutants_cDNA_P Parameter: Tissue Value: Aerial
  misc_feature: MA Experiment 20000087 PARAMETER Experiment Name: At_100uM_ABA_Mutants_cDNA_P Parameter: Treatment Value: 100uM ABA vs. No Treatment

SEQ ID NO: 31277 - protein, 182 aa, Arabidopsis thaliana; identical to SEQ ID NO: 27687
  peptide (1)..(182): Ceres Seq. ID no. 12321154
  misc_feature (45)..(73): Pfam Name: EF hand Pfam Description: EF hand
  misc_feature (34)..(182): Homolog of NCBI NO: 289525 NR Description: calmodulin
  misc_feature (34)..(182): Homolog of NCBI NO: 30688187 NR Description: calmodulin-6 (CAM6) [Arabidopsis thaliana]
  misc_feature (34)..(182): Homolog of NCBI NO: 3121849 NR Description: CALMODULIN
  misc_feature (34)..(182): Homolog of NCBI NO: 115515 NR Description: Calmodulin
  misc_feature (34)..(182): Homolog of NCBI NO: 34903134 NR Description: unnamed protein product [Oryza sativa (japonica
  misc_feature (34)..(182): Homolog of NCBI NO: 30683369 NR Description: calmodulin [Arabidopsis thaliana]
  misc_feature (34)..(182): Homolog of NCBI NO: 15225840 NR Description: calmodulin; protein id: At2g27030.1, supported by
  misc_feature (34)..(182): Homolog of NCBI NO: 3121848 NR Description: CALMODULIN
  misc_feature (34)..(182): Homolog of NCBI NO: 34304715 NR Description: calmodulin 4 [Daucus carota]
  misc_feature (34)..(182): Homolog of NCBI NO: 15229784 NR Description: calmodulin 7

SEQ ID NO: 31278 - protein, 149 aa, Arabidopsis thaliana; identical to SEQ ID NO: 27688
  peptide (1)..(149): Ceres Seq. ID no. 12321155
  misc_feature (12)..(40): Pfam Name: EF hand Pfam Description: EF hand
  misc_feature (1)..(149): Homolog of NCBI NO: 289525 NR Description: calmodulin
  misc_feature (1)..(149): Homolog of NCBI NO: 30688187 NR Description: calmodulin-6 (CAM6) [Arabidopsis thaliana]
  misc_feature (1)..(149): Homolog of NCBI NO: 3121849 NR Description: CALMODULIN
  misc_feature (1)..(149): Homolog of NCBI NO: 115515 NR Description: Calmodulin
  misc_feature (1)..(149): Homolog of NCBI NO: 34903134 NR Description: unnamed protein product [Oryza sativa (japonica
  misc_feature (1)..(149): Homolog of NCBI NO: 30683369 NR Description: calmodulin [Arabidopsis thaliana]
  misc_feature (1)..(149): Homolog of NCBI NO: 15225840 NR Description: calmodulin; protein id: At2g27030.1, supported by
  misc_feature (1)..(149): Homolog of NCBI NO: 3121848 NR Description: CALMODULIN
  misc_feature (1)..(149): Homolog of NCBI NO: 34304715 NR Description: calmodulin 4 [Daucus carota]
  misc_feature (1)..(149): Homolog of NCBI NO: 15229784 NR Description: calmodulin 7

SEQ ID NO: 31279 - protein, 113 aa, Arabidopsis thaliana; identical to SEQ ID NO: 27689
  peptide (1)..(113): Ceres Seq. ID no. 12321156
  misc_feature (1)..(113): Homolog of NCBI NO: 289525 NR Description: calmodulin
  misc_feature (1)..(113): Homolog of NCBI NO: 30688187 NR Description: calmodulin-6 (CAM6) [Arabidopsis thaliana]
  misc_feature (1)..(113): Homolog of NCBI NO: 3121849 NR Description: CALMODULIN
  misc_feature (1)..(113): Homolog of NCBI NO: 115515 NR Description: Calmodulin
  misc_feature (1)..(113): Homolog of NCBI NO: 34903134 NR Description: unnamed protein product [Oryza sativa (japonica
  misc_feature (1)..(113): Homolog of NCBI NO: 30683369 NR Description: calmodulin [Arabidopsis thaliana]
  misc_feature (1)..(113): Homolog of NCBI NO: 15225840 NR Description: calmodulin; protein id: At2g27030.1, supported by
  misc_feature (1)..(113): Homolog of NCBI NO: 3121848 NR Description: CALMODULIN
  misc_feature (1)..(113): Homolog of NCBI NO: 34304715 NR Description: calmodulin 4 [Daucus carota]
  misc_feature (1)..(113): Homolog of NCBI NO: 15229784 NR Description: calmodulin 7

SEQ ID NO: 31280 - DNA, 1298 bp, Arabidopsis thaliana; identical to SEQ ID NO: 27690
  misc_feature (1)..(1298): Ceres Seq. ID no. 12600704
  misc_feature: MA Experiment ID: 108434 Result: Up-regulated in Transcription
  misc_feature: MA Experiment 108434 PARAMETER Experiment Name: At_Root_Tips_cDNA_P Parameter: Tissue Value: Root Tips
  misc_feature: MA Experiment ID: 108462 Result: Down-regulated in Transcription
  misc_feature: MA Experiment 108462 PARAMETER Experiment Name: At_Germinating_Seeds_cDNA_P Parameter: Age (day) Value: 2 vs. 0
  misc_feature: MA Experiment 108462 PARAMETER Experiment Name: At_Germinating_Seeds_cDNA_P Parameter: Tissue Value: Germinating Seeds
  misc_feature: MA Experiment ID: 108463 Result: Down-regulated in Transcription
  misc_feature: MA Experiment 108463 PARAMETER Experiment Name: At_Germinating_Seeds_cDNA_P Parameter: Age (day) Value: 3 vs. 0
  misc_feature: MA Experiment 108463 PARAMETER Experiment Name: At_Germinating_Seeds_cDNA_P Parameter: Tissue Value: Germinating Seeds
  misc_feature: MA Experiment ID: 108464 Result: Down-regulated in Transcription
  misc_feature: MA Experiment 108464 PARAMETER Experiment Name: At_Germinating_Seeds_cDNA_P Parameter: Age (day) Value: 4 vs. 0
  misc_feature: MA Experiment 108464 PARAMETER Experiment Name: At_Germinating_Seeds_cDNA_P Parameter: Tissue Value: Germinating Seeds
  misc_feature: MA Experiment ID: 108573 Result: Up-regulated in Transcription
  misc_feature: MA Experiment 108573 PARAMETER Experiment Name: At_Drought_cDNA_P Parameter: Timepoint (hr) Value: 6
  misc_feature: MA Experiment 108573 PARAMETER Experiment Name: At_Drought_cDNA_P Parameter: Tissue Value: Aerial
  misc_feature: MA Experiment 108573 PARAMETER Experiment Name: At_Drought_cDNA_P Parameter: Treatment Value: Drought vs. No Drought
  misc_feature: MA Experiment ID: 108585 Result: Up-regulated in Transcription
  misc_feature: MA Experiment 108585 PARAMETER Experiment Name: At_5mM_NaNP_cDNA_P Parameter: Timepoint (hr) Value: 6
  misc_feature: MA Experiment 108585 PARAMETER Experiment Name: At_5mM_NaNP_cDNA_P Parameter: Tissue Value: Aerial
  misc_feature: MA Experiment 108585 PARAMETER Experiment Name: At_5mM_NaNP_cDNA_P Parameter: Treatment Value: null
  misc_feature: MA Experiment ID: 108595 Result: Down-regulated in Transcription
  misc_feature: MA Experiment 108595 PARAMETER Experiment Name: At_Ler-pi_Ovule_cDNA_P Parameter: Plant Line Value: null
  misc_feature: MA Experiment ID: 20000069 Result: Down-regulated in Transcription
  misc_feature: MA Experiment 20000069 PARAMETER Experiment Name: At_100uM_ABA_Mutants_cDNA_P Parameter: Plant Line Value: CS23
  misc_feature: MA Experiment 20000069 PARAMETER Experiment Name: At_100uM_ABA_Mutants_cDNA_P Parameter: Timepoint (hr) Value: 6
  misc_feature: MA Experiment 20000069 PARAMETER Experiment Name: At_100uM_ABA_Mutants_cDNA_P Parameter: Tissue Value: Aerial
  misc_feature: MA Experiment 20000069 PARAMETER Experiment Name: At_100uM_ABA_Mutants_cDNA_P Parameter: Treatment Value: 100uM ABA vs. No Treatment
  misc_feature: MA Experiment ID: 20000087 Result: Down-regulated in Transcription
  misc_feature: MA Experiment 20000087 PARAMETER Experiment Name: At_100uM_ABA_Mutants_cDNA_P Parameter: Plant Line Value: WS
  misc_feature: MA Experiment 20000087 PARAMETER Experiment Name: At_100uM_ABA_Mutants_cDNA_P Parameter: Timepoint (hr) Value: 6
  misc_feature: MA Experiment 20000087 PARAMETER Experiment Name: At_100uM_ABA_Mutants_cDNA_P Parameter: Tissue Value: Aerial
  misc_feature: MA Experiment 20000087 PARAMETER Experiment Name: At_100uM_ABA_Mutants_cDNA_P Parameter: Treatment Value: 100uM ABA vs. No Treatment
  misc_feature: MA Experiment ID: 20000184 Result: Up-regulated in Transcription
  misc_feature: MA Experiment 20000184 PARAMETER Experiment Name: At_Shoots__P Parameter: Age (day) Value: 7
  misc_feature: MA Experiment 20000184 PARAMETER Experiment Name: At_Shoots__P Parameter: Tissue Value: Shoots vs. Whole Plant
  misc_feature: MA Experiment ID: 20000437 Result: Down-regulated in Transcription
  misc_feature: MA Experiment 20000437 PARAMETER Experiment Name: At_Drought_P Parameter: Age (day) Value: 8
  misc_feature: MA Experiment 20000437 PARAMETER Experiment Name: At_Drought_P Parameter: Organism Value: A. thaliana
  misc_feature: MA Experiment 20000437 PARAMETER Experiment Name: At_Drought_P Parameter: Plant Line Value: WS
  misc_feature: MA Experiment 20000437 PARAMETER Experiment Name: At_Drought_P Parameter: Timepoint (hr) Value: 24
  misc_feature: MA Experiment 20000437 PARAMETER Experiment Name: At_Drought_P Parameter: Tissue Value: Whole Plant
  misc_feature: MA Experiment 20000437 PARAMETER Experiment Name: At_Drought_P Parameter: Treatment Value: Drought vs. No Drought
  misc_feature: MA Experiment ID: 20000794 Result: Down-regulated in Transcription
  misc_feature: MA Experiment 20000794 PARAMETER Experiment Name: At_Petals_P Parameter: Age (day) Value: 23-25 days
  misc_feature: MA Experiment 20000794 PARAMETER Experiment Name: At_Petals_P Parameter: Plant Line Value: WS
  misc_feature: MA Experiment 20000794 PARAMETER Experiment Name: At_Petals_P Parameter: Tissue Value: Petals vs. Whole plant
  misc_feature: MA Experiment ID: 20001558 Result: Up-regulated in Transcription
  misc_feature: MA Experiment 20001558 PARAMETER Experiment Name: At_Drought_Soil_Dry_P Parameter: Age (day) Value: 27
  misc_feature: MA Experiment 20001558 PARAMETER Experiment Name: At_Drought_Soil_Dry_P Parameter: Organism Value: A. thaliana
  misc_feature: MA Experiment 20001558 PARAMETER Experiment Name: At_Drought_Soil_Dry_P Parameter: Plant Line Value: WS
  misc_feature: MA Experiment 20001558 PARAMETER Experiment Name: At_Drought_Soil_Dry_P Parameter: Post Timepoint (hr) Value: 6
  misc_feature: MA Experiment 20001558 PARAMETER Experiment Name: At_Drought_Soil_Dry_P Parameter: Post-Treatment Value: Re-Water vs. No Drought
  misc_feature: MA Experiment 20001558 PARAMETER Experiment Name: At_Drought_Soil_Dry_P Parameter: Timepoint (day) Value: 13
  misc_feature: MA Experiment 20001558 PARAMETER Experiment Name: At_Drought_Soil_Dry_P Parameter: Treatment Value: Drought vs. No Drought
  misc_feature: MA Experiment ID: 20001757 Result: Up-regulated in Transcription
  misc_feature: MA Experiment 20001757 PARAMETER Experiment Name: At_50mM_NH4NO3_L-to-H_P Parameter: Timepoint (hr) Value: 6
  misc_feature: MA Experiment 20001757 PARAMETER Experiment Name: At_50mM_NH4NO3_L-to-H_P Parameter: Tissue Value: Leaf
  misc_feature: MA Experiment 20001757 PARAMETER Experiment Name: At_50mM_NH4NO3_L-to-H_P Parameter: Treatment Value: 50mM NH4NO3 vs 100mM Mannitol

SEQ ID NO: 31281 - protein, 327 aa, Arabidopsis thaliana; identical to SEQ ID NO: 27691
  peptide (1)..(327): Ceres Seq. ID no. 12600705
  misc_feature (1)..(327): Homolog of NCBI NO: 3023847 NR Description: GUANINE NUCLEOTIDE-BINDING PROTEIN BETA
  misc_feature (1)..(327): Homolog of NCBI NO: 21593440 NR Description: guanine nucleotide-binding protein, putative
  misc_feature (1)..(327): Homolog of NCBI NO: 15229589 NR Description: protein kinase C-receptor/G-protein, putative
  misc_feature (1)..(327): Homolog of NCBI NO: 15221916 NR Description: guanine nucleotide-binding protein, putative
  misc_feature (1)..(327): Homolog of NCBI NO: 3023857 NR Description: GUANINE NUCLEOTIDE-BINDING PROTEIN BETA
  misc_feature (1)..(327): Homolog of NCBI NO: 2289095 NR Description: WD-40 repeat protein [Arabidopsis thaliana]
  misc_feature (1)..(327): Homolog of NCBI NO: 15220941 NR Description: G-protein beta family
  misc_feature (1)..(327): Homolog of NCBI NO: 3023847 NR Description: GUANINE NUCLEOTIDE-BINDING PROTEIN BETA
  misc_feature (1)..(327): Homolog of NCBI NO: 21593440 NR Description: guanine nucleotide-binding protein, putative
  misc_feature (1)..(327): Homolog of NCBI NO: 15229589 NR Description: protein kinase C-receptor/G-protein, putative
  misc_feature (1)..(327): Homolog of NCBI NO: 15221916 NR Description: guanine nucleotide-binding protein, putative
  misc_feature (1)..(327): Homolog of NCBI NO: 3023857 NR Description: GUANINE NUCLEOTIDE-BINDING PROTEIN BETA
  misc_feature (1)..(327): Homolog of NCBI NO: 2289095 NR Description: WD-40 repeat protein [Arabidopsis thaliana]
  misc_feature (1)..(327): Homolog of NCBI NO: 15220941 NR Description: G-protein beta family

SEQ ID NO: 31282 - protein, 317 aa, Arabidopsis thaliana; identical to SEQ ID NO: 27692
  peptide (1)..(317): Ceres Seq. ID no. 12600706
  misc_feature (1)..(317): Homolog of NCBI NO: 3023847 NR Description: GUANINE NUCLEOTIDE-BINDING PROTEIN BETA
  misc_feature (1)..(317): Homolog of NCBI NO: 21593440 NR Description: guanine nucleotide-binding protein, putative
  misc_feature (1)..(317): Homolog of NCBI NO: 15229589 NR Description: protein kinase C-receptor/G-protein, putative
  misc_feature (1)..(317): Homolog of NCBI NO: 15221916 NR Description: guanine nucleotide-binding protein, putative
  misc_feature (1)..(317): Homolog of NCBI NO: 3023857 NR Description: GUANINE NUCLEOTIDE-BINDING PROTEIN BETA
  misc_feature (1)..(317): Homolog of NCBI NO: 2289095 NR Description: WD-40 repeat protein [Arabidopsis thaliana]
  misc_feature (1)..(317): Homolog of NCBI NO: 15220941 NR Description: G-protein beta family
  misc_feature (1)..(317): Homolog of NCBI NO: 3023847 NR Description: GUANINE NUCLEOTIDE-BINDING PROTEIN BETA
  misc_feature (1)..(317): Homolog of NCBI NO: 21593440 NR Description: guanine nucleotide-binding protein, putative
  misc_feature (1)..(317): Homolog of NCBI NO: 15229589 NR Description: protein kinase C-receptor/G-protein, putative
  misc_feature (1)..(317): Homolog of NCBI NO: 15221916 NR Description: guanine nucleotide-binding protein, putative
  misc_feature (1)..(317): Homolog of NCBI NO: 3023857 NR Description: GUANINE NUCLEOTIDE-BINDING PROTEIN BETA
  misc_feature (1)..(317): Homolog of NCBI NO: 2289095 NR Description: WD-40 repeat protein [Arabidopsis thaliana]
  misc_feature (1)..(317): Homolog of NCBI NO: 15220941 NR Description: G-protein beta family

SEQ ID NO: 31283 - protein, 311 aa, Arabidopsis thaliana; identical to SEQ ID NO: 27693
  peptide (1)..(311): Ceres Seq. ID no. 12600707
  misc_feature (1)..(311): Homolog of NCBI NO: 3023847 NR Description: GUANINE NUCLEOTIDE-BINDING PROTEIN BETA
  misc_feature (1)..(311): Homolog of NCBI NO: 21593440 NR Description: guanine nucleotide-binding protein, putative
  misc_feature (1)..(311): Homolog of NCBI NO: 15229589 NR Description: protein kinase C-receptor/G-protein, putative
  misc_feature (1)..(311): Homolog of NCBI NO: 15221916 NR Description: guanine nucleotide-binding protein, putative
  misc_feature (1)..(311): Homolog of NCBI NO: 3023857 NR Description: GUANINE NUCLEOTIDE-BINDING PROTEIN BETA
  misc_feature (1)..(311): Homolog of NCBI NO: 2289095 NR Description: WD-40 repeat protein [Arabidopsis thaliana]
  misc_feature (1)..(311): Homolog of NCBI NO: 15220941 NR Description: G-protein beta family
  misc_feature (1)..(311): Homolog of NCBI NO: 3023847 NR Description: GUANINE NUCLEOTIDE-BINDING PROTEIN BETA
  misc_feature (1)..(311): Homolog of NCBI NO: 21593440 NR Description: guanine nucleotide-binding protein, putative
  misc_feature (1)..(311): Homolog of NCBI NO: 15229589 NR Description: protein kinase C-receptor/G-protein, putative
  misc_feature (1)..(311): Homolog of NCBI NO: 15221916 NR Description: guanine nucleotide-binding protein, putative
  misc_feature (1)..(311): Homolog of NCBI NO: 3023857 NR Description: GUANINE NUCLEOTIDE-BINDING PROTEIN BETA
  misc_feature (1)..(311): Homolog of NCBI NO: 2289095 NR Description: WD-40 repeat protein [Arabidopsis thaliana]
  misc_feature (1)..(311): Homolog of NCBI NO: 15220941 NR Description: G-protein beta family

SEQ ID NO: 31284 - DNA, 982 bp, Arabidopsis thaliana; identical to SEQ ID NO: 27694
  misc_feature (1)..(982): Ceres Seq. ID no. 12738229
  misc_feature: MA Experiment ID: 108462 Result: Up-regulated in Transcription
  misc_feature: MA Experiment 108462 PARAMETER Experiment Name: At_Germinating_Seeds_cDNA_P Parameter: Age (day) Value: 2 vs. 0
  misc_feature: MA Experiment 108462 PARAMETER Experiment Name: At_Germinating_Seeds_cDNA_P Parameter: Tissue Value: Germinating Seeds
  misc_feature: MA Experiment ID: 108463 Result: Up-regulated in Transcription
  misc_feature: MA Experiment 108463 PARAMETER Experiment Name: At_Germinating_Seeds_cDNA_P Parameter: Age (day) Value: 3 vs. 0
  misc_feature: MA Experiment 108463 PARAMETER Experiment Name: At_Germinating_Seeds_cDNA_P Parameter: Tissue Value: Germinating Seeds
  misc_feature: MA Experiment ID: 108464 Result: Up-regulated in Transcription
  misc_feature: MA Experiment 108464 PARAMETER Experiment Name: At_Germinating_Seeds_cDNA_P Parameter: Age (day) Value: 4 vs. 0
  misc_feature: MA Experiment 108464 PARAMETER Experiment Name: At_Germinating_Seeds_cDNA_P Parameter: Tissue Value: Germinating Seeds
  misc_feature: MA Experiment ID: 108573 Result: Up-regulated in Transcription
  misc_feature: MA Experiment 108573 PARAMETER Experiment Name: At_Drought_cDNA_P Parameter: Timepoint (hr) Value: 6
  misc_feature: MA Experiment 108573 PARAMETER Experiment Name: At_Drought_cDNA_P Parameter: Tissue Value: Aerial
  misc_feature: MA Experiment 108573 PARAMETER Experiment Name: At_Drought_cDNA_P Parameter: Treatment Value: Drought vs. No Drought
  misc_feature: MA Experiment ID: 108595 Result: Down-regulated in Transcription
  misc_feature: MA Experiment 108595 PARAMETER Experiment Name: At_Ler-pi_Ovule_cDNA_P Parameter: Plant Line Value: null
  misc_feature: MA Experiment ID: 20000087 Result: Down-regulated in Transcription
  misc_feature: MA Experiment 20000087 PARAMETER Experiment Name: At_100uM_ABA_Mutants_cDNA_P Parameter: Plant Line Value: WS
  misc_feature: MA Experiment 20000087 PARAMETER Experiment Name: At_100uM_ABA_Mutants_cDNA_P Parameter: Timepoint (hr) Value: 6
  misc_feature: MA Experiment 20000087 PARAMETER Experiment Name: At_100uM_ABA_Mutants_cDNA_P Parameter: Tissue Value: Aerial
  misc_feature: MA Experiment 20000087 PARAMETER Experiment Name: At_100uM_ABA_Mutants_cDNA_P Parameter: Treatment Value: 100uM ABA vs. No Treatment
  misc_feature: MA Experiment ID: 20000090 Result: Down-regulated in Transcription
  misc_feature: MA Experiment ID: 20000224 Result: Down-regulated in Transcription
  misc_feature: MA Experiment ID: 20000234 Result: Down-regulated in Transcription
  misc_feature: MA Experiment 20000234 PARAMETER Experiment Name: At_Siliques_P Parameter: Age (day) Value: 21
  misc_feature: MA Experiment 20000234 PARAMETER Experiment Name: At_Siliques_P Parameter: Organism Value: A. thaliana
  misc_feature: MA Experiment 20000234 PARAMETER Experiment Name: At_Siliques_P Parameter: Plant Line Value: WS
  misc_feature: MA Experiment 20000234 PARAMETER Experiment Name: At_Siliques_P Parameter: Tissue Value: Less Than 5mm Siliques vs. Whole Plant
  misc_feature: MA Experiment ID: 20000495 Result: Down-regulated in Transcription
  misc_feature: MA Experiment 20000495 PARAMETER Experiment Name: At_Guard_Cells_P Parameter: Harvest Date Value: 8/2/2002
  misc_feature: MA Experiment 20000495 PARAMETER Experiment Name: At_Guard_Cells_P Parameter: Organism Value: A. thaliana
  misc_feature: MA Experiment 20000495 PARAMETER Experiment Name: At_Guard_Cells_P Parameter: Tissue Value: Guard Cells vs. Leaves
  misc_feature: MA Experiment ID: 20000794 Result: Down-regulated in Transcription
  misc_feature: MA Experiment 20000794 PARAMETER Experiment Name: At_Petals_P Parameter: Age (day) Value: 23-25 days
  misc_feature: MA Experiment 20000794 PARAMETER Experiment Name: At_Petals_P Parameter: Plant Line Value: WS
  misc_feature: MA Experiment 20000794 PARAMETER Experiment Name: At_Petals_P Parameter: Tissue Value: Petals vs. Whole plant
  misc_feature: MA Experiment ID: 20001247 Result: Up-regulated in Transcription
  misc_feature: MA Experiment 20001247 PARAMETER Experiment Name: At_Far-red-induction_P Parameter: Age (day) Value: 7
  misc_feature: MA Experiment 20001247 PARAMETER Experiment Name: At_Far-red-induction_P Parameter: Light Value: Far-red vs. White
  misc_feature: MA Experiment 20001247 PARAMETER Experiment Name: At_Far-red-induction_P Parameter: Organism Value: A. thaliana
  misc_feature: MA Experiment 20001247 PARAMETER Experiment Name: At_Far-red-induction_P Parameter: Plant Line Value: Columbia
  misc_feature: MA Experiment 20001247 PARAMETER Experiment Name: At_Far-red-induction_P Parameter: Timepoint (hr) Value: 1
  misc_feature: MA Experiment 20001247 PARAMETER Experiment Name: At_Far-red-induction_P Parameter: Tissue Value: Whole Plant

SEQ ID NO: 31285 - protein, 326 aa, Arabidopsis thaliana; identical to SEQ ID NO: 27695
  peptide (1)..(326): Ceres Seq. ID no. 12738230
  misc_feature (13)..(60): Pfam Name: B-box zinc finger Pfam Description: B-box zinc finger
  misc_feature (232)..(325): Homolog of NCBI NO: 15224620 NR Description: CONSTANS B-box zinc finger family protein
  misc_feature (14)..(198): Homolog of NCBI NO: 15224620 NR Description: CONSTANS B-box zinc finger family protein
  misc_feature (232)..(325): Homolog of NCBI NO: 21553854 NR Description: zinc finger protein constans-like 8 [Arabidopsis
  misc_feature (14)..(198): Homolog of NCBI NO: 21553854 NR Description: zinc finger protein constans-like 8 [Arabidopsis
  misc_feature (232)..(325): Homolog of NCBI NO: 7488604 NR Description: CONSTANS protein homolog COL1 - radish
  misc_feature (13)..(203): Homolog of NCBI NO: 7488604 NR Description: CONSTANS protein homolog COL1 - radish
  misc_feature (13)..(277): Homolog of NCBI NO: 4091806 NR Description: CONSTANS-like protein 2 [Malus x domestica]
  misc_feature (13)..(325): Homolog of NCBI NO: 4091804 NR Description: CONSTANS-like protein 1 [Malus x domestica]
  misc_feature (13)..(241): Homolog of NCBI NO: 15450659 NR Description: AT5g24930/F6A4_140 [Arabidopsis thaliana]
  misc_feature (1)..(325): Homolog of NCBI NO: 30689668 NR Description: CONSTANS B-box zinc finger family protein

SEQ ID NO: 31286 - protein, 314 aa, Arabidopsis thaliana; identical to SEQ ID NO: 27696
  peptide (1)..(314): Ceres Seq. ID no. 12738231
  misc_feature (1)..(48): Pfam Name: B-box zinc finger Pfam Description: B-box zinc finger
  misc_feature (220)..(313): Homolog of NCBI NO: 15224620 NR Description: CONSTANS B-box zinc finger family protein
  misc_feature (2)..(186): Homolog of NCBI NO: 15224620 NR Description: CONSTANS B-box zinc finger family protein
  misc_feature (220)..(313): Homolog of NCBI NO: 21553854 NR Description: zinc finger protein constans-like 8 [Arabidopsis
  misc_feature (2)..(186): Homolog of NCBI NO: 21553854 NR Description: zinc finger protein constans-like 8 [Arabidopsis
  misc_feature (220)..(313): Homolog of NCBI NO: 7488604 NR Description: CONSTANS protein homolog COL1 - radish
  misc_feature (1)..(191): Homolog of NCBI NO: 7488604 NR Description: CONSTANS protein homolog COL1 - radish
  misc_feature (1)..(265): Homolog of NCBI NO: 4091806 NR Description: CONSTANS-like protein 2 [Malus x domestica]
  misc_feature (1)..(313): Homolog of NCBI NO: 4091804 NR Description: CONSTANS-like protein 1 [Malus x domestica]
  misc_feature (1)..(229): Homolog of NCBI NO: 15450659 NR Description: AT5g24930/F6A4_140 [Arabidopsis thaliana]
  misc_feature (1)..(313): Homolog of NCBI NO: 30689668 NR Description: CONSTANS B-box zinc finger family protein

SEQ ID NO: 31287 - protein, 267 aa, Arabidopsis thaliana; identical to SEQ ID NO: 27697
  peptide (1)..(267): Ceres Seq. ID no. 12738232
  misc_feature (173)..(266): Homolog of NCBI NO: 15224620 NR Description: CONSTANS B-box zinc finger family protein
  misc_feature (1)..(139): Homolog of NCBI NO: 15224620 NR Description: CONSTANS B-box zinc finger family protein
  misc_feature (173)..(266): Homolog of NCBI NO: 21553854 NR Description: zinc finger protein constans-like 8 [Arabidopsis
  misc_feature (1)..(139): Homolog of NCBI NO: 21553854 NR Description: zinc finger protein constans-like 8 [Arabidopsis
  misc_feature (173)..(266): Homolog of NCBI NO: 7488604 NR Description: CONSTANS protein homolog COL1 - radish
  misc_feature (1)..(144): Homolog of NCBI NO: 7488604 NR Description: CONSTANS protein homolog COL1 - radish
  misc_feature (1)..(218): Homolog of NCBI NO: 4091806 NR Description: CONSTANS-like protein 2 [Malus x domestica]
  misc_feature (1)..(266): Homolog of NCBI NO: 4091804 NR Description: CONSTANS-like protein 1 [Malus x domestica]
  misc_feature (1)..(182): Homolog of NCBI NO: 15450659 NR Description: AT5g24930/F6A4_140 [Arabidopsis thaliana]
  misc_feature (1)..(266): Homolog of NCBI NO: 30689668 NR Description: CONSTANS B-box zinc finger family protein

SEQ ID NO: 31288 - DNA, 2020 bp, Arabidopsis thaliana; identical to SEQ ID NO: 27698
  misc_feature (1)..(2020): Ceres Seq. ID no. 12370951
  misc_feature: MA Experiment ID: 108474 Result: Up-regulated in Transcription
  misc_feature: MA Experiment 108474 PARAMETER Experiment Name: At_Drought_Flowers_cDNA_P Parameter: Timepoint (hr) Value: null
  misc_feature: MA Experiment 108474 PARAMETER Experiment Name: At_Drought_Flowers_cDNA_P Parameter: Treatment Value: Drought vs. No Drought
  misc_feature: MA Experiment ID: 108488 Result: Up-regulated in Transcription
  misc_feature: MA Experiment ID: 108576 Result: Down-regulated in Transcription
  misc_feature: MA Experiment 108576 PARAMETER Experiment Name: At_42deg_Heat_cDNA_P Parameter: Temperature (deg C) Value: 42 vs. 22
  misc_feature: MA Experiment 108576 PARAMETER Experiment Name: At_42deg_Heat_cDNA_P Parameter: Timepoint (hr) Value: 1
  misc_feature: MA Experiment 108576 PARAMETER Experiment Name: At_42deg_Heat_cDNA_P Parameter: Tissue Value: Aerial
  misc_feature: MA Experiment ID: 108577 Result: Down-regulated in Transcription
  misc_feature: MA Experiment 108577 PARAMETER Experiment Name: At_42deg_Heat_cDNA_P Parameter: Temperature (deg C) Value: 42 vs. 22
  misc_feature: MA Experiment 108577 PARAMETER Experiment Name: At_42deg_Heat_cDNA_P Parameter: Timepoint (hr) Value: 6
  misc_feature: MA Experiment 108577 PARAMETER Experiment Name: At_42deg_Heat_cDNA_P Parameter: Tissue Value: Aerial
  misc_feature: MA Experiment ID: 108668 Result: Down-regulated in Transcription
  misc_feature: MA Experiment 108668 PARAMETER Experiment Name: At_2mM_SA_cDNA_P Parameter: Plant Line Value: WS
  misc_feature: MA Experiment 108668 PARAMETER Experiment Name: At_2mM_SA_cDNA_P Parameter: Timepoint (hr) Value: 6
  misc_feature: MA Experiment 108668 PARAMETER Experiment Name: At_2mM_SA_cDNA_P Parameter: Treatment Value: 2mM SA vs. No Treatment
  misc_feature: MA Experiment ID: 20000072 Result: Down-regulated in Transcription
  misc_feature: MA Experiment 20000072 PARAMETER Experiment Name: At_100uM_ABA_Mutants_cDNA_P Parameter: Plant Line Value: CS8105
  misc_feature: MA Experiment 20000072 PARAMETER Experiment Name: At_100uM_ABA_Mutants_cDNA_P Parameter: Timepoint (hr) Value: 6
  misc_feature: MA Experiment 20000072 PARAMETER Experiment Name: At_100uM_ABA_Mutants_cDNA_P Parameter: Tissue Value: Aerial
  misc_feature: MA Experiment 20000072 PARAMETER Experiment Name: At_100uM_ABA_Mutants_cDNA_P Parameter: Treatment Value: 100uM ABA vs. No Treatment
  misc_feature: MA Experiment ID: 20000087 Result: Down-regulated in Transcription
  misc_feature: MA Experiment 20000087 PARAMETER Experiment Name: At_100uM_ABA_Mutants_cDNA_P Parameter: Plant Line Value: WS
  misc_feature: MA Experiment 20000087 PARAMETER Experiment Name: At_100uM_ABA_Mutants_cDNA_P Parameter: Timepoint (hr) Value: 6
  misc_feature: MA Experiment 20000087 PARAMETER Experiment Name: At_100uM_ABA_Mutants_cDNA_P Parameter: Tissue Value: Aerial
  misc_feature: MA Experiment 20000087 PARAMETER Experiment Name: At_100uM_ABA_Mutants_cDNA_P Parameter: Treatment Value: 100uM ABA vs. No Treatment
  misc_feature: MA Experiment ID: 20000113 Result: Down-regulated in Transcription
  misc_feature: MA Experiment 20000113 PARAMETER Experiment Name: At_42deg_Heat_cDNA_P Parameter: Temperature (deg C) Value: 42 vs. 22
  misc_feature: MA Experiment 20000113 PARAMETER Experiment Name: At_42deg_Heat_cDNA_P Parameter: Timepoint (hr) Value: 8
  misc_feature: MA Experiment 20000113 PARAMETER Experiment Name: At_42deg_Heat_cDNA_P Parameter: Tissue Value: Aerial
  misc_feature: MA Experiment ID: 20000173 Result: Down-regulated in Transcription
  misc_feature: MA Experiment 20000173 PARAMETER Experiment Name: At_42deg_Heat_P Parameter: Age (day) Value: 14
  misc_feature: MA Experiment 20000173 PARAMETER Experiment Name: At_42deg_Heat_P Parameter: Organism Value: A. thaliana
  misc_feature: MA Experiment 20000173 PARAMETER Experiment Name: At_42deg_Heat_P Parameter: Plant Line Value: WS
  misc_feature: MA Experiment 20000173 PARAMETER Experiment Name: At_42deg_Heat_P Parameter: Temperature (deg C) Value: 42 vs. 22
  misc_feature: MA Experiment 20000173 PARAMETER Experiment Name: At_42deg_Heat_P Parameter: Timepoint (hr) Value: 6
  misc_feature: MA Experiment 20000173 PARAMETER Experiment Name: At_42deg_Heat_P Parameter: Tissue Value: Aerial
  misc_feature: MA Experiment ID: 20000224 Result: Up-regulated in Transcription
  misc_feature: MA Experiment ID: 20000496 Result: Up-regulated in Transcription
  misc_feature: MA Experiment 20000496 PARAMETER Experiment Name: At_Guard_Cells_P Parameter: Harvest Date Value: 7/19/2002
  misc_feature: MA Experiment 20000496 PARAMETER Experiment Name: At_Guard_Cells_P Parameter: Organism Value: Canola
  misc_feature: MA Experiment 20000496 PARAMETER Experiment Name: At_Guard_Cells_P Parameter: Tissue Value: Guard Cells vs. Leaves
  misc_feature: MA Experiment ID: 20000573 Result: Down-regulated in Transcription
  misc_feature: MA Experiment 20000573 PARAMETER Experiment Name: At_100uM_ABA_Mutants__P Parameter: Organism Value: A. thaliana
  misc_feature: MA Experiment 20000573 PARAMETER Experiment Name: At_100uM_ABA_Mutants__P Parameter: Plant Line Value: CS22 vs. Ler wt
  misc_feature: MA Experiment 20000573 PARAMETER Experiment Name: At_100uM_ABA_Mutants__P Parameter: Timepoint (hr) Value: N/A
  misc_feature: MA Experiment 20000573 PARAMETER Experiment Name: At_100uM_ABA_Mutants__P Parameter: Tissue Value: Whole Plant
  misc_feature: MA Experiment 20000573 PARAMETER Experiment Name: At_100uM_ABA_Mutants__P Parameter: Treatment Value: None
  misc_feature: MA Experiment ID: 20001248 Result: Down-regulated in Transcription
  misc_feature: MA Experiment 20001248 PARAMETER Experiment Name: At_Far-red-induction_P Parameter: Age (day) Value: 7
  misc_feature: MA Experiment 20001248 PARAMETER Experiment Name: At_Far-red-induction_P Parameter: Light Value: Far-red vs. White
  misc_feature: MA Experiment 20001248 PARAMETER Experiment Name: At_Far-red-induction_P Parameter: Organism Value: A. thaliana
  misc_feature: MA Experiment 20001248 PARAMETER Experiment Name: At_Far-red-induction_P Parameter: Plant Line Value: Columbia
  misc_feature: MA Experiment 20001248 PARAMETER Experiment Name: At_Far-red-induction_P Parameter: Timepoint (hr) Value: 4
  misc_feature: MA Experiment 20001248 PARAMETER Experiment Name: At_Far-red-induction_P Parameter: Tissue Value: Whole Plant
  misc_feature: MA Experiment ID: 20001905 Result: Down-regulated in Transcription
  misc_feature: MA Experiment 20001905 PARAMETER Experiment Name: At_Drought_Reproduction_P Parameter: Age (day) Value: 40
  misc_feature: MA Experiment 20001905 PARAMETER Experiment Name: At_Drought_Reproduction_P Parameter: Organism Value: A. thaliana
  misc_feature: MA Experiment 20001905 PARAMETER Experiment Name: At_Drought_Reproduction_P Parameter: Plant Line Value: WS
  misc_feature: MA Experiment 20001905 PARAMETER Experiment Name: At_Drought_Reproduction_P Parameter: Timepoint (day) Value: 10
  misc_feature: MA Experiment 20001905 PARAMETER Experiment Name: At_Drought_Reproduction_P Parameter: Tissue Value: Rosettes
  misc_feature: MA Experiment 20001905 PARAMETER Experiment Name: At_Drought_Reproduction_P Parameter: Treatment Value: Drought vs. No Drought

SEQ ID NO: 31289 - protein, 509 aa, Arabidopsis thaliana; identical to SEQ ID NO: 27699
  peptide (1)..(509): Ceres Seq. ID no. 12370952
  misc_feature (299)..(355): Pfam Name: RNA recognition motif. (a.k.a. RRM, RBD, or RNP domain) Pfam Description: RNA recognition motif. (a.k.a. RRM, RBD, or RNP
  misc_feature (246)..(503): Homolog of NCBI NO: 33146675 NR Description: putative DAZ associated protein 1
  misc_feature (28)..(88): Homolog of NCBI NO: 15229435 NR Description: putative protein; protein id: At3g63450.1
  misc_feature (201)..(508): Homolog of NCBI NO: 15229435 NR Description: putative protein; protein id: At3g63450.1
  misc_feature (152)..(216): Homolog of NCBI NO: 38230504 NR Description: predicted protein [Populus alba x Populus tremula]
  misc_feature (462)..(501): Homolog of NCBI NO: 38230504 NR Description: predicted protein [Populus alba x Populus tremula]
  misc_feature (28)..(174): Homolog of NCBI NO: 38230504 NR Description: predicted protein [Populus alba x Populus tremula]
  misc_feature (203)..(451): Homolog of NCBI NO: 38230504 NR Description: predicted protein [Populus alba x Populus tremula]
  misc_feature (28)..(501): Homolog of NCBI NO: 19423979 NR Description: unknown protein [Arabidopsis thaliana]
  misc_feature (28)..(501): Homolog of NCBI NO: 15231090 NR Description: putative protein
  misc_feature (28)..(501): Homolog of NCBI NO: 21594547 NR Description: unknown [Arabidopsis thaliana]

SEQ ID NO: 31290 - protein, 482 aa, Arabidopsis thaliana; identical to SEQ ID NO: 27700
  peptide (1)..(482): Ceres Seq. ID no. 12370953
  misc_feature (272)..(328): Pfam Name: RNA recognition motif. (a.k.a. RRM, RBD, or RNP domain) Pfam Description: RNA recognition motif. (a.k.a. RRM, RBD, or RNP
  misc_feature (219)..(476): Homolog of NCBI NO: 33146675 NR Description: putative DAZ associated protein 1
  misc_feature (1)..(61): Homolog of NCBI NO: 15229435 NR Description: putative protein; protein id: At3g63450.1
  misc_feature (174)..(481): Homolog of NCBI NO: 15229435 NR Description: putative protein; protein id: At3g63450.1
  misc_feature (125)..(189): Homolog of NCBI NO: 38230504 NR Description: predicted protein [Populus alba x Populus tremula]
  misc_feature (435)..(474): Homolog of NCBI NO: 38230504 NR Description: predicted protein [Populus alba x Populus tremula]
  misc_feature (1)..(147): Homolog of NCBI NO: 38230504 NR Description: predicted protein [Populus alba x Populus tremula]
  misc_feature (176)..(424): Homolog of NCBI NO: 38230504 NR Description: predicted protein [Populus alba x Populus tremula]
  misc_feature (1)..(474): Homolog of NCBI NO: 19423979 NR Description: unknown protein [Arabidopsis thaliana]
  misc_feature (1)..(474): Homolog of NCBI NO: 15231090 NR Description: putative protein
  misc_feature (1)..(474): Homolog of NCBI NO: 21594547 NR Description: unknown [Arabidopsis thaliana]

SEQ ID NO: 31291 - protein, 457 aa, Arabidopsis thaliana; identical to SEQ ID NO: 27701
  peptide (1)..(457): Ceres Seq. ID no. 12370954
  misc_feature (247)..(303): Pfam Name: RNA recognition motif. (a.k.a. RRM, RBD, or RNP domain) Pfam Description: RNA recognition motif. (a.k.a. RRM, RBD, or RNP
  misc_feature (194)..(451): Homolog of NCBI NO: 33146675 NR Description: putative DAZ associated protein 1
  misc_feature (1)..(36): Homolog of NCBI NO: 15229435 NR Description: putative protein; protein id: At3g63450.1
  misc_feature (149)..(456): Homolog of NCBI NO: 15229435 NR Description: putative protein; protein id: At3g63450.1
  misc_feature (100)..(164): Homolog of NCBI NO: 38230504 NR Description: predicted protein [Populus alba x Populus tremula]
  misc_feature (410)..(449): Homolog of NCBI NO: 38230504 NR Description: predicted protein [Populus alba x Populus tremula]
  misc_feature (1)..(122): Homolog of NCBI NO: 38230504 NR Description: predicted protein [Populus alba x Populus tremula]
  misc_feature (151)..(399): Homolog of NCBI NO: 38230504 NR Description: predicted protein [Populus alba x Populus tremula]
  misc_feature (1)..(449): Homolog of NCBI NO: 19423979 NR Description: unknown protein [Arabidopsis thaliana]
  misc_feature (1)..(449): Homolog of NCBI NO: 15231090 NR Description: putative protein
  misc_feature (1)..(449): Homolog of NCBI NO: 21594547 NR Description: unknown [Arabidopsis thaliana]

SEQ ID NO: 31292 - DNA, 1033 bp, Arabidopsis thaliana; identical to SEQ ID NO: 27702
  misc_feature (1)..(1033): Ceres Seq. ID no. 12340116
  misc_feature: MA Experiment ID: 108434 Result: Up-regulated in Transcription
  misc_feature: MA Experiment 108434 PARAMETER Experiment Name: At_Root_Tips_cDNA_P Parameter: Tissue Value: Root Tips
  misc_feature: MA Experiment ID: 108488 Result: Up-regulated in Transcription
  misc_feature: MA Experiment ID: 108573 Result: Up-regulated in Transcription
  misc_feature: MA Experiment 108573 PARAMETER Experiment Name: At_Drought_cDNA_P Parameter: Timepoint (hr) Value: 6
  misc_feature: MA Experiment 108573 PARAMETER Experiment Name: At_Drought_cDNA_P Parameter: Tissue Value: Aerial
  misc_feature: MA Experiment 108573 PARAMETER Experiment Name: At_Drought_cDNA_P Parameter: Treatment Value: Drought vs. No Drought
  misc_feature: MA Experiment ID: 108577 Result: Up-regulated in Transcription
  misc_feature: MA Experiment 108577 PARAMETER Experiment Name: At_42deg_Heat_cDNA_P Parameter: Temperature (deg C) Value: 42 vs. 22
  misc_feature: MA Experiment 108577 PARAMETER Experiment Name: At_42deg_Heat_cDNA_P Parameter: Timepoint (hr) Value: 6
  misc_feature: MA Experiment 108577 PARAMETER Experiment Name: At_42deg_Heat_cDNA_P Parameter: Tissue Value: Aerial
  misc_feature: MA Experiment ID: 20000087 Result: Down-regulated in Transcription
  misc_feature: MA Experiment 20000087 PARAMETER Experiment Name: At_100uM_ABA_Mutants_cDNA_P Parameter: Plant Line Value: WS
  misc_feature: MA Experiment 20000087 PARAMETER Experiment Name: At_100uM_ABA_Mutants_cDNA_P Parameter: Timepoint (hr) Value: 6
  misc_feature: MA Experiment 20000087 PARAMETER Experiment Name: At_100uM_ABA_Mutants_cDNA_P Parameter: Tissue Value: Aerial
  misc_feature: MA Experiment 20000087 PARAMETER Experiment Name: At_100uM_ABA_Mutants_cDNA_P Parameter: Treatment Value: 100uM ABA vs. No Treatment
  misc_feature: MA Experiment ID: 20000090 Result: Down-regulated in Transcription
  misc_feature: MA Experiment ID: 20000093 Result: Up-regulated in Transcription
  misc_feature: MA Experiment 20000093 PARAMETER Experiment Name: At_42deg_Heat_cDNA_P Parameter: Temperature (deg C) Value: 42 vs. 22
  misc_feature: MA Experiment 20000093 PARAMETER Experiment Name: At_42deg_Heat_cDNA_P Parameter: Timepoint (hr) Value: 0.5
  misc_feature: MA Experiment 20000093 PARAMETER Experiment Name: At_42deg_Heat_cDNA_P Parameter: Tissue Value: Aerial
  misc_feature: MA Experiment ID: 20000112 Result: Up-regulated in Transcription
  misc_feature: MA Experiment 20000112 PARAMETER Experiment Name: At_42deg_Heat_cDNA_P Parameter: Temperature (deg C) Value: 42 vs. 22
  misc_feature: MA Experiment 20000112 PARAMETER Experiment Name: At_42deg_Heat_cDNA_P Parameter: Timepoint (hr) Value: 2
  misc_feature: MA Experiment 20000112 PARAMETER Experiment Name: At_42deg_Heat_cDNA_P Parameter: Tissue Value: Aerial
  misc_feature: MA Experiment ID: 20000113 Result: Up-regulated in Transcription
  misc_feature: MA Experiment 20000113 PARAMETER Experiment Name: At_42deg_Heat_cDNA_P Parameter: Temperature (deg C) Value: 42 vs. 22
  misc_feature: MA Experiment 20000113 PARAMETER Experiment Name: At_42deg_Heat_cDNA_P Parameter: Timepoint (hr) Value: 8
  misc_feature: MA Experiment 20000113 PARAMETER Experiment Name: At_42deg_Heat_cDNA_P Parameter: Tissue Value: Aerial
  misc_feature: MA Experiment ID: 20000144 Result: Up-regulated in Transcription
  misc_feature: MA Experiment 20000144 PARAMETER Experiment Name: At_42deg_Heat_cDNA_P Parameter: Temperature (deg C) Value: 42 vs. 22
  misc_feature: MA Experiment 20000144 PARAMETER Experiment Name: At_42deg_Heat_cDNA_P Parameter: Timepoint (hr) Value: 1
  misc_feature: MA Experiment 20000144 PARAMETER Experiment Name: At_42deg_Heat_cDNA_P Parameter: Tissue Value: Aerial
  misc_feature: MA Experiment ID: 20000173 Result: Up-regulated in Transcription
  misc_feature: MA Experiment 20000173 PARAMETER Experiment Name: At_42deg_Heat_P Parameter: Age (day) Value: 14
  misc_feature: MA Experiment 20000173 PARAMETER Experiment Name: At_42deg_Heat_P Parameter: Organism Value: A. thaliana
  misc_feature: MA Experiment 20000173 PARAMETER Experiment Name: At_42deg_Heat_P Parameter: Plant Line Value: WS
  misc_feature: MA Experiment 20000173 PARAMETER Experiment Name: At_42deg_Heat_P Parameter: Temperature (deg C) Value: 42 vs. 22
  misc_feature: MA Experiment 20000173 PARAMETER Experiment Name: At_42deg_Heat_P Parameter: Timepoint (hr) Value: 6
  misc_feature: MA Experiment 20000173 PARAMETER Experiment Name: At_42deg_Heat_P Parameter: Tissue Value: Aerial
  misc_feature: MA Experiment ID: 20000224 Result: Down-regulated in Transcription
  misc_feature: MA Experiment ID: 20000227 Result: Up-regulated in Transcription
  misc_feature: MA Experiment 20000227 PARAMETER Experiment Name: At_Root-Tips-vs-Tops_P Parameter: Tissue Value: Root Tips vs. Root Tops
  misc_feature: MA Experiment ID: 20000286 Result: Up-regulated in Transcription
  misc_feature: MA Experiment 20000286 PARAMETER Experiment Name: At_Open_Flower_P Parameter: Age (day) Value: 21
  misc_feature: MA Experiment 20000286 PARAMETER Experiment Name: At_Open_Flower_P Parameter: Plant Line Value: WS
  misc_feature: MA Experiment 20000286 PARAMETER Experiment Name: At_Open_Flower_P Parameter: Tissue Value: Half Open vs. Whole Plant
  misc_feature: MA Experiment ID: 20000437 Result: Down-regulated in Transcription
  misc_feature: MA Experiment 20000437 PARAMETER Experiment Name: At_Drought_P Parameter: Age (day) Value: 8
  misc_feature: MA Experiment 20000437 PARAMETER Experiment Name: At_Drought_P Parameter: Organism Value: A. thaliana
  misc_feature: MA Experiment 20000437 PARAMETER Experiment Name: At_Drought_P Parameter: Plant Line Value: WS
  misc_feature: MA Experiment 20000437 PARAMETER Experiment Name: At_Drought_P Parameter: Timepoint (hr) Value: 24
  misc_feature: MA Experiment 20000437 PARAMETER Experiment Name: At_Drought_P Parameter: Tissue Value: Whole Plant
  misc_feature: MA Experiment 20000437 PARAMETER Experiment Name: At_Drought_P Parameter: Treatment Value: Drought vs. No Drought
  misc_feature: MA Experiment ID: 20001451 Result: Up-regulated in Transcription
  misc_feature: MA Experiment 20001451 PARAMETER Experiment Name: At_Far-red-induction_P Parameter: Age (day) Value: 7
  misc_feature: MA Experiment 20001451 PARAMETER Experiment Name: At_Far-red-induction_P Parameter: Light Value: Far-red vs. White
  misc_feature: MA Experiment 20001451 PARAMETER Experiment Name: At_Far-red-induction_P Parameter: Organism Value: A. thaliana
  misc_feature: MA Experiment 20001451 PARAMETER Experiment Name: At_Far-red-induction_P Parameter: Plant Line Value: Columbia
  misc_feature: MA Experiment 20001451 PARAMETER Experiment Name: At_Far-red-induction_P Parameter: Timepoint (hr) Value: 24
  misc_feature: MA Experiment 20001451 PARAMETER Experiment Name: At_Far-red-induction_P Parameter: Tissue Value: Whole Plant
  misc_feature: MA Experiment ID: 20001555 Result: Down-regulated in Transcription
  misc_feature: MA Experiment 20001555 PARAMETER Experiment Name: At_Drought_Soil_Dry_P Parameter: Age (day) Value: 24
  misc_feature: MA Experiment 20001555 PARAMETER Experiment Name: At_Drought_Soil_Dry_P Parameter: Organism Value: A. thaliana
  misc_feature: MA Experiment 20001555 PARAMETER Experiment Name: At_Drought_Soil_Dry_P Parameter: Plant Line Value: WS
  misc_feature: MA Experiment 20001555 PARAMETER Experiment Name: At_Drought_Soil_Dry_P Parameter: Post Timepoint (hr) Value: None
  misc_feature: MA Experiment 20001555 PARAMETER Experiment Name: At_Drought_Soil_Dry_P Parameter: Post-Treatment Value: None
  misc_feature: MA Experiment 20001555 PARAMETER Experiment Name: At_Drought_Soil_Dry_P Parameter: Timepoint (day) Value: 10
  misc_feature: MA Experiment 20001555 PARAMETER Experiment Name: At_Drought_Soil_Dry_P Parameter: Treatment Value: Drought vs. No Drought
  misc_feature: MA Experiment ID: 20001556 Result: Down-regulated in Transcription
  misc_feature: MA Experiment 20001556 PARAMETER Experiment Name: At_Drought_Soil_Dry_P Parameter: Age (day) Value: 26
  misc_feature: MA Experiment 20001556 PARAMETER Experiment Name: At_Drought_Soil_Dry_P Parameter: Organism Value: A. thaliana
  misc_feature: MA Experiment 20001556 PARAMETER Experiment Name: At_Drought_Soil_Dry_P Parameter: Plant Line Value: WS
  misc_feature: MA Experiment 20001556 PARAMETER Experiment Name: At_Drought_Soil_Dry_P Parameter: Post Timepoint (hr) Value: None
  misc_feature: MA Experiment 20001556 PARAMETER Experiment Name: At_Drought_Soil_Dry_P Parameter: Post-Treatment Value: None
  misc_feature: MA Experiment 20001556 PARAMETER Experiment Name: At_Drought_Soil_Dry_P Parameter: Timepoint (day) Value: 12
  misc_feature: MA Experiment 20001556 PARAMETER Experiment Name: At_Drought_Soil_Dry_P Parameter: Treatment Value: Drought vs. No Drought
  misc_feature: MA Experiment ID: 20001558 Result: Up-regulated in Transcription
  misc_feature: MA Experiment 20001558 PARAMETER Experiment Name: At_Drought_Soil_Dry_P Parameter: Age (day) Value: 27
  misc_feature: MA Experiment 20001558 PARAMETER Experiment Name: At_Drought_Soil_Dry_P Parameter: Organism Value: A. thaliana
  misc_feature: MA Experiment 20001558 PARAMETER Experiment Name: At_Drought_Soil_Dry_P Parameter: Plant Line Value: WS
  misc_feature: MA Experiment 20001558 PARAMETER Experiment Name: At_Drought_Soil_Dry_P Parameter: Post Timepoint (hr) Value: 6
  misc_feature: MA Experiment 20001558 PARAMETER Experiment Name: At_Drought_Soil_Dry_P Parameter: Post-Treatment Value: Re-Water vs. No Drought
  misc_feature: MA Experiment 20001558 PARAMETER Experiment Name: At_Drought_Soil_Dry_P Parameter: Timepoint (day) Value: 13
  misc_feature: MA Experiment 20001558 PARAMETER Experiment Name: At_Drought_Soil_Dry_P Parameter: Treatment Value: Drought vs. No Drought
  misc_feature: MA Experiment ID: 20001757 Result: Up-regulated in Transcription
  misc_feature: MA Experiment 20001757 PARAMETER Experiment Name: At_50mM_NH4NO3_L-to-H_P Parameter: Timepoint (hr) Value: 6
  misc_feature: MA Experiment 20001757 PARAMETER Experiment Name: At_50mM_NH4NO3_L-to-H_P Parameter: Tissue Value: Leaf
  misc_feature: MA Experiment 20001757 PARAMETER Experiment Name: At_50mM_NH4NO3_L-to-H_P Parameter: Treatment Value: 50mM NH4NO3 vs 100mM Mannitol

SEQ ID NO: 31293 - protein, 280 aa, Arabidopsis thaliana; identical to SEQ ID NO: 24848
  peptide (1)..(280): Ceres Seq. ID no. 12340117
  misc_feature (1)..(280): Homolog of NCBI NO: 7441253 NR Description: probable aquaporin - spinach
  misc_feature (1)..(280): Homolog of NCBI NO: 7441276 NR Description: mipE protein - common ice plant
  misc_feature (1)..(280): Homolog of NCBI NO: 1168480 NR Description: AQUAPORIN
  misc_feature (1)..(280): Homolog of NCBI NO: 17940742 NR Description: aquaporin-like protein [Petunia x hybrida]
  misc_feature (1)..(280): Homolog of NCBI NO: 8071628 NR Description: putative aquaporin PIP2-2 [Vitis berlandieri x
  misc_feature (1)..(280): Homolog of NCBI NO: 15227302 NR Description: putative plasma membrane intrinsic protein
  misc_feature (1)..(280): Homolog of NCBI NO: 11119335 NR Description: aquaporin [Brassica oleracea]
  misc_feature (1)..(280): Homolog of NCBI NO: 2306917 NR Description: plasma membrane intrinsic protein [Arabidopsis
  misc_feature (1)..(280): Homolog of NCBI NO: 1688296 NR Description: plasma membrane intrinsic protein PIP3
  misc_feature (1)..(280): Homolog of NCBI NO: 15236267 NR Description: plasma membrane intrinsic protein (SIMIP)

SEQ ID NO: 31294 - protein, 253 aa, Arabidopsis thaliana; identical to SEQ ID NO: 24849
  peptide (1)..(253): Ceres Seq. ID no. 12340118
  misc_feature (1)..(253): Homolog of NCBI NO: 7441253 NR Description: probable aquaporin - spinach
  misc_feature (1)..(253): Homolog of NCBI NO: 7441276 NR Description: mipE protein - common ice plant
  misc_feature (1)..(253): Homolog of NCBI NO: 1168480 NR Description: AQUAPORIN
  misc_feature (1)..(253): Homolog of NCBI NO: 17940742 NR Description: aquaporin-like protein [Petunia x hybrida]
  misc_feature (1)..(253): Homolog of NCBI NO: 8071628 NR Description: putative aquaporin PIP2-2 [Vitis berlandieri x
  misc_feature (1)..(253): Homolog of NCBI NO: 15227302 NR Description: putative plasma membrane intrinsic protein
  misc_feature (1)..(253): Homolog of NCBI NO: 11119335 NR Description: aquaporin [Brassica oleracea]
  misc_feature (1)..(253): Homolog of NCBI NO: 2306917 NR Description: plasma membrane intrinsic protein [Arabidopsis
  misc_feature (1)..(253): Homolog of NCBI NO: 1688296 NR Description: plasma membrane intrinsic protein PIP3
  misc_feature (1)..(253): Homolog of NCBI NO: 15236267 NR Description: plasma membrane intrinsic protein (SIMIP)

SEQ ID NO: 31295 - protein, 198 aa, Arabidopsis thaliana; identical to SEQ ID NO: 24850
  peptide (1)..(198): Ceres Seq. ID no. 12340119
  misc_feature (1)..(198): Homolog of NCBI NO: 7441253 NR Description: probable aquaporin - spinach
  misc_feature (1)..(198): Homolog of NCBI NO: 7441276 NR Description: mipE protein - common ice plant
  misc_feature (1)..(198): Homolog of NCBI NO: 1168480 NR Description: AQUAPORIN
  misc_feature (1)..(198): Homolog of NCBI NO: 17940742 NR Description: aquaporin-like protein [Petunia x hybrida]
  misc_feature (1)..(198): Homolog of NCBI NO: 8071628 NR Description: putative aquaporin PIP2-2 [Vitis berlandieri x
  misc_feature (1)..(198): Homolog of NCBI NO: 15227302 NR Description: putative plasma membrane intrinsic protein
  misc_feature (1)..(198): Homolog of NCBI NO: 11119335 NR Description: aquaporin [Brassica oleracea]
  misc_feature (1)..(198): Homolog of NCBI NO: 2306917 NR Description: plasma membrane intrinsic protein [Arabidopsis
  misc_feature (1)..(198): Homolog of NCBI NO: 1688296 NR Description: plasma membrane intrinsic protein PIP3
  misc_feature (1)..(198): Homolog of NCBI NO: 15236267 NR Description: plasma membrane intrinsic protein (SIMIP)

SEQ ID NO: 31296 - DNA, 1789 bp, Arabidopsis thaliana; identical to SEQ ID NO: 27706
  misc_feature (1)..(1789): Ceres Seq. ID no. 13592258
  misc_feature: MA Experiment ID: 108434 Result: Down-regulated in Transcription
  misc_feature: MA Experiment 108434 PARAMETER Experiment Name: At_Root_Tips_cDNA_P Parameter: Tissue Value: Root Tips
  misc_feature: MA Experiment ID: 108461 Result: Up-regulated in Transcription
  misc_feature: MA Experiment 108461 PARAMETER Experiment Name: At_Germinating_Seeds_cDNA_P Parameter: Age (day) Value: 1 vs. 0
  misc_feature: MA Experiment 108461 PARAMETER Experiment Name: At_Germinating_Seeds_cDNA_P Parameter: Tissue Value: Germinating Seeds
  misc_feature: MA Experiment ID: 108462 Result: Up-regulated in Transcription
  misc_feature: MA Experiment 108462 PARAMETER Experiment Name: At_Germinating_Seeds_cDNA_P Parameter: Age (day) Value: 2 vs. 0
  misc_feature: MA Experiment 108462 PARAMETER Experiment Name: At_Germinating_Seeds_cDNA_P Parameter: Tissue Value: Germinating Seeds
  misc_feature: MA Experiment ID: 108463 Result: Up-regulated in Transcription
  misc_feature: MA Experiment 108463 PARAMETER Experiment Name: At_Germinating_Seeds_cDNA_P Parameter: Age (day) Value: 3 vs. 0
  misc_feature: MA Experiment 108463 PARAMETER Experiment Name: At_Germinating_Seeds_cDNA_P Parameter: Tissue Value: Germinating Seeds
  misc_feature: MA Experiment ID: 108464 Result: Up-regulated in Transcription
  misc_feature: MA Experiment 108464 PARAMETER Experiment Name: At_Germinating_Seeds_cDNA_P Parameter: Age (day) Value: 4 vs. 0
  misc_feature: MA Experiment 108464 PARAMETER Experiment Name: At_Germinating_Seeds_cDNA_P Parameter: Tissue Value: Germinating Seeds
  misc_feature: MA Experiment ID: 108488 Result: Up-regulated in Transcription
  misc_feature: MA Experiment ID: 108595 Result: Up-regulated in Transcription
  misc_feature: MA Experiment 108595 PARAMETER Experiment Name: At_Ler-pi_Ovule_cDNA_P Parameter: Plant Line Value: null
  misc_feature: MA Experiment ID: 20000069 Result: Down-regulated in Transcription
  misc_feature: MA Experiment 20000069 PARAMETER Experiment Name: At_100uM_ABA_Mutants_cDNA_P Parameter: Plant Line Value: CS23
  misc_feature: MA Experiment 20000069 PARAMETER Experiment Name: At_100uM_ABA_Mutants_cDNA_P Parameter: Timepoint (hr) Value: 6
  misc_feature: MA Experiment 20000069 PARAMETER Experiment Name: At_100uM_ABA_Mutants_cDNA_P Parameter: Tissue Value: Aerial
  misc_feature: MA Experiment 20000069 PARAMETER Experiment Name: At_100uM_ABA_Mutants_cDNA_P Parameter: Treatment Value: 100uM ABA vs. No Treatment
  misc_feature: MA Experiment ID: 20000070 Result: Down-regulated in Transcription
  misc_feature: MA Experiment 20000070 PARAMETER Experiment Name: At_100uM_ABA_Mutants_cDNA_P Parameter: Plant Line Value: CS24
  misc_feature: MA Experiment 20000070 PARAMETER Experiment Name: At_100uM_ABA_Mutants_cDNA_P Parameter: Timepoint (hr) Value: 6
  misc_feature: MA Experiment 20000070 PARAMETER Experiment Name: At_100uM_ABA_Mutants_cDNA_P Parameter: Tissue Value: Aerial
  misc_feature: MA Experiment 20000070 PARAMETER Experiment Name: At_100uM_ABA_Mutants_cDNA_P Parameter: Treatment Value: 100uM ABA vs. No Treatment
  misc_feature: MA Experiment ID: 20000071 Result: Down-regulated in Transcription
  misc_feature: MA Experiment 20000071 PARAMETER Experiment Name: At_100uM_ABA_Mutants_cDNA_P Parameter: Plant Line Value: CS8104
  misc_feature: MA Experiment 20000071 PARAMETER Experiment Name: At_100uM_ABA_Mutants_cDNA_P Parameter: Timepoint (hr) Value: 6
  misc_feature: MA Experiment 20000071 PARAMETER Experiment Name: At_100uM_ABA_Mutants_cDNA_P Parameter: Tissue Value: Aerial
  misc_feature: MA Experiment 20000071 PARAMETER Experiment Name: At_100uM_ABA_Mutants_cDNA_P Parameter: Treatment Value: 100uM ABA vs. No Treatment
  misc_feature: MA Experiment ID: 20000072 Result: Down-regulated in Transcription
  misc_feature: MA Experiment 20000072 PARAMETER Experiment Name: At_100uM_ABA_Mutants_cDNA_P Parameter: Plant Line Value: CS8105
  misc_feature: MA Experiment 20000072 PARAMETER Experiment Name: At_100uM_ABA_Mutants_cDNA_P Parameter: Timepoint (hr) Value: 6
  misc_feature: MA Experiment 20000072 PARAMETER Experiment Name: At_100uM_ABA_Mutants_cDNA_P Parameter: Tissue Value: Aerial
  misc_feature: MA Experiment 20000072 PARAMETER Experiment Name: At_100uM_ABA_Mutants_cDNA_P Parameter: Treatment Value: 100uM ABA vs. No Treatment
  misc_feature: MA Experiment ID: 20000086 Result: Down-regulated in Transcription
  misc_feature: MA Experiment 20000086 PARAMETER Experiment Name: At_100uM_ABA_Mutants_cDNA_P Parameter: Plant Line Value: CS22
  misc_feature: MA Experiment 20000086 PARAMETER Experiment Name: At_100uM_ABA_Mutants_cDNA_P Parameter: Timepoint (hr) Value: 6
  misc_feature: MA Experiment 20000086 PARAMETER Experiment Name: At_100uM_ABA_Mutants_cDNA_P Parameter: Tissue Value: Aerial
  misc_feature: MA Experiment 20000086 PARAMETER Experiment Name: At_100uM_ABA_Mutants_cDNA_P Parameter: Treatment Value: 100uM ABA vs. No Treatment
  misc_feature: MA Experiment ID: 20000087 Result: Down-regulated in Transcription
  misc_feature: MA Experiment 20000087 PARAMETER Experiment Name: At_100uM_ABA_Mutants_cDNA_P Parameter: Plant Line Value: WS
  misc_feature: MA Experiment 20000087 PARAMETER Experiment Name: At_100uM_ABA_Mutants_cDNA_P Parameter: Timepoint (hr) Value: 6
  misc_feature: MA Experiment 20000087 PARAMETER Experiment Name: At_100uM_ABA_Mutants_cDNA_P Parameter: Tissue Value: Aerial
  misc_feature: MA Experiment 20000087 PARAMETER Experiment Name: At_100uM_ABA_Mutants_cDNA_P Parameter: Treatment Value: 100uM ABA vs. No Treatment
  misc_feature: MA Experiment ID: 20000088 Result: Down-regulated in Transcription
  misc_feature: MA Experiment 20000088 PARAMETER Experiment Name: At_100uM_ABA_Mutants_cDNA_P Parameter: Plant Line Value: Landsberg
  misc_feature: MA Experiment 20000088 PARAMETER Experiment Name: At_100uM_ABA_Mutants_cDNA_P Parameter: Timepoint (hr) Value: 6
  misc_feature: MA Experiment 20000088 PARAMETER Experiment Name: At_100uM_ABA_Mutants_cDNA_P Parameter: Tissue Value: Aerial
  misc_feature: MA Experiment 20000088 PARAMETER Experiment Name: At_100uM_ABA_Mutants_cDNA_P Parameter: Treatment Value: 100uM ABA vs. No Treatment
  misc_feature: MA Experiment ID: 20000090 Result: Down-regulated in Transcription
  misc_feature: MA Experiment ID: 20000111 Result: Up-regulated in Transcription
  misc_feature: MA Experiment 20000111 PARAMETER Experiment Name: At_42deg_Heat_cDNA_P Parameter: Temperature (deg C) Value: 42 vs. 22
  misc_feature: MA Experiment 20000111 PARAMETER Experiment Name: At_42deg_Heat_cDNA_P Parameter: Timepoint (hr) Value: 6
  misc_feature: MA Experiment 20000111 PARAMETER Experiment Name: At_42deg_Heat_cDNA_P Parameter: Tissue Value: Aerial
  misc_feature: MA Experiment ID: 20000117 Result: Down-regulated in Transcription
  misc_feature: MA Experiment 20000117 PARAMETER Experiment Name: At_100uM_ABA_Mutants_cDNA_P Parameter: Plant Line Value: Columbia
  misc_feature: MA Experiment 20000117 PARAMETER Experiment Name: At_100uM_ABA_Mutants_cDNA_P Parameter: Timepoint (hr) Value: 6
  misc_feature: MA Experiment 20000117 PARAMETER Experiment Name: At_100uM_ABA_Mutants_cDNA_P Parameter: Tissue Value: Aerial
  misc_feature: MA Experiment 20000117 PARAMETER Experiment Name: At_100uM_ABA_Mutants_cDNA_P Parameter: Treatment Value: 100uM ABA vs. No Treatment
  misc_feature: MA Experiment ID: 20000179 Result: Up-regulated in Transcription
  misc_feature: MA Experiment 20000179 PARAMETER Experiment Name: At_Germinating_Seeds_P Parameter: Age (hr) Value: 6 vs. 0
  misc_feature: MA Experiment 20000179 PARAMETER Experiment Name: At_Germinating_Seeds_P Parameter: Tissue Value: Germinating Seeds
  misc_feature: MA Experiment ID: 20000180 Result: Up-regulated in Transcription
  misc_feature: MA Experiment 20000180 PARAMETER Experiment Name: At_Germinating_Seeds_P Parameter: Age (hr) Value: 24 vs. 0
  misc_feature: MA Experiment 20000180 PARAMETER Experiment Name: At_Germinating_Seeds_P Parameter: Tissue Value: Germinating Seeds
  misc_feature: MA Experiment ID: 20000185 Result: Down-regulated in Transcription
  misc_feature: MA Experiment 20000185 PARAMETER Experiment Name: At_Roots__P Parameter: Age (day) Value: 7 vs. 21
  misc_feature: MA Experiment 20000185 PARAMETER Experiment Name: At_Roots__P Parameter: Organism Value: A. thaliana
  misc_feature: MA Experiment 20000185 PARAMETER Experiment Name: At_Roots__P Parameter: Tissue Value: Roots vs. Whole Plant
  misc_feature: MA Experiment ID: 20000438 Result: Up-regulated in Transcription
  misc_feature: MA Experiment 20000438 PARAMETER Experiment Name: At_Shoots__P Parameter: Age (day) Value: 14
  misc_feature: MA Experiment 20000438 PARAMETER Experiment Name: At_Shoots__P Parameter: Tissue Value: Shoots vs. Whole Plant
  misc_feature: MA Experiment ID: 20000439 Result: Down-regulated in Transcription
  misc_feature: MA Experiment 20000439 PARAMETER Experiment Name: At_Roots__P Parameter: Age (day) Value: 14 vs. 21
  misc_feature: MA Experiment 20000439 PARAMETER Experiment Name: At_Roots__P Parameter: Organism Value: A. thaliana
  misc_feature: MA Experiment 20000439 PARAMETER Experiment Name: At_Roots__P Parameter: Tissue Value: Roots vs. Whole Plant
  misc_feature: MA Experiment ID: 20001247 Result: Up-regulated in Transcription
  misc_feature: MA Experiment 20001247 PARAMETER Experiment Name: At_Far-red-induction_P Parameter: Age (day) Value: 7
  misc_feature: MA Experiment 20001247 PARAMETER Experiment Name: At_Far-red-induction_P Parameter: Light Value: Far-red vs. White
  misc_feature: MA Experiment 20001247 PARAMETER Experiment Name: At_Far-red-induction_P Parameter: Organism Value: A. thaliana
  misc_feature: MA Experiment 20001247 PARAMETER Experiment Name: At_Far-red-induction_P Parameter: Plant Line Value: Columbia
  misc_feature: MA Experiment 20001247 PARAMETER Experiment Name: At_Far-red-induction_P Parameter: Timepoint (hr) Value: 1
  misc_feature: MA Experiment 20001247 PARAMETER Experiment Name: At_Far-red-induction_P Parameter: Tissue Value: Whole Plant
  misc_feature: MA Experiment ID: 20001450 Result: Down-regulated in Transcription
  misc_feature: MA Experiment 20001450 PARAMETER Experiment Name: At_Far-red-induction_P Parameter: Age (day) Value: 7
  misc_feature: MA Experiment 20001450 PARAMETER Experiment Name: At_Far-red-induction_P Parameter: Light Value: Far-red vs. White
  misc_feature: MA Experiment 20001450 PARAMETER Experiment Name: At_Far-red-induction_P Parameter: Organism Value: A. thaliana
  misc_feature: MA Experiment 20001450 PARAMETER Experiment Name: At_Far-red-induction_P Parameter: Plant Line Value: Columbia
  misc_feature: MA Experiment 20001450 PARAMETER Experiment Name: At_Far-red-induction_P Parameter: Timepoint (hr) Value: 8
  misc_feature: MA Experiment 20001450 PARAMETER Experiment Name: At_Far-red-induction_P Parameter: Tissue Value: Whole Plant
  misc_feature: MA Experiment ID: 20001556 Result: Down-regulated in Transcription
  misc_feature: MA Experiment 20001556 PARAMETER Experiment Name: At_Drought_Soil_Dry_P Parameter: Age (day) Value: 26
  misc_feature: MA Experiment 20001556 PARAMETER Experiment Name: At_Drought_Soil_Dry_P Parameter: Organism Value: A. thaliana
  misc_feature: MA Experiment 20001556 PARAMETER Experiment Name: At_Drought_Soil_Dry_P Parameter: Plant Line Value: WS
  misc_feature: MA Experiment 20001556 PARAMETER Experiment Name: At_Drought_Soil_Dry_P Parameter: Post Timepoint (hr) Value: None
  misc_feature: MA Experiment 20001556 PARAMETER Experiment Name: At_Drought_Soil_Dry_P Parameter: Post-Treatment Value: None
  misc_feature: MA Experiment 20001556 PARAMETER Experiment Name: At_Drought_Soil_Dry_P Parameter: Timepoint (day) Value: 12
  misc_feature: MA Experiment 20001556 PARAMETER Experiment Name: At_Drought_Soil_Dry_P Parameter: Treatment Value: Drought vs. No Drought
  misc_feature: MA Experiment ID: 20001559 Result: Down-regulated in Transcription
  misc_feature: MA Experiment 20001559 PARAMETER Experiment Name: At_Drought_Soil_Dry_P Parameter: Age (day) Value: 28
  misc_feature: MA Experiment 20001559 PARAMETER Experiment Name: At_Drought_Soil_Dry_P Parameter: Organism Value: A. thaliana
  misc_feature: MA Experiment 20001559 PARAMETER Experiment Name: At_Drought_Soil_Dry_P Parameter: Plant Line Value: WS
  misc_feature: MA Experiment 20001559 PARAMETER Experiment Name: At_Drought_Soil_Dry_P Parameter: Post Timepoint (hr) Value: 29
  misc_feature: MA Experiment 20001559 PARAMETER Experiment Name: At_Drought_Soil_Dry_P Parameter: Post-Treatment Value: Re-Water vs. No Drought
  misc_feature: MA Experiment 20001559 PARAMETER Experiment Name: At_Drought_Soil_Dry_P Parameter: Timepoint (day) Value: 14
  misc_feature: MA Experiment 20001559 PARAMETER Experiment Name: At_Drought_Soil_Dry_P Parameter: Treatment Value: Drought vs. No Drought
  misc_feature: MA Experiment ID: 20001904 Result: Down-regulated in Transcription
  misc_feature: MA Experiment 20001904 PARAMETER Experiment Name: At_Drought_Reproduction_P Parameter: Age (day) Value: 37
  misc_feature: MA Experiment 20001904 PARAMETER Experiment Name: At_Drought_Reproduction_P Parameter: Organism Value: A. thaliana
  misc_feature: MA Experiment 20001904 PARAMETER Experiment Name: At_Drought_Reproduction_P Parameter: Plant Line Value: WS
  misc_feature: MA Experiment 20001904 PARAMETER Experiment Name: At_Drought_Reproduction_P Parameter: Timepoint (day) Value: 7
  misc_feature: MA Experiment 20001904 PARAMETER Experiment Name: At_Drought_Reproduction_P Parameter: Tissue Value: Rosettes
  misc_feature: MA Experiment 20001904 PARAMETER Experiment Name: At_Drought_Reproduction_P Parameter: Treatment Value: Drought vs. No Drought
  misc_feature: MA Experiment ID: 20001905 Result: Down-regulated in Transcription
  misc_feature: MA Experiment 20001905 PARAMETER Experiment Name: At_Drought_Reproduction_P Parameter: Age (day) Value: 40
  misc_feature: MA Experiment 20001905 PARAMETER Experiment Name: At_Drought_Reproduction_P Parameter: Organism Value: A. thaliana
  misc_feature: MA Experiment 20001905 PARAMETER Experiment Name: At_Drought_Reproduction_P Parameter: Plant Line Value: WS
  misc_feature: MA Experiment 20001905 PARAMETER Experiment Name: At_Drought_Reproduction_P Parameter: Timepoint (day) Value: 10
  misc_feature: MA Experiment 20001905 PARAMETER Experiment Name: At_Drought_Reproduction_P Parameter: Tissue Value: Rosettes
  misc_feature: MA Experiment 20001905 PARAMETER Experiment Name: At_Drought_Reproduction_P Parameter: Treatment Value: Drought vs. No Drought
  misc_feature: MA Experiment ID: 20001906 Result: Down-regulated in Transcription
  misc_feature: MA Experiment 20001906 PARAMETER Experiment Name: At_Drought_Reproduction_P Parameter: Age (day) Value: 35
  misc_feature: MA Experiment 20001906 PARAMETER Experiment Name: At_Drought_Reproduction_P Parameter: Organism Value: A. thaliana
  misc_feature: MA Experiment 20001906 PARAMETER Experiment Name: At_Drought_Reproduction_P Parameter: Plant Line Value: WS
  misc_feature: MA Experiment 20001906 PARAMETER Experiment Name: At_Drought_Reproduction_P Parameter: Timepoint (day) Value: 5
  misc_feature: MA Experiment 20001906 PARAMETER Experiment Name: At_Drought_Reproduction_P Parameter: Tissue Value: Siliques
  misc_feature: MA Experiment 20001906 PARAMETER Experiment Name: At_Drought_Reproduction_P Parameter: Treatment Value: Drought vs. No Drought

SEQ ID NO: 31297 - protein, 474 aa, Arabidopsis thaliana; identical to SEQ ID NO: 27707
  peptide (1)..(474): Ceres Seq. ID no. 13592259
  misc_feature (160)..(358): Pfam Name: ATPase family associated with various cellular Pfam Description: ATPase family associated with various cellular
  misc_feature (160)..(358): Pfam Name: ATPase family associated with various cellular Pfam Description: ATPase family associated with various cellular
  misc_feature (23)..(474): Homolog of NCBI NO: 32481061 NR Description: Rubisco activase alpha form precursor
  misc_feature (44)..(474): Homolog of NCBI NO: 12620883 NR Description: ribulose-1,5-bisphosphate carboxylase/oxygenase
  misc_feature (23)..(474): Homolog of NCBI NO: 8918359 NR Description: RuBisCO activase large isoform precursor
  misc_feature (1)..(474): Homolog of NCBI NO: 32481065 NR Description: Rubisco activase alpha form precursor [Larrea
  misc_feature (1)..(438): Homolog of NCBI NO: 30687999 NR Description: auxin-regulated protein [Arabidopsis thaliana]
  misc_feature (23)..(474): Homolog of NCBI NO: 32481061 NR Description: Rubisco activase alpha form precursor
  misc_feature (23)..(474): Homolog of NCBI NO: 8918359 NR Description: RuBisCO activase large isoform precursor
  misc_feature (1)..(438): Homolog of NCBI NO: 30687999 NR Description: auxin-regulated protein [Arabidopsis thaliana]
  misc_feature (1)..(474): Homolog of NCBI NO: 18405145 NR Description: auxin-regulated protein [Arabidopsis thaliana]
  misc_feature (1)..(474): Homolog of NCBI NO: 15450379 NR Description: At2g39730/T5I7.3 [Arabidopsis thaliana]
  misc_feature (1)..(474): Homolog of NCBI NO: 23308421 NR Description: At2g39730/T5I7.3 [Arabidopsis thaliana]
  misc_feature (1)..(474): Homolog of NCBI NO: 81660 NR Description: ribulose-bisphosphate carboxylase activase (EC
  misc_feature (1)..(438): Homolog of NCBI NO: 30687995 NR Description: auxin-regulated protein [Arabidopsis thaliana]
  misc_feature (1)..(474): Homolog of NCBI NO: 32481065 NR Description: Rubisco activase alpha form precursor [Larrea
  misc_feature (44)..(474): Homolog of NCBI NO: 12620883 NR Description: ribulose-1,5-bisphosphate carboxylase/oxygenase
  misc_feature (1)..(438): Homolog of NCBI NO: 30687995 NR Description: auxin-regulated protein [Arabidopsis thaliana]
  misc_feature (1)..(474): Homolog of NCBI NO: 81660 NR Description: ribulose-bisphosphate carboxylase activase (EC
  misc_feature (1)..(474): Homolog of NCBI NO: 23308421 NR Description: At2g39730/T5I7.3 [Arabidopsis thaliana]
  misc_feature (1)..(474): Homolog of NCBI NO: 15450379 NR Description: At2g39730/T5I7.3 [Arabidopsis thaliana]
  misc_feature (1)..(474): Homolog of NCBI NO: 18405145 NR Description: auxin-regulated protein [Arabidopsis thaliana]

SEQ ID NO: 31298 - protein, 384 aa, Arabidopsis thaliana; identical to SEQ ID NO: 27708
  peptide (1)..(384): Ceres Seq. ID no. 13592260
  misc_feature (70)..(268): Pfam Name: ATPase family associated with various cellular Pfam Description: ATPase family associated with various cellular
  misc_feature (70)..(268): Pfam Name: ATPase family associated with various cellular Pfam Description: ATPase family associated with various cellular
  misc_feature (1)..(384): Homolog of NCBI NO: 32481061 NR Description: Rubisco activase alpha form precursor
  misc_feature (1)..(384): Homolog of NCBI NO: 12620883 NR Description: ribulose-1,5-bisphosphate carboxylase/oxygenase
  misc_feature (1)..(384): Homolog of NCBI NO: 8918359 NR Description: RuBisCO activase large isoform precursor
  misc_feature (1)..(384): Homolog of NCBI NO: 32481065 NR Description: Rubisco activase alpha form precursor [Larrea
  misc_feature (1)..(348): Homolog of NCBI NO: 30687999 NR Description: auxin-regulated protein [Arabidopsis thaliana]
  misc_feature (1)..(384): Homolog of NCBI NO: 32481061 NR Description: Rubisco activase alpha form precursor
  misc_feature (1)..(384): Homolog of NCBI NO: 8918359 NR Description: RuBisCO activase large isoform precursor
  misc_feature (1)..(348): Homolog of NCBI NO: 30687999 NR Description: auxin-regulated protein [Arabidopsis thaliana]
  misc_feature (1)..(384): Homolog of NCBI NO: 18405145 NR Description: auxin-regulated protein [Arabidopsis thaliana]
  misc_feature (1)..(384): Homolog of NCBI NO: 15450379 NR Description: At2g39730/T5I7.3 [Arabidopsis thaliana]
  misc_feature (1)..(384): Homolog of NCBI NO: 23308421 NR Description: At2g39730/T5I7.3 [Arabidopsis thaliana]
  misc_feature (1)..(384): Homolog of NCBI NO: 81660 NR Description: ribulose-bisphosphate carboxylase activase (EC
  misc_feature (1)..(348): Homolog of NCBI NO: 30687995 NR Description: auxin-regulated protein [Arabidopsis thaliana]
  misc_feature (1)..(384): Homolog of NCBI NO: 32481065 NR Description: Rubisco activase alpha form precursor [Larrea
  misc_feature (1)..(384): Homolog of NCBI NO: 12620883 NR Description: ribulose-1,5-bisphosphate carboxylase/oxygenase
  misc_feature (1)..(348): Homolog of NCBI NO: 30687995 NR Description: auxin-regulated protein [Arabidopsis thaliana]
  misc_feature (1)..(384): Homolog of NCBI NO: 81660 NR Description: ribulose-bisphosphate carboxylase activase (EC
  misc_feature (1)..(384): Homolog of NCBI NO: 23308421 NR Description: At2g39730/T5I7.3 [Arabidopsis thaliana]
  misc_feature (1)..(384): Homolog of NCBI NO: 15450379 NR Description: At2g39730/T5I7.3 [Arabidopsis thaliana]
  misc_feature (1)..(384): Homolog of NCBI NO: 18405145 NR Description: auxin-regulated protein [Arabidopsis thaliana]

SEQ ID NO: 31299 - protein, 375 aa, Arabidopsis thaliana; identical to SEQ ID NO: 27709
  peptide (1)..(375): Ceres Seq. ID no. 13592261
  misc_feature (61)..(259): Pfam Name: ATPase family associated with various cellular Pfam Description: ATPase family associated with various cellular
  misc_feature (61)..(259): Pfam Name: ATPase family associated with various cellular Pfam Description: ATPase family associated with various cellular
  misc_feature (1)..(375): Homolog of NCBI NO: 32481061 NR Description: Rubisco activase alpha form precursor
  misc_feature (1)..(375): Homolog of NCBI NO: 12620883 NR Description: ribulose-1,5-bisphosphate carboxylase/oxygenase
  misc_feature (1)..(375): Homolog of NCBI NO: 8918359 NR Description: RuBisCO activase large isoform precursor
  misc_feature (1)..(375): Homolog of NCBI NO: 32481065 NR Description: Rubisco activase alpha form precursor [Larrea
  misc_feature (1)..(339): Homolog of NCBI NO: 30687999 NR Description: auxin-regulated protein [Arabidopsis thaliana]
  misc_feature (1)..(375): Homolog of NCBI NO: 32481061 NR Description: Rubisco activase alpha form precursor
  misc_feature (1)..(375): Homolog of NCBI NO: 8918359 NR Description: RuBisCO activase large isoform precursor
  misc_feature (1)..(339): Homolog of NCBI NO: 30687999 NR Description: auxin-regulated protein [Arabidopsis thaliana]
  misc_feature (1)..(375): Homolog of NCBI NO: 18405145 NR Description: auxin-regulated protein [Arabidopsis thaliana]
  misc_feature (1)..(375): Homolog of NCBI NO: 15450379 NR Description: At2g39730/T5I7.3 [Arabidopsis thaliana]
  misc_feature (1)..(375): Homolog of NCBI NO: 23308421 NR Description: At2g39730/T5I7.3 [Arabidopsis thaliana]
  misc_feature (1)..(375): Homolog of NCBI NO: 81660 NR Description: ribulose-bisphosphate carboxylase activase (EC
  misc_feature (1)..(339): Homolog of NCBI NO: 30687995 NR Description: auxin-regulated protein [Arabidopsis thaliana]
  misc_feature (1)..(375): Homolog of NCBI NO: 32481065 NR Description: Rubisco activase alpha form precursor [Larrea
  misc_feature (1)..(375): Homolog of NCBI NO: 12620883 NR Description: ribulose-1,5-bisphosphate carboxylase/oxygenase
  misc_feature (1)..(339): Homolog of NCBI NO: 30687995 NR Description: auxin-regulated protein [Arabidopsis thaliana]
  misc_feature (1)..(375): Homolog of NCBI NO: 81660 NR Description: ribulose-bisphosphate carboxylase activase (EC
  misc_feature (1)..(375): Homolog of NCBI NO: 23308421 NR Description: At2g39730/T5I7.3 [Arabidopsis thaliana]
  misc_feature (1)..(375): Homolog of NCBI NO: 15450379 NR Description: At2g39730/T5I7.3 [Arabidopsis thaliana]
  misc_feature (1)..(375): Homolog of NCBI NO: 18405145 NR Description: auxin-regulated protein [Arabidopsis thaliana]

SEQ ID NO: 31300 - DNA, 1591 bp, Arabidopsis thaliana; identical to SEQ ID NO: 27710
  misc_feature (1)..(1591): Ceres Seq. ID no. 12339561
  misc_feature: MA Experiment ID: 20000179 Result: Down-regulated in Transcription
  misc_feature: MA Experiment 20000179 PARAMETER Experiment Name: At_Germinating_Seeds_P Parameter: Age (hr) Value: 6 vs. 0
  misc_feature: MA Experiment 20000179 PARAMETER Experiment Name: At_Germinating_Seeds_P Parameter: Tissue Value: Germinating Seeds
  misc_feature: MA Experiment ID: 20000213 Result: Up-regulated in Transcription
  misc_feature: MA Experiment 20000213 PARAMETER Experiment Name: At_4deg_Cold_P Parameter: Timepoint (hr) Value: 2
  misc_feature: MA Experiment ID: 20000214 Result: Up-regulated in Transcription
  misc_feature: MA Experiment 20000214 PARAMETER Experiment Name: At_4deg_Cold_P Parameter: Timepoint (hr) Value: 6
  misc_feature: MA Experiment ID: 20000234 Result: Up-regulated in Transcription
  misc_feature: MA Experiment 20000234 PARAMETER Experiment Name: At_Siliques_P Parameter: Age (day) Value: 21
  misc_feature: MA Experiment 20000234 PARAMETER Experiment Name: At_Siliques_P Parameter: Organism Value: A. thaliana
  misc_feature: MA Experiment 20000234 PARAMETER Experiment Name: At_Siliques_P Parameter: Plant Line Value: WS
  misc_feature: MA Experiment 20000234 PARAMETER Experiment Name: At_Siliques_P Parameter: Tissue Value: Less Than 5mm Siliques vs. Whole Plant
  misc_feature: MA Experiment ID: 20000267 Result: Up-regulated in Transcription
  misc_feature: MA Experiment 20000267 PARAMETER Experiment Name: At_Drought_P Parameter: Age (day) Value: 7
  misc_feature: MA Experiment 20000267 PARAMETER Experiment Name: At_Drought_P Parameter: Organism Value: A. thaliana
  misc_feature: MA Experiment 20000267 PARAMETER Experiment Name: At_Drought_P Parameter: Plant Line Value: WS
  misc_feature: MA Experiment 20000267 PARAMETER Experiment Name: At_Drought_P Parameter: Timepoint (hr) Value: 6
  misc_feature: MA Experiment 20000267 PARAMETER Experiment Name: At_Drought_P Parameter: Tissue Value: Whole Plant
  misc_feature: MA Experiment 20000267 PARAMETER Experiment Name: At_Drought_P Parameter: Treatment Value: Drought vs. No Drought
  misc_feature: MA Experiment ID: 20000436 Result: Up-regulated in Transcription
  misc_feature: MA Experiment 20000436 PARAMETER Experiment Name: At_Drought_P Parameter: Age (day) Value: 7
  misc_feature: MA Experiment 20000436 PARAMETER Experiment Name: At_Drought_P Parameter: Organism Value: A. thaliana
  misc_feature: MA Experiment 20000436 PARAMETER Experiment Name: At_Drought_P Parameter: Plant Line Value: WS
  misc_feature: MA Experiment 20000436 PARAMETER Experiment Name: At_Drought_P Parameter: Timepoint (hr) Value: 12
  misc_feature: MA Experiment 20000436 PARAMETER Experiment Name: At_Drought_P Parameter: Tissue Value: Whole Plant
  misc_feature: MA Experiment 20000436 PARAMETER Experiment Name: At_Drought_P Parameter: Treatment Value: Drought vs. No Drought
  misc_feature: MA Experiment ID: 20000437 Result: Up-regulated in Transcription
  misc_feature: MA Experiment 20000437 PARAMETER Experiment Name: At_Drought_P Parameter: Age (day) Value: 8
  misc_feature: MA Experiment 20000437 PARAMETER Experiment Name: At_Drought_P Parameter: Organism Value: A. thaliana
  misc_feature: MA Experiment 20000437 PARAMETER Experiment Name: At_Drought_P Parameter: Plant Line Value: WS
  misc_feature: MA Experiment 20000437 PARAMETER Experiment Name: At_Drought_P Parameter: Timepoint (hr) Value: 24
  misc_feature: MA Experiment 20000437 PARAMETER Experiment Name: At_Drought_P Parameter: Tissue Value: Whole Plant
  misc_feature: MA Experiment 20000437 PARAMETER Experiment Name: At_Drought_P Parameter: Treatment Value: Drought vs. No Drought
  misc_feature: MA Experiment ID: 20000495 Result: Up-regulated in Transcription
  misc_feature: MA Experiment 20000495 PARAMETER Experiment Name: At_Guard_Cells_P Parameter: Harvest Date Value: 8/2/2002
  misc_feature: MA Experiment 20000495 PARAMETER Experiment Name: At_Guard_Cells_P Parameter: Organism Value: A. thaliana
  misc_feature: MA Experiment 20000495 PARAMETER Experiment Name: At_Guard_Cells_P Parameter: Tissue Value: Guard Cells vs. Leaves
  misc_feature: MA Experiment ID: 20000573 Result: Up-regulated in Transcription
  misc_feature: MA Experiment 20000573 PARAMETER Experiment Name: At_100uM_ABA_Mutants__P Parameter: Organism Value: A. thaliana
  misc_feature: MA Experiment 20000573 PARAMETER Experiment Name: At_100uM_ABA_Mutants__P Parameter: Plant Line Value: CS22 vs. Ler wt
  misc_feature: MA Experiment 20000573 PARAMETER Experiment Name: At_100uM_ABA_Mutants__P Parameter: Timepoint (hr) Value: N/A
  misc_feature: MA Experiment 20000573 PARAMETER Experiment Name: At_100uM_ABA_Mutants__P Parameter: Tissue Value: Whole Plant
  misc_feature: MA Experiment 20000573 PARAMETER Experiment Name: At_100uM_ABA_Mutants__P Parameter: Treatment Value: None
  misc_feature: MA Experiment ID: 20000574 Result: Up-regulated in Transcription
  misc_feature: MA Experiment 20000574 PARAMETER Experiment Name: At_100uM_ABA_Mutants__P Parameter: Organism Value: A. thaliana
  misc_feature: MA Experiment 20000574 PARAMETER Experiment Name: At_100uM_ABA_Mutants__P Parameter: Plant Line Value: CS23 vs. Ler wt
  misc_feature: MA Experiment 20000574 PARAMETER Experiment Name: At_100uM_ABA_Mutants__P Parameter: Timepoint (hr) Value: N/A
  misc_feature: MA Experiment 20000574 PARAMETER Experiment Name: At_100uM_ABA_Mutants__P Parameter: Tissue Value: Whole Plant
  misc_feature: MA Experiment 20000574 PARAMETER Experiment Name: At_100uM_ABA_Mutants__P Parameter: Treatment Value: None
  misc_feature: MA Experiment ID: 20000794 Result: Down-regulated in Transcription
  misc_feature: MA Experiment 20000794 PARAMETER Experiment Name: At_Petals_P Parameter: Age (day) Value: 23-25 days
  misc_feature: MA Experiment 20000794 PARAMETER Experiment Name: At_Petals_P Parameter: Plant Line Value: WS
  misc_feature: MA Experiment 20000794 PARAMETER Experiment Name: At_Petals_P Parameter: Tissue Value: Petals vs. Whole plant
  misc_feature: MA Experiment ID: 20001450 Result: Down-regulated in Transcription
  misc_feature: MA Experiment 20001450 PARAMETER Experiment Name: At_Far-red-induction_P Parameter: Age (day) Value: 7
  misc_feature: MA Experiment 20001450 PARAMETER Experiment Name: At_Far-red-induction_P Parameter: Light Value: Far-red vs. White
  misc_feature: MA Experiment 20001450 PARAMETER Experiment Name: At_Far-red-induction_P Parameter: Organism Value: A. thaliana
  misc_feature: MA Experiment 20001450 PARAMETER Experiment Name: At_Far-red-induction_P Parameter: Plant Line Value: Columbia
  misc_feature: MA Experiment 20001450 PARAMETER Experiment Name: At_Far-red-induction_P Parameter: Timepoint (hr) Value: 8
  misc_feature: MA Experiment 20001450 PARAMETER Experiment Name: At_Far-red-induction_P Parameter: Tissue Value: Whole Plant
  misc_feature: MA Experiment ID: 20001451 Result: Down-regulated in Transcription
  misc_feature: MA Experiment 20001451 PARAMETER Experiment Name: At_Far-red-induction_P Parameter: Age (day) Value: 7
  misc_feature: MA Experiment 20001451 PARAMETER Experiment Name: At_Far-red-induction_P Parameter: Light Value: Far-red vs. White
  misc_feature: MA Experiment 20001451 PARAMETER Experiment Name: At_Far-red-induction_P Parameter: Organism Value: A. thaliana
  misc_feature: MA Experiment 20001451 PARAMETER Experiment Name: At_Far-red-induction_P Parameter: Plant Line Value: Columbia
  misc_feature: MA Experiment 20001451 PARAMETER Experiment Name: At_Far-red-induction_P Parameter: Timepoint (hr) Value: 24
  misc_feature: MA Experiment 20001451 PARAMETER Experiment Name: At_Far-red-induction_P Parameter: Tissue Value: Whole Plant
  misc_feature: MA Experiment ID: 20001555 Result: Down-regulated in Transcription
  misc_feature: MA Experiment 20001555 PARAMETER Experiment Name: At_Drought_Soil_Dry_P Parameter: Age (day) Value: 24
  misc_feature: MA Experiment 20001555 PARAMETER Experiment Name: At_Drought_Soil_Dry_P Parameter: Organism Value: A. thaliana
  misc_feature: MA Experiment 20001555 PARAMETER Experiment Name: At_Drought_Soil_Dry_P Parameter: Plant Line Value: WS
  misc_feature: MA Experiment 20001555 PARAMETER Experiment Name: At_Drought_Soil_Dry_P Parameter: Post Timepoint (hr) Value: None
  misc_feature: MA Experiment 20001555 PARAMETER Experiment Name: At_Drought_Soil_Dry_P Parameter: Post-Treatment Value: None
  misc_feature: MA Experiment 20001555 PARAMETER Experiment Name: At_Drought_Soil_Dry_P Parameter: Timepoint (day) Value: 10
  misc_feature: MA Experiment 20001555 PARAMETER Experiment Name: At_Drought_Soil_Dry_P Parameter: Treatment Value: Drought vs. No Drought
  misc_feature: MA Experiment ID: 20001557 Result: Up-regulated in Transcription
  misc_feature: MA Experiment 20001557 PARAMETER Experiment Name: At_Drought_Soil_Dry_P Parameter: Age (day) Value: 27
  misc_feature: MA Experiment 20001557 PARAMETER Experiment Name: At_Drought_Soil_Dry_P Parameter: Organism Value: A. thaliana
  misc_feature: MA Experiment 20001557 PARAMETER Experiment Name: At_Drought_Soil_Dry_P Parameter: Plant Line Value: WS
  misc_feature: MA Experiment 20001557 PARAMETER Experiment Name: At_Drought_Soil_Dry_P Parameter: Post Timepoint (hr) Value: 3
  misc_feature: MA Experiment 20001557 PARAMETER Experiment Name: At_Drought_Soil_Dry_P Parameter: Post-Treatment Value: Re-Water vs. No Drought
  misc_feature: MA Experiment 20001557 PARAMETER Experiment Name: At_Drought_Soil_Dry_P Parameter: Timepoint (day) Value: 13
  misc_feature: MA Experiment 20001557 PARAMETER Experiment Name: At_Drought_Soil_Dry_P Parameter: Treatment Value: Drought vs. No Drought
  misc_feature: MA Experiment ID: 20001905 Result: Up-regulated in Transcription
  misc_feature: MA Experiment 20001905 PARAMETER Experiment Name: At_Drought_Reproduction_P Parameter: Age (day) Value: 40
  misc_feature: MA Experiment 20001905 PARAMETER Experiment Name: At_Drought_Reproduction_P Parameter: Organism Value: A. thaliana
  misc_feature: MA Experiment 20001905 PARAMETER Experiment Name: At_Drought_Reproduction_P Parameter: Plant Line Value: WS
  misc_feature: MA Experiment 20001905 PARAMETER Experiment Name: At_Drought_Reproduction_P Parameter: Timepoint (day) Value: 10
  misc_feature: MA Experiment 20001905 PARAMETER Experiment Name: At_Drought_Reproduction_P Parameter: Tissue Value: Rosettes
  misc_feature: MA Experiment 20001905 PARAMETER Experiment Name: At_Drought_Reproduction_P Parameter: Treatment Value: Drought vs. No Drought

SEQ ID NO: 31301 - protein, 460 aa, Arabidopsis thaliana; identical to SEQ ID NO: 27711
  peptide (1)..(460): Ceres Seq. ID no. 12339562
  misc_feature (27)..(346): Pfam Name: Glycosyl hydrolases family 17 Pfam Description: Glycosyl hydrolases family 17
  misc_feature (6)..(350): Homolog of NCBI NO: 11279331 NR Description: beta-1,3-glucanase (EC 3.2.1.-) precursor
  misc_feature (1)..(346): Homolog of NCBI NO: 27529826 NR Description: beta-1,3-glucanase-like protein [Nicotiana
  misc_feature (5)..(451): Homolog of NCBI NO: 25316444 NR Description: probable beta-1,3-glucanase [imported] -
  misc_feature (5)..(460): Homolog of NCBI NO: 30678225 NR Description: glycosyl hydrolase family 17 [Arabidopsis
  misc_feature (1)..(460): Homolog of NCBI NO: 11071974 NR Description: elicitor inducible beta-1,3-glucanase Nt-SubE76
  misc_feature (1)..(450): Homolog of NCBI NO: 15236882 NR Description: glycosyl hydrolase family 17; protein id:
  misc_feature (1)..(451): Homolog of NCBI NO: 9758115 NR Description: beta-1,3-glucanase-like protein [Arabidopsis
  misc_feature (1)..(460): Homolog of NCBI NO: 21594590 NR Description: beta-1,3-glucanase-like protein [Arabidopsis
  misc_feature (1)..(460): Homolog of NCBI NO: 18423719 NR Description: glycosyl hydrolase family 17
  misc_feature (1)..(460): Homolog of NCBI NO: 18700155 NR Description: AT5g55180/MCO15_13 [Arabidopsis thaliana]

SEQ ID NO: 31302 - protein, 435 aa, Arabidopsis thaliana; identical to SEQ ID NO: 27712
  peptide (1)..(435): Ceres Seq. ID no. 12339564
  misc_feature (2)..(321): Pfam Name: Glycosyl hydrolases family 17 Pfam Description: Glycosyl hydrolases family 17
  misc_feature (1)..(325): Homolog of NCBI NO: 11279331 NR Description: beta-1,3-glucanase (EC 3.2.1.-) precursor
  misc_feature (1)..(321): Homolog of NCBI NO: 27529826 NR Description: beta-1,3-glucanase-like protein [Nicotiana
  misc_feature (1)..(426): Homolog of NCBI NO: 25316444 NR Description: probable beta-1,3-glucanase [imported] -
  misc_feature (1)..(435): Homolog of NCBI NO: 30678225 NR Description: glycosyl hydrolase family 17 [Arabidopsis
  misc_feature (1)..(435): Homolog of NCBI NO: 11071974 NR Description: elicitor inducible beta-1,3-glucanase Nt-SubE76
  misc_feature (1)..(425): Homolog of NCBI NO: 15236882 NR Description: glycosyl hydrolase family 17; protein id:
  misc_feature (1)..(426): Homolog of NCBI NO: 9758115 NR Description: beta-1,3-glucanase-like protein [Arabidopsis
  misc_feature (1)..(435): Homolog of NCBI NO: 21594590 NR Description: beta-1,3-glucanase-like protein [Arabidopsis
  misc_feature (1)..(435): Homolog of NCBI NO: 18423719 NR Description: glycosyl hydrolase family 17
  misc_feature (1)..(435): Homolog of NCBI NO: 18700155 NR Description: AT5g55180/MCO15_13 [Arabidopsis thaliana]

SEQ ID NO: 31303 - protein, 325 aa, Arabidopsis thaliana; identical to SEQ ID NO: 27713
  peptide (1)..(325): Ceres Seq. ID no. 12339566
  misc_feature (1)..(211): Pfam Name: Glycosyl hydrolases family 17 Pfam Description: Glycosyl hydrolases family 17
  misc_feature (1)..(215): Homolog of NCBI NO: 11279331 NR Description: beta-1,3-glucanase (EC 3.2.1.-) precursor
  misc_feature (1)..(211): Homolog of NCBI NO: 27529826 NR Description: beta-1,3-glucanase-like protein [Nicotiana
  misc_feature (1)..(316): Homolog of NCBI NO: 25316444 NR Description: probable beta-1,3-glucanase [imported] -
  misc_feature (1)..(325): Homolog of NCBI NO: 30678225 NR Description: glycosyl hydrolase family 17 [Arabidopsis
  misc_feature (1)..(325): Homolog of NCBI NO: 11071974 NR Description: elicitor inducible beta-1,3-glucanase Nt-SubE76
  misc_feature (1)..(315): Homolog of NCBI NO: 15236882 NR Description: glycosyl hydrolase family 17; protein id:
  misc_feature (1)..(316): Homolog of NCBI NO: 9758115 NR Description: beta-1,3-glucanase-like protein [Arabidopsis
  misc_feature (1)..(325): Homolog of NCBI NO: 21594590 NR Description: beta-1,3-glucanase-like protein [Arabidopsis
  misc_feature (1)..(325): Homolog of NCBI NO: 18423719 NR Description: glycosyl hydrolase family 17
  misc_feature (1)..(325): Homolog of NCBI NO: 18700155 NR Description: AT5g55180/MCO15_13 [Arabidopsis thaliana]

SEQ ID NO: 31304 - DNA, 1073 bp, Arabidopsis thaliana; identical to SEQ ID NO: 27714
  misc_feature (1)..(1073): Ceres Seq. ID no. 13499467
  misc_feature: MA Experiment ID: 108573 Result: Up-regulated in Transcription
  misc_feature: MA Experiment 108573 PARAMETER Experiment Name: At_Drought_cDNA_P Parameter: Timepoint (hr) Value: 6
  misc_feature: MA Experiment 108573 PARAMETER Experiment Name: At_Drought_cDNA_P Parameter: Tissue Value: Aerial
  misc_feature: MA Experiment 108573 PARAMETER Experiment Name: At_Drought_cDNA_P Parameter: Treatment Value: Drought vs. No Drought
  misc_feature: MA Experiment ID: 108607 Result: Up-regulated in Transcription
  misc_feature: MA Experiment 108607 PARAMETER Experiment Name: At_100uM_ABA_cDNA_P Parameter: Timepoint (hr) Value: 4
  misc_feature: MA Experiment 108607 PARAMETER Experiment Name: At_100uM_ABA_cDNA_P Parameter: Tissue Value: Aerial
  misc_feature: MA Experiment 108607 PARAMETER Experiment Name: At_100uM_ABA_cDNA_P Parameter: Treatment Value: 100uM ABA vs. No Treatment
  misc_feature: MA Experiment ID: 20000069 Result: Up-regulated in Transcription
  misc_feature: MA Experiment 20000069 PARAMETER Experiment Name: At_100uM_ABA_Mutants_cDNA_P Parameter: Plant Line Value: CS23
  misc_feature: MA Experiment 20000069 PARAMETER Experiment Name: At_100uM_ABA_Mutants_cDNA_P Parameter: Timepoint (hr) Value: 6
  misc_feature: MA Experiment 20000069 PARAMETER Experiment Name: At_100uM_ABA_Mutants_cDNA_P Parameter: Tissue Value: Aerial
  misc_feature: MA Experiment 20000069 PARAMETER Experiment Name: At_100uM_ABA_Mutants_cDNA_P Parameter: Treatment Value: 100uM ABA vs. No Treatment
  misc_feature: MA Experiment ID: 20000070 Result: Up-regulated in Transcription
  misc_feature: MA Experiment 20000070 PARAMETER Experiment Name: At_100uM_ABA_Mutants_cDNA_P Parameter: Plant Line Value: CS24
  misc_feature: MA Experiment 20000070 PARAMETER Experiment Name: At_100uM_ABA_Mutants_cDNA_P Parameter: Timepoint (hr) Value: 6
  misc_feature: MA Experiment 20000070 PARAMETER Experiment Name: At_100uM_ABA_Mutants_cDNA_P Parameter: Tissue Value: Aerial
  misc_feature: MA Experiment 20000070 PARAMETER Experiment Name: At_100uM_ABA_Mutants_cDNA_P Parameter: Treatment Value: 100uM ABA vs. No Treatment
  misc_feature: MA Experiment ID: 20000071 Result: Up-regulated in Transcription
  misc_feature: MA Experiment 20000071 PARAMETER Experiment Name: At_100uM_ABA_Mutants_cDNA_P Parameter: Plant Line Value: CS8104
  misc_feature: MA Experiment 20000071 PARAMETER Experiment Name: At_100uM_ABA_Mutants_cDNA_P Parameter: Timepoint (hr) Value: 6
  misc_feature: MA Experiment 20000071 PARAMETER Experiment Name: At_100uM_ABA_Mutants_cDNA_P Parameter: Tissue Value: Aerial
  misc_feature: MA Experiment 20000071 PARAMETER Experiment Name: At_100uM_ABA_Mutants_cDNA_P Parameter: Treatment Value: 100uM ABA vs. No Treatment
  misc_feature: MA Experiment ID: 20000072 Result: Up-regulated in Transcription
  misc_feature: MA Experiment 20000072 PARAMETER Experiment Name: At_100uM_ABA_Mutants_cDNA_P Parameter: Plant Line Value: CS8105
  misc_feature: MA Experiment 20000072 PARAMETER Experiment Name: At_100uM_ABA_Mutants_cDNA_P Parameter: Timepoint (hr) Value: 6
  misc_feature: MA Experiment 20000072 PARAMETER Experiment Name: At_100uM_ABA_Mutants_cDNA_P Parameter: Tissue Value: Aerial
  misc_feature: MA Experiment 20000072 PARAMETER Experiment Name: At_100uM_ABA_Mutants_cDNA_P Parameter: Treatment Value: 100uM ABA vs. No Treatment
  misc_feature: MA Experiment ID: 20000086 Result: Up-regulated in Transcription
  misc_feature: MA Experiment 20000086 PARAMETER Experiment Name: At_100uM_ABA_Mutants_cDNA_P Parameter: Plant Line Value: CS22
  misc_feature: MA Experiment 20000086 PARAMETER Experiment Name: At_100uM_ABA_Mutants_cDNA_P Parameter: Timepoint (hr) Value: 6
  misc_feature: MA Experiment 20000086 PARAMETER Experiment Name: At_100uM_ABA_Mutants_cDNA_P Parameter: Tissue Value: Aerial
  misc_feature: MA Experiment 20000086 PARAMETER Experiment Name: At_100uM_ABA_Mutants_cDNA_P Parameter: Treatment Value: 100uM ABA vs. No Treatment
  misc_feature: MA Experiment ID: 20000089 Result: Up-regulated in Transcription
  misc_feature: MA Experiment ID: 20000093 Result: Up-regulated in Transcription
  misc_feature: MA Experiment 20000093 PARAMETER Experiment Name: At_42deg_Heat_cDNA_P Parameter: Temperature (deg C) Value: 42 vs. 22
  misc_feature: MA Experiment 20000093 PARAMETER Experiment Name: At_42deg_Heat_cDNA_P Parameter: Timepoint (hr) Value: 0.5
  misc_feature: MA Experiment 20000093 PARAMETER Experiment Name: At_42deg_Heat_cDNA_P Parameter: Tissue Value: Aerial
  misc_feature: MA Experiment ID: 20000112 Result: Up-regulated in Transcription
  misc_feature: MA Experiment 20000112 PARAMETER Experiment Name: At_42deg_Heat_cDNA_P Parameter: Temperature (deg C) Value: 42 vs. 22
  misc_feature: MA Experiment 20000112 PARAMETER Experiment Name: At_42deg_Heat_cDNA_P Parameter: Timepoint (hr) Value: 2
  misc_feature: MA Experiment 20000112 PARAMETER Experiment Name: At_42deg_Heat_cDNA_P Parameter: Tissue Value: Aerial
  misc_feature: MA Experiment ID: 20000144 Result: Up-regulated in Transcription
  misc_feature: MA Experiment 20000144 PARAMETER Experiment Name: At_42deg_Heat_cDNA_P Parameter: Temperature (deg C) Value: 42 vs. 22
  misc_feature: MA Experiment 20000144 PARAMETER Experiment Name: At_42deg_Heat_cDNA_P Parameter: Timepoint (hr) Value: 1
  misc_feature: MA Experiment 20000144 PARAMETER Experiment Name: At_42deg_Heat_cDNA_P Parameter: Tissue Value: Aerial
  misc_feature: MA Experiment ID: 20000171 Result: Up-regulated in Transcription
  misc_feature: MA Experiment 20000171 PARAMETER Experiment Name: At_42deg_Heat_P Parameter: Age (day) Value: 14
  misc_feature: MA Experiment 20000171 PARAMETER Experiment Name: At_42deg_Heat_P Parameter: Organism Value: A. thaliana
  misc_feature: MA Experiment 20000171 PARAMETER Experiment Name: At_42deg_Heat_P Parameter: Plant Line Value: WS
  misc_feature: MA Experiment 20000171 PARAMETER Experiment Name: At_42deg_Heat_P Parameter: Temperature (deg C) Value: 42 vs. 22
  misc_feature: MA Experiment 20000171 PARAMETER Experiment Name: At_42deg_Heat_P Parameter: Timepoint (hr) Value: 1
  misc_feature: MA Experiment 20000171 PARAMETER Experiment Name: At_42deg_Heat_P Parameter: Tissue Value: Aerial
  misc_feature: MA Experiment ID: 20000224 Result: Down-regulated in Transcription
  misc_feature: MA Experiment ID: 20000235 Result: Down-regulated in Transcription
  misc_feature: MA Experiment 20000235 PARAMETER Experiment Name: At_Siliques_P Parameter: Age (day) Value: 21
  misc_feature: MA Experiment 20000235 PARAMETER Experiment Name: At_Siliques_P Parameter: Organism Value: A. thaliana
  misc_feature: MA Experiment 20000235 PARAMETER Experiment Name: At_Siliques_P Parameter: Plant Line Value: WS
  misc_feature: MA Experiment 20000235 PARAMETER Experiment Name: At_Siliques_P Parameter: Tissue Value: 5-10mm Siliques vs. Whole Plant
  misc_feature: MA Experiment ID: 20000437 Result: Up-regulated in Transcription
  misc_feature: MA Experiment 20000437 PARAMETER Experiment Name: At_Drought_P Parameter: Age (day) Value: 8
  misc_feature: MA Experiment 20000437 PARAMETER Experiment Name: At_Drought_P Parameter: Organism Value: A. thaliana
  misc_feature: MA Experiment 20000437 PARAMETER Experiment Name: At_Drought_P Parameter: Plant Line Value: WS
  misc_feature: MA Experiment 20000437 PARAMETER Experiment Name: At_Drought_P Parameter: Timepoint (hr) Value: 24
  misc_feature: MA Experiment 20000437 PARAMETER Experiment Name: At_Drought_P Parameter: Tissue Value: Whole Plant
  misc_feature: MA Experiment 20000437 PARAMETER Experiment Name: At_Drought_P Parameter: Treatment Value: Drought vs. No Drought

SEQ ID NO: 31305 - protein, 243 aa, Arabidopsis thaliana; identical to SEQ ID NO: 27715
  peptide (1)..(243): Ceres Seq. ID no. 13499468
  misc_feature (22)..(243): Pfam Name: Protein of unknown function, DUF584 Pfam Description: Protein of unknown function, DUF584
  misc_feature (149)..(243): Homolog of NCBI NO: 26452217 NR Description: unknown protein [Arabidopsis thaliana]
  misc_feature (149)..(243): Homolog of NCBI NO: 18412629 NR Description: expressed protein [Arabidopsis thaliana]
  misc_feature (114)..(241): Homolog of NCBI NO: 15234679 NR Description: hypothetical protein [Arabidopsis thaliana]
  misc_feature (114)..(241): Homolog of NCBI NO: 7487830 NR Description: hypothetical protein T8O5.180 - Arabidopsis
  misc_feature (109)..(237): Homolog of NCBI NO: 34908520 NR Description: P0423B08.9 [Oryza sativa (japonica
  misc_feature (9)..(243): Homolog of NCBI NO: 37534318 NR Description: putative prolyl 4-hydroxylase alpha subunit-like
  misc_feature (9)..(243): Homolog of NCBI NO: 38346328 NR Description: OJ000126_13.10 [Oryza sativa (japonica
  misc_feature (1)..(243): Homolog of NCBI NO: 21594619 NR Description: unknown [Arabidopsis thaliana]
  misc_feature (1)..(243): Homolog of NCBI NO: 18400614 NR Description: expressed protein [Arabidopsis thaliana]
  misc_feature (1)..(243): Homolog of NCBI NO: 15983450 NR Description: AT3g15040/K15M2_18 [Arabidopsis thaliana]

SEQ ID NO: 31306 - DNA, 1102 bp, Arabidopsis thaliana; identical to SEQ ID NO: 27716
  misc_feature (1)..(1102): Ceres Seq. ID no. 13621924
  misc_feature: MA Experiment ID: 108434 Result: Up-regulated in Transcription
  misc_feature: MA Experiment 108434 PARAMETER Experiment Name: At_Root_Tips_cDNA_P Parameter: Tissue Value: Root Tips
  misc_feature: MA Experiment ID: 108608 Result: Up-regulated in Transcription
  misc_feature: MA Experiment 108608 PARAMETER Experiment Name: At_100uM_ABA_cDNA_P Parameter: Timepoint (hr) Value: 1
  misc_feature: MA Experiment 108608 PARAMETER Experiment Name: At_100uM_ABA_cDNA_P Parameter: Tissue Value: Aerial
  misc_feature: MA Experiment 108608 PARAMETER Experiment Name: At_100uM_ABA_cDNA_P Parameter: Treatment Value: 100uM ABA vs. No Treatment
  misc_feature: MA Experiment ID: 20000166 Result: Up-regulated in Transcription
  misc_feature: MA Experiment 20000166 PARAMETER Experiment Name: At_100uM_ABA_P Parameter: Age (day) Value: 14
  misc_feature: MA Experiment 20000166 PARAMETER Experiment Name: At_100uM_ABA_P Parameter: Organism Value: A. thaliana
  misc_feature: MA Experiment 20000166 PARAMETER Experiment Name: At_100uM_ABA_P Parameter: Plant Line Value: WS
  misc_feature: MA Experiment 20000166 PARAMETER Experiment Name: At_100uM_ABA_P Parameter: Timepoint (hr) Value: 1
  misc_feature: MA Experiment 20000166 PARAMETER Experiment Name: At_100uM_ABA_P Parameter: Tissue Value: Aerial
  misc_feature: MA Experiment 20000166 PARAMETER Experiment Name: At_100uM_ABA_P Parameter: Treatment Value: 100uM ABA vs. No Treatment
  misc_feature: MA Experiment ID: 20000227 Result: Up-regulated in Transcription
  misc_feature: MA Experiment 20000227 PARAMETER Experiment Name: At_Root-Tips-vs-Tops_P Parameter: Tissue Value: Root Tips vs. Root Tops
  misc_feature: MA Experiment ID: 20000234 Result: Up-regulated in Transcription
  misc_feature: MA Experiment 20000234 PARAMETER Experiment Name: At_Siliques_P Parameter: Age (day) Value: 21
  misc_feature: MA Experiment 20000234 PARAMETER Experiment Name: At_Siliques_P Parameter: Organism Value: A. thaliana
  misc_feature: MA Experiment 20000234 PARAMETER Experiment Name: At_Siliques_P Parameter: Plant Line Value: WS
  misc_feature: MA Experiment 20000234 PARAMETER Experiment Name: At_Siliques_P Parameter: Tissue Value: Less Than 5mm Siliques vs. Whole Plant
  misc_feature: MA Experiment ID: 20000235 Result: Up-regulated in Transcription
  misc_feature: MA Experiment 20000235 PARAMETER Experiment Name: At_Siliques_P Parameter: Age (day) Value: 21
  misc_feature: MA Experiment 20000235 PARAMETER Experiment Name: At_Siliques_P Parameter: Organism Value: A. thaliana
  misc_feature: MA Experiment 20000235 PARAMETER Experiment Name: At_Siliques_P Parameter: Plant Line Value: WS
  misc_feature: MA Experiment 20000235 PARAMETER Experiment Name: At_Siliques_P Parameter: Tissue Value: 5-10mm Siliques vs. Whole Plant
  misc_feature: MA Experiment ID: 20000438 Result: Up-regulated in Transcription
  misc_feature: MA Experiment 20000438 PARAMETER Experiment Name: At_Shoots__P Parameter: Age (day) Value: 14
  misc_feature: MA Experiment 20000438 PARAMETER Experiment Name: At_Shoots__P Parameter: Tissue Value: Shoots vs. Whole Plant
  misc_feature: MA Experiment ID: 20000495 Result: Down-regulated in Transcription
  misc_feature: MA Experiment 20000495 PARAMETER Experiment Name: At_Guard_Cells_P Parameter: Harvest Date Value: 8/2/2002
  misc_feature: MA Experiment 20000495 PARAMETER Experiment Name: At_Guard_Cells_P Parameter: Organism Value: A. thaliana
  misc_feature: MA Experiment 20000495 PARAMETER Experiment Name: At_Guard_Cells_P Parameter: Tissue Value: Guard Cells vs. Leaves

SEQ ID NO: 31307 - protein, 255 aa, Arabidopsis thaliana; identical to SEQ ID NO: 27717
  peptide (1)..(255): Ceres Seq. ID no. 13621925
  misc_feature (4)..(241): Pfam Name: 14-3-3 protein Pfam Description: 14-3-3 protein
  misc_feature (1)..(250): Homolog of NCBI NO: 18417863 NR Description: 14-3-3 protein GF14 upsilon (grf5) [Arabidopsis
  misc_feature (2)..(255): Homolog of NCBI NO: 18396217 NR Description: 14-3-3 protein GF14 nu (grf7) [Arabidopsis
  misc_feature (3)..(250): Homolog of NCBI NO: 2921512 NR Description: GF14 protein [Fritillaria agrestis]
  misc_feature (2)..(255): Homolog of NCBI NO: 8515888 NR Description: 14-3-3 protein [Populus x canescens]
  misc_feature (1)..(255): Homolog of NCBI NO: 1168200 NR Description: 14-3-3-like protein GF14 psi (General regulatory
  misc_feature (1)..(255): Homolog of NCBI NO: 18421762 NR Description: 14-3-3 protein GF14 psi (grf3/RCI1) [Arabidopsis

SEQ ID NO: 31308 - protein, 246 aa, Arabidopsis thaliana; identical to SEQ ID NO: 27718
  peptide (1)..(246): Ceres Seq. ID no. 13621926
  misc_feature (1)..(232): Pfam Name: 14-3-3 protein Pfam Description: 14-3-3 protein
  misc_feature (1)..(241): Homolog of NCBI NO: 18417863 NR Description: 14-3-3 protein GF14 upsilon (grf5) [Arabidopsis
  misc_feature (1)..(246): Homolog of NCBI NO: 18396217 NR Description: 14-3-3 protein GF14 nu (grf7) [Arabidopsis
  misc_feature (1)..(241): Homolog of NCBI NO: 2921512 NR Description: GF14 protein [Fritillaria agrestis]
  misc_feature (1)..(246): Homolog of NCBI NO: 8515888 NR Description: 14-3-3 protein [Populus x canescens]
  misc_feature (1)..(246): Homolog of NCBI NO: 1168200 NR Description: 14-3-3-like protein GF14 psi (General regulatory
  misc_feature (1)..(246): Homolog of NCBI NO: 18421762 NR Description: 14-3-3 protein GF14 psi (grf3/RCI1) [Arabidopsis

SEQ ID NO: 31309 - protein, 233 aa, Arabidopsis thaliana; identical to SEQ ID NO: 27719
  peptide (1)..(233): Ceres Seq. ID no. 13621927
  misc_feature (1)..(219): Pfam Name: 14-3-3 protein Pfam Description: 14-3-3 protein
  misc_feature (1)..(228): Homolog of NCBI NO: 18417863 NR Description: 14-3-3 protein GF14 upsilon (grf5) [Arabidopsis
  misc_feature (1)..(233): Homolog of NCBI NO: 18396217 NR Description: 14-3-3 protein GF14 nu (grf7) [Arabidopsis
  misc_feature (1)..(228): Homolog of NCBI NO: 2921512 NR Description: GF14 protein [Fritillaria agrestis]
  misc_feature (1)..(233): Homolog of NCBI NO: 8515888 NR Description: 14-3-3 protein [Populus x canescens]
  misc_feature (1)..(233): Homolog of NCBI NO: 1168200 NR Description: 14-3-3-like protein GF14 psi (General regulatory
  misc_feature (1)..(233): Homolog of NCBI NO: 18421762 NR Description: 14-3-3 protein GF14 psi (grf3/RCI1) [Arabidopsis

SEQ ID NO: 31310 - DNA, 764 bp, Arabidopsis thaliana; identical to SEQ ID NO: 27720
  misc_feature (1)..(764): Ceres Seq. ID no. 12481981
  misc_feature: MA Experiment ID: 108462 Result: Down-regulated in Transcription
  misc_feature: MA Experiment 108462 PARAMETER Experiment Name: At_Germinating_Seeds_cDNA_P Parameter: Age (day) Value: 2 vs. 0
  misc_feature: MA Experiment 108462 PARAMETER Experiment Name: At_Germinating_Seeds_cDNA_P Parameter: Tissue Value: Germinating Seeds
  misc_feature: MA Experiment ID: 108464 Result: Down-regulated in Transcription
  misc_feature: MA Experiment 108464 PARAMETER Experiment Name: At_Germinating_Seeds_cDNA_P Parameter: Age (day) Value: 4 vs. 0
  misc_feature: MA Experiment 108464 PARAMETER Experiment Name: At_Germinating_Seeds_cDNA_P Parameter: Tissue Value: Germinating Seeds
  misc_feature: MA Experiment ID: 108488 Result: Down-regulated in Transcription
  misc_feature: MA Experiment ID: 20000184 Result: Down-regulated in Transcription
  misc_feature: MA Experiment 20000184 PARAMETER Experiment Name: At_Shoots__P Parameter: Age (day) Value: 7
  misc_feature: MA Experiment 20000184 PARAMETER Experiment Name: At_Shoots__P Parameter: Tissue Value: Shoots vs. Whole Plant
  misc_feature: MA Experiment ID: 20000224 Result: Up-regulated in Transcription
  misc_feature: MA Experiment ID: 20000264 Result: Up-regulated in Transcription
  misc_feature: MA Experiment 20000264 PARAMETER Experiment Name: At_Open_Flower_P Parameter: Age (day) Value: 21
  misc_feature: MA Experiment 20000264 PARAMETER Experiment Name: At_Open_Flower_P Parameter: Plant Line Value: WS
  misc_feature: MA Experiment 20000264 PARAMETER Experiment Name: At_Open_Flower_P Parameter: Tissue Value: Open Flower vs. Whole Plant
  misc_feature: MA Experiment ID: 20000794 Result: Up-regulated in Transcription
  misc_feature: MA Experiment 20000794 PARAMETER Experiment Name: At_Petals_P Parameter: Age (day) Value: 23-25 days
  misc_feature: MA Experiment 20000794 PARAMETER Experiment Name: At_Petals_P Parameter: Plant Line Value: WS
  misc_feature: MA Experiment 20000794 PARAMETER Experiment Name: At_Petals_P Parameter: Tissue Value: Petals vs. Whole plant
  misc_feature: MA Experiment ID: 20001557 Result: Down-regulated in Transcription
  misc_feature: MA Experiment 20001557 PARAMETER Experiment Name: At_Drought_Soil_Dry_P Parameter: Age (day) Value: 27
  misc_feature: MA Experiment 20001557 PARAMETER Experiment Name: At_Drought_Soil_Dry_P Parameter: Organism Value: A. thaliana
  misc_feature: MA Experiment 20001557 PARAMETER Experiment Name: At_Drought_Soil_Dry_P Parameter: Plant Line Value: WS
  misc_feature: MA Experiment 20001557 PARAMETER Experiment Name: At_Drought_Soil_Dry_P Parameter: Post Timepoint (hr) Value: 3
  misc_feature: MA Experiment 20001557 PARAMETER Experiment Name: At_Drought_Soil_Dry_P Parameter: Post-Treatment Value: Re-Water vs. No Drought
  misc_feature: MA Experiment 20001557 PARAMETER Experiment Name: At_Drought_Soil_Dry_P Parameter: Timepoint (day) Value: 13
  misc_feature: MA Experiment 20001557 PARAMETER Experiment Name: At_Drought_Soil_Dry_P Parameter: Treatment Value: Drought vs. No Drought

SEQ ID NO: 31311 - protein, 200 aa, Arabidopsis thaliana; identical to SEQ ID NO: 27721
  peptide (1)..(200): Ceres Seq. ID no. 12481982
  misc_feature (123)..(194): Pfam Name: Mpv17 / PMP22 family Pfam Description: Mpv17 / PMP22 family
  misc_feature (24)..(192): Homolog of NCBI NO: 34783266 NR Description: MPV17 protein [Homo sapiens]
  misc_feature (24)..(192): Homolog of NCBI NO: 4505241 NR Description: MpV17 transgene, murine homolog,
  misc_feature (5)..(185): Homolog of NCBI NO: 6679577 NR Description: peroxisomal membrane protein 2
  misc_feature (5)..(184): Homolog of NCBI NO: 9757841 NR Description: contains similarity to 22 kDa peroxisomal
  misc_feature (14)..(197): Homolog of NCBI NO: 21358267 NR Description: CG7970-PA [Drosophila melanogaster]
  misc_feature (4)..(189): Homolog of NCBI NO: 21553640 NR Description: contains similarity to 22 kDa peroxisomal
  misc_feature (5)..(189): Homolog of NCBI NO: 18422298 NR Description: putative protein
  misc_feature (40)..(177): Homolog of NCBI NO: 7485192 NR Description: hypothetical protein d13195c - Arabidopsis
  misc_feature (40)..(191): Homolog of NCBI NO: 30682784 NR Description: expressed protein [Arabidopsis thaliana]
  misc_feature (11)..(200): Homolog of NCBI NO: 15233520 NR Description: PEROXISOMAL MEMBRANE PROTEIN PMP22; protein id:

SEQ ID NO: 31312 - protein, 190 aa, Arabidopsis thaliana; identical to SEQ ID NO: 27722
  peptide (1)..(190): Ceres Seq. ID no. 12481983
  misc_feature (113)..(184): Pfam Name: Mpv17 / PMP22 family Pfam Description: Mpv17 / PMP22 family
  misc_feature (14)..(182): Homolog of NCBI NO: 34783266 NR Description: MPV17 protein [Homo sapiens]
  misc_feature (14)..(182): Homolog of NCBI NO: 4505241 NR Description: MpV17 transgene, murine homolog,
  misc_feature (1)..(175): Homolog of NCBI NO: 6679577 NR Description: peroxisomal membrane protein 2
  misc_feature (1)..(174): Homolog of NCBI NO: 9757841 NR Description: contains similarity to 22 kDa peroxisomal
  misc_feature (4)..(187): Homolog of NCBI NO: 21358267 NR Description: CG7970-PA [Drosophila melanogaster]
  misc_feature (1)..(179): Homolog of NCBI NO: 21553640 NR Description: contains similarity to 22 kDa peroxisomal
  misc_feature (1)..(179): Homolog of NCBI NO: 18422298 NR Description: putative protein
  misc_feature (30)..(167): Homolog of NCBI NO: 7485192 NR Description: hypothetical protein d13195c - Arabidopsis
  misc_feature (30)..(181): Homolog of NCBI NO: 30682784 NR Description: expressed protein [Arabidopsis thaliana]
  misc_feature (1)..(190): Homolog of NCBI NO: 15233520 NR Description: PEROXISOMAL MEMBRANE PROTEIN PMP22; protein id:

SEQ ID NO: 31313 - DNA, 680 bp, Arabidopsis thaliana; identical to SEQ ID NO: 27723
  misc_feature (1)..(680): Ceres Seq. ID no. 12338681
  misc_feature: MA Experiment ID: 20000307 Result: Down-regulated in Transcription
  misc_feature: MA Experiment 20000307 PARAMETER Experiment Name: At_Germinating_Seeds_Sub_P Parameter: Age (hr) Value: 24 vs. 0
  misc_feature: MA Experiment 20000307 PARAMETER Experiment Name: At_Germinating_Seeds_Sub_P Parameter: Organism Value: A. thaliana
  misc_feature: MA Experiment 20000307 PARAMETER Experiment Name: At_Germinating_Seeds_Sub_P Parameter: Plant Line Value: WS
  misc_feature: MA Experiment 20000307 PARAMETER Experiment Name: At_Germinating_Seeds_Sub_P Parameter: Tissue Value: Germinating Seeds
  misc_feature: MA Experiment ID: 20000440 Result: Up-regulated in Transcription
  misc_feature: MA Experiment 20000440 PARAMETER Experiment Name: At_Closed-Flower__Sub_P Parameter: Tissue Value: Closed Flower vs. Whole Plant
  misc_feature: Phenotype: WHOLE PLANT Color-Dark Green
  misc_feature: Phenotype: WHOLE PLANT Size-Small
  misc_feature: Phenotype: WHOLE PLANT Color-Dark Green
  misc_feature: Phenotype: WHOLE PLANT Size-Small
  misc_feature: Phenotype: WHOLE PLANT Color-Dark Green
  misc_feature: Phenotype: WHOLE PLANT Size-Small

SEQ ID NO: 31314 - protein, 173 aa, Arabidopsis thaliana; identical to SEQ ID NO: 27724
  peptide (1)..(173): Ceres Seq. ID no. 12338682
  misc_feature (60)..(131): Pfam Name: RNA recognition motif. (a.k.a. RRM, RBD, or RNP domain) Pfam Description: RNA recognition motif. (a.k.a. RRM, RBD, or RNP
  misc_feature (24)..(171): Homolog of NCBI NO: 34906972 NR Description: putative glycine-rich RNA-binding protein 2
  misc_feature (24)..(148): Homolog of NCBI NO: 7489099 NR Description: RNA-binding protein RGP-3 - wood tobacco
  misc_feature (24)..(170): Homolog of NCBI NO: 7439995 NR Description: RNA binding protein 3 - wood tobacco
  misc_feature (24)..(172): Homolog of NCBI NO: 7439994 NR Description: glycine-rich RNA-binding protein - garden pea
  misc_feature (24)..(158): Homolog of NCBI NO: 21553972 NR Description: glycine-rich RNA binding protein, putative
  misc_feature (24)..(158): Homolog of NCBI NO: 15229525 NR Description: glycine-rich RNA-binding protein
  misc_feature (43)..(173): Homolog of NCBI NO: 322514 NR Description: glycine-rich RNA-binding protein (clone A81) -
  misc_feature (24)..(173): Homolog of NCBI NO: 15236359 NR Description: glycine-rich RNA-binding protein AtGRP2
  misc_feature (24)..(172): Homolog of NCBI NO: 30682622 NR Description: glycine-rich RNA-binding protein (AtGRP2)
  misc_feature (24)..(173): Homolog of NCBI NO: 2826811 NR Description: AtGRP2 [Arabidopsis thaliana]

SEQ ID NO: 31315 - protein, 150 aa, Arabidopsis thaliana; identical to SEQ ID NO: 27725
  peptide (1)..(150): Ceres Seq. ID no. 12338683
  misc_feature (37)..(108): Pfam Name: RNA recognition motif. (a.k.a. RRM, RBD, or RNP domain) Pfam Description: RNA recognition motif. (a.k.a. RRM, RBD, or RNP
  misc_feature (1)..(148): Homolog of NCBI NO: 34906972 NR Description: putative glycine-rich RNA-binding protein 2
  misc_feature (1)..(125): Homolog of NCBI NO: 7489099 NR Description: RNA-binding protein RGP-3 - wood tobacco
  misc_feature (1)..(147): Homolog of NCBI NO: 7439995 NR Description: RNA binding protein 3 - wood tobacco
  misc_feature (1)..(149): Homolog of NCBI NO: 7439994 NR Description: glycine-rich RNA-binding protein - garden pea
  misc_feature (1)..(135): Homolog of NCBI NO: 21553972 NR Description: glycine-rich RNA binding protein, putative
  misc_feature (1)..(135): Homolog of NCBI NO: 15229525 NR Description: glycine-rich RNA-binding protein
  misc_feature (20)..(150): Homolog of NCBI NO: 322514 NR Description: glycine-rich RNA-binding protein (clone A81) -
  misc_feature (1)..(150): Homolog of NCBI NO: 15236359 NR Description: glycine-rich RNA-binding protein AtGRP2
  misc_feature (1)..(149): Homolog of NCBI NO: 30682622 NR Description: glycine-rich RNA-binding protein (AtGRP2)
  misc_feature (1)..(150): Homolog of NCBI NO: 2826811 NR Description: AtGRP2 [Arabidopsis thaliana]

SEQ ID NO: 31316 - protein, 125 aa, Arabidopsis thaliana; identical to SEQ ID NO: 27726
  peptide (1)..(125): Ceres Seq. ID no. 12338685
  misc_feature (12)..(83): Pfam Name: RNA recognition motif. (a.k.a. RRM, RBD, or RNP domain) Pfam Description: RNA recognition motif. (a.k.a. RRM, RBD, or RNP
  misc_feature (1)..(123): Homolog of NCBI NO: 34906972 NR Description: putative glycine-rich RNA-binding protein 2
  misc_feature (1)..(100): Homolog of NCBI NO: 7489099 NR Description: RNA-binding protein RGP-3 - wood tobacco
  misc_feature (1)..(122): Homolog of NCBI NO: 7439995 NR Description: RNA binding protein 3 - wood tobacco
  misc_feature (1)..(124): Homolog of NCBI NO: 7439994 NR Description: glycine-rich RNA-binding protein - garden pea
  misc_feature (1)..(110): Homolog of NCBI NO: 21553972 NR Description: glycine-rich RNA binding protein, putative
  misc_feature (1)..(110): Homolog of NCBI NO: 15229525 NR Description: glycine-rich RNA-binding protein
  misc_feature (1)..(125): Homolog of NCBI NO: 322514 NR Description: glycine-rich RNA-binding protein (clone A81) -
  misc_feature (1)..(125): Homolog of NCBI NO: 15236359 NR Description: glycine-rich RNA-binding protein AtGRP2
  misc_feature (1)..(124): Homolog of NCBI NO: 30682622 NR Description: glycine-rich RNA-binding protein (AtGRP2)
  misc_feature (1)..(125): Homolog of NCBI NO: 2826811 NR Description: AtGRP2 [Arabidopsis thaliana]

SEQ ID NO: 31317 - DNA, 1219 bp, Arabidopsis thaliana; identical to SEQ ID NO: 27727
  misc_feature (1)..(1219): Ceres Seq. ID no. 13487573
  misc_feature: MA Experiment ID: 108434 Result: Down-regulated in Transcription
  misc_feature: MA Experiment 108434 PARAMETER Experiment Name: At_Root_Tips_cDNA_P Parameter: Tissue Value: Root Tips
  misc_feature: MA Experiment ID: 108501 Result: Down-regulated in Transcription
  misc_feature: MA Experiment 108501 PARAMETER Experiment Name: At_ap2_floral_buds_cDNA_P Parameter: Plant Line Value: ap2 (Ler.)
  misc_feature: MA Experiment 108501 PARAMETER Experiment Name: At_ap2_floral_buds_cDNA_P Parameter: Tissue Value: Closed Flower
  misc_feature: MA Experiment ID: 20000171 Result: Up-regulated in Transcription
  misc_feature: MA Experiment 20000171 PARAMETER Experiment Name: At_42deg_Heat_P Parameter: Age (day) Value: 14
  misc_feature: MA Experiment 20000171 PARAMETER Experiment Name: At_42deg_Heat_P Parameter: Organism Value: A. thaliana
  misc_feature: MA Experiment 20000171 PARAMETER Experiment Name: At_42deg_Heat_P Parameter: Plant Line Value: WS
  misc_feature: MA Experiment 20000171 PARAMETER Experiment Name: At_42deg_Heat_P Parameter: Temperature (deg C) Value: 42 vs. 22
  misc_feature: MA Experiment 20000171 PARAMETER Experiment Name: At_42deg_Heat_P Parameter: Timepoint (hr) Value: 1
  misc_feature: MA Experiment 20000171 PARAMETER Experiment Name: At_42deg_Heat_P Parameter: Tissue Value: Aerial
  misc_feature: MA Experiment ID: 20000437 Result: Up-regulated in Transcription
  misc_feature: MA Experiment 20000437 PARAMETER Experiment Name: At_Drought_P Parameter: Age (day) Value: 8
  misc_feature: MA Experiment 20000437 PARAMETER Experiment Name: At_Drought_P Parameter: Organism Value: A. thaliana
  misc_feature: MA Experiment 20000437 PARAMETER Experiment Name: At_Drought_P Parameter: Plant Line Value: WS
  misc_feature: MA Experiment 20000437 PARAMETER Experiment Name: At_Drought_P Parameter: Timepoint (hr) Value: 24
  misc_feature: MA Experiment 20000437 PARAMETER Experiment Name: At_Drought_P Parameter: Tissue Value: Whole Plant
  misc_feature: MA Experiment 20000437 PARAMETER Experiment Name: At_Drought_P Parameter: Treatment Value: Drought vs. No Drought

SEQ ID NO: 31318 - protein, 316 aa, Arabidopsis thaliana; identical to SEQ ID NO: 27728
  peptide (1)..(316): Ceres Seq. ID no. 13487574
  misc_feature (39)..(309): Pfam Name: Protein of unknown function (DUF789) Pfam Description: Protein of unknown function (DUF789)
  misc_feature (33)..(280): Homolog of NCBI NO: 22328289 NR Description: expressed protein [Arabidopsis thaliana]
  misc_feature (226)..(314): Homolog of NCBI NO: 9280648 NR Description: F21B7.22 [Arabidopsis thaliana]
  misc_feature (38)..(252): Homolog of NCBI NO: 9280648 NR Description: F21B7.22 [Arabidopsis thaliana]
  misc_feature (38)..(309): Homolog of NCBI NO: 18958013 NR Description: At1g03610/F21B7_13 [Arabidopsis thaliana]
  misc_feature (38)..(309): Homolog of NCBI NO: 18379117 NR Description: expressed protein [Arabidopsis thaliana]
  misc_feature (25)..(252): Homolog of NCBI NO: 7486201 NR Description: hypothetical protein F26K10.30 - Arabidopsis
  misc_feature (59)..(316): Homolog of NCBI NO: 19310572 NR Description: unknown protein [Arabidopsis thaliana]
  misc_feature (32)..(316): Homolog of NCBI NO: 30687867 NR Description: expressed protein [Arabidopsis thaliana]
  misc_feature (33)..(316): Homolog of NCBI NO: 21594686 NR Description: unknown [Arabidopsis thaliana]
  misc_feature (32)..(316): Homolog of NCBI NO: 18417136 NR Description: expressed protein [Arabidopsis thaliana]

SEQ ID NO: 31319 - protein, 285 aa, Arabidopsis thaliana; identical to SEQ ID NO: 27729
  peptide (1)..(285): Ceres Seq. ID no. 13487575
  misc_feature (8)..(278): Pfam Name: Protein of unknown function (DUF789) Pfam Description: Protein of unknown function (DUF789)
  misc_feature (2)..(249): Homolog of NCBI NO: 22328289 NR Description: expressed protein [Arabidopsis thaliana]
  misc_feature (195)..(283): Homolog of NCBI NO: 9280648 NR Description: F21B7.22 [Arabidopsis thaliana]
  misc_feature (7)..(221): Homolog of NCBI NO: 9280648 NR Description: F21B7.22 [Arabidopsis thaliana]
  misc_feature (7)..(278): Homolog of NCBI NO: 18958013 NR Description: At1g03610/F21B7_13 [Arabidopsis thaliana]
  misc_feature (7)..(278): Homolog of NCBI NO: 18379117 NR Description: expressed protein [Arabidopsis thaliana]
  misc_feature (1)..(221): Homolog of NCBI NO: 7486201 NR Description: hypothetical protein F26K10.30 - Arabidopsis
  misc_feature (28)..(285): Homolog of NCBI NO: 19310572 NR Description: unknown protein [Arabidopsis thaliana]
  misc_feature (1)..(285): Homolog of NCBI NO: 30687867 NR Description: expressed protein [Arabidopsis thaliana]
  misc_feature (2)..(285): Homolog of NCBI NO: 21594686 NR Description: unknown [Arabidopsis thaliana]
  misc_feature (1)..(285): Homolog of NCBI NO: 18417136 NR Description: expressed protein [Arabidopsis thaliana]

SEQ ID NO: 31320 - protein, 284 aa, Arabidopsis thaliana; identical to SEQ ID NO: 27730
  peptide (1)..(284): Ceres Seq. ID no. 13487576
  misc_feature (7)..(277): Pfam Name: Protein of unknown function (DUF789) Pfam Description: Protein of unknown function (DUF789)
  misc_feature (1)..(248): Homolog of NCBI NO: 22328289 NR Description: expressed protein [Arabidopsis thaliana]
  misc_feature (194)..(282): Homolog of NCBI NO: 9280648 NR Description: F21B7.22 [Arabidopsis thaliana]
  misc_feature (6)..(220): Homolog of NCBI NO: 9280648 NR Description: F21B7.22 [Arabidopsis thaliana]
  misc_feature (6)..(277): Homolog of NCBI NO: 18958013 NR Description: At1g03610/F21B7_13 [Arabidopsis thaliana]
  misc_feature (6)..(277): Homolog of NCBI NO: 18379117 NR Description: expressed protein [Arabidopsis thaliana]
  misc_feature (1)..(220): Homolog of NCBI NO: 7486201 NR Description: hypothetical protein F26K10.30 - Arabidopsis
  misc_feature (27)..(284): Homolog of NCBI NO: 19310572 NR Description: unknown protein [Arabidopsis thaliana]
  misc_feature (1)..(284): Homolog of NCBI NO: 30687867 NR Description: expressed protein [Arabidopsis thaliana]
  misc_feature (1)..(284): Homolog of NCBI NO: 21594686 NR Description: unknown [Arabidopsis thaliana]
  misc_feature (1)..(284): Homolog of NCBI NO: 18417136 NR Description: expressed protein [Arabidopsis thaliana]

SEQ ID NO: 31321 - DNA, 930 bp, Arabidopsis thaliana; identical to SEQ ID NO: 27731
  misc_feature (1)..(930): Ceres Seq. ID no. 13493755
  misc_feature: MA Experiment ID: 108434 Result: Up-regulated in Transcription
  misc_feature: MA Experiment 108434 PARAMETER Experiment Name: At_Root_Tips_cDNA_P Parameter: Tissue Value: Root Tips
  misc_feature: MA Experiment ID: 108461 Result: Down-regulated in Transcription
  misc_feature: MA Experiment 108461 PARAMETER Experiment Name: At_Germinating_Seeds_cDNA_P Parameter: Age (day) Value: 1 vs. 0
  misc_feature: MA Experiment 108461 PARAMETER Experiment Name: At_Germinating_Seeds_cDNA_P Parameter: Tissue Value: Germinating Seeds
  misc_feature: MA Experiment ID: 108462 Result: Down-regulated in Transcription
  misc_feature: MA Experiment 108462 PARAMETER Experiment Name: At_Germinating_Seeds_cDNA_P Parameter: Age (day) Value: 2 vs. 0
  misc_feature: MA Experiment 108462 PARAMETER Experiment Name: At_Germinating_Seeds_cDNA_P Parameter: Tissue Value: Germinating Seeds
  misc_feature: MA Experiment ID: 108463 Result: Down-regulated in Transcription
  misc_feature: MA Experiment 108463 PARAMETER Experiment Name: At_Germinating_Seeds_cDNA_P Parameter: Age (day) Value: 3 vs. 0
  misc_feature: MA Experiment 108463 PARAMETER Experiment Name: At_Germinating_Seeds_cDNA_P Parameter: Tissue Value: Germinating Seeds
  misc_feature: MA Experiment ID: 108464 Result: Down-regulated in Transcription
  misc_feature: MA Experiment 108464 PARAMETER Experiment Name: At_Germinating_Seeds_cDNA_P Parameter: Age (day) Value: 4 vs. 0
  misc_feature: MA Experiment 108464 PARAMETER Experiment Name: At_Germinating_Seeds_cDNA_P Parameter: Tissue Value: Germinating Seeds
  misc_feature: MA Experiment ID: 20000090 Result: Up-regulated in Transcription
  misc_feature: MA Experiment ID: 20000180 Result: Down-regulated in Transcription
  misc_feature: MA Experiment 20000180 PARAMETER Experiment Name: At_Germinating_Seeds_P Parameter: Age (hr) Value: 24 vs. 0
  misc_feature: MA Experiment 20000180 PARAMETER Experiment Name: At_Germinating_Seeds_P Parameter: Tissue Value: Germinating Seeds
  misc_feature: MA Experiment ID: 20000224 Result: Down-regulated in Transcription
  misc_feature: MA Experiment ID: 20001248 Result: Up-regulated in Transcription
  misc_feature: MA Experiment 20001248 PARAMETER Experiment Name: At_Far-red-induction_P Parameter: Age (day) Value: 7
  misc_feature: MA Experiment 20001248 PARAMETER Experiment Name: At_Far-red-induction_P Parameter: Light Value: Far-red vs. White
  misc_feature: MA Experiment 20001248 PARAMETER Experiment Name: At_Far-red-induction_P Parameter: Organism Value: A. thaliana
  misc_feature: MA Experiment 20001248 PARAMETER Experiment Name: At_Far-red-induction_P Parameter: Plant Line Value: Columbia
  misc_feature: MA Experiment 20001248 PARAMETER Experiment Name: At_Far-red-induction_P Parameter: Timepoint (hr) Value: 4
  misc_feature: MA Experiment 20001248 PARAMETER Experiment Name: At_Far-red-induction_P Parameter: Tissue Value: Whole Plant

SEQ ID NO: 31322 - protein, 229 aa, Arabidopsis thaliana; identical to SEQ ID NO: 27732
  peptide (1)..(229): Ceres Seq. ID no. 13493756
  misc_feature (46)..(120): Pfam Name: Nucleotide-sensitive chloride conductance Pfam Description: Nucleotide-sensitive chloride conductance
  misc_feature (49)..(158): Homolog of NCBI NO: 544031 NR Description: Chloride conductance regulatory protein ICln
  misc_feature (49)..(158): Homolog of NCBI NO: 13431571 NR Description: Chloride conductance regulatory protein ICln (Chloride channel, nucleotide sensitive 1A) (Chloride ion current
  misc_feature (27)..(158): Homolog of NCBI NO: 2197127 NR Description: swelling-induced chloride conductance regulatory
  misc_feature (27)..(158): Homolog of NCBI NO: 7513563 NR Description: swelling-induced chloride conductance regulatory
  misc_feature (27)..(158): Homolog of NCBI NO: 1095482 NR Description: Cl current-related protein
  misc_feature (27)..(158): Homolog of NCBI NO: 1060971 NR Description: chloride channel [Oryctolagus cuniculus]
  misc_feature (97)..(229): Homolog of NCBI NO: 21671879 NR Description: Hypothetical protein [Oryza sativa (japonica
  misc_feature (58)..(229): Homolog of NCBI NO: 37531488 NR Description: hypothetical protein [Oryza sativa (japonica
  misc_feature (1)..(100): Homolog of NCBI NO: 37531484 NR Description: unknown protein [Oryza sativa (japonica
  misc_feature (1)..(229): Homolog of NCBI NO: 15241766 NR Description: expressed protein [Arabidopsis thaliana]

SEQ ID NO: 31323 - protein, 200 aa, Arabidopsis thaliana; identical to SEQ ID NO: 27733
  peptide (1)..(200): Ceres Seq. ID no. 13493757
  misc_feature (17)..(91): Pfam Name: Nucleotide-sensitive chloride conductance Pfam Description: Nucleotide-sensitive chloride conductance
  misc_feature (20)..(129): Homolog of NCBI NO: 544031 NR Description: Chloride conductance regulatory protein ICln
  misc_feature (20)..(129): Homolog of NCBI NO: 13431571 NR Description: Chloride conductance regulatory protein ICln (Chloride channel, nucleotide sensitive 1A) (Chloride ion current
  misc_feature (1)..(129): Homolog of NCBI NO: 7513563 NR Description: swelling-induced chloride conductance regulatory
  misc_feature (1)..(129): Homolog of NCBI NO: 2197127 NR Description: swelling-induced chloride conductance regulatory
  misc_feature (1)..(129): Homolog of NCBI NO: 1095482 NR Description: Cl current-related protein
  misc_feature (1)..(129): Homolog of NCBI NO: 1060971 NR Description: chloride channel [Oryctolagus cuniculus]
  misc_feature (68)..(200): Homolog of NCBI NO: 21671879 NR Description: Hypothetical protein [Oryza sativa (japonica
  misc_feature (29)..(200): Homolog of NCBI NO: 37531488 NR Description: hypothetical protein [Oryza sativa (japonica
  misc_feature (1)..(71): Homolog of NCBI NO: 37531484 NR Description: unknown protein [Oryza sativa (japonica
  misc_feature (1)..(200): Homolog of NCBI NO: 15241766 NR Description: expressed protein [Arabidopsis thaliana]

SEQ ID NO: 31324 - protein, 164 aa, Arabidopsis thaliana; identical to SEQ ID NO: 27734
  peptide (1)..(164): Ceres Seq. ID no. 13493758
  misc_feature (1)..(55): Pfam Name: Nucleotide-sensitive chloride conductance Pfam Description: Nucleotide-sensitive chloride conductance
  misc_feature (1)..(93): Homolog of NCBI NO: 544031 NR Description: Chloride conductance regulatory protein ICln
  misc_feature (1)..(93): Homolog of NCBI NO: 13431571 NR Description: Chloride conductance regulatory protein ICln (Chloride channel, nucleotide sensitive 1A) (Chloride ion current
  misc_feature (1)..(93): Homolog of NCBI NO: 7513563 NR Description: swelling-induced chloride conductance regulatory
  misc_feature (1)..(93): Homolog of NCBI NO: 1095482 NR Description: Cl current-related protein
  misc_feature (1)..(93): Homolog of NCBI NO: 2197127 NR Description: swelling-induced chloride conductance regulatory
  misc_feature (1)..(93): Homolog of NCBI NO: 1060971 NR Description: chloride channel [Oryctolagus cuniculus]
  misc_feature (32)..(164): Homolog of NCBI NO: 21671879 NR Description: Hypothetical protein [Oryza sativa (japonica
  misc_feature (1)..(164): Homolog of NCBI NO: 37531488 NR Description: hypothetical protein [Oryza sativa (japonica
  misc_feature (1)..(35): Homolog of NCBI NO: 37531484 NR Description: unknown protein [Oryza sativa (japonica
  misc_feature (1)..(164): Homolog of NCBI NO: 15241766 NR Description: expressed protein [Arabidopsis thaliana]

SEQ ID NO: 31325 - DNA, 825 bp, Arabidopsis thaliana; identical to SEQ ID NO: 27735
  misc_feature (1)..(825): Ceres Seq. ID no. 13489945
  misc_feature: MA Experiment ID: 20000235 Result: Down-regulated in Transcription
  misc_feature: MA Experiment 20000235 PARAMETER Experiment Name: At_Siliques_P Parameter: Age (day) Value: 21
  misc_feature: MA Experiment 20000235 PARAMETER Experiment Name: At_Siliques_P Parameter: Organism Value: A. thaliana
  misc_feature: MA Experiment 20000235 PARAMETER Experiment Name: At_Siliques_P Parameter: Plant Line Value: WS
  misc_feature: MA Experiment 20000235 PARAMETER Experiment Name: At_Siliques_P Parameter: Tissue Value: 5-10mm Siliques vs. Whole Plant
  misc_feature: MA Experiment ID: 20000495 Result: Up-regulated in Transcription
  misc_feature: MA Experiment 20000495 PARAMETER Experiment Name: At_Guard_Cells_P Parameter: Harvest Date Value: 8/2/2002
  misc_feature: MA Experiment 20000495 PARAMETER Experiment Name: At_Guard_Cells_P Parameter: Organism Value: A. thaliana
  misc_feature: MA Experiment 20000495 PARAMETER Experiment Name: At_Guard_Cells_P Parameter: Tissue Value: Guard Cells vs. Leaves
  misc_feature: MA Experiment ID: 20000496 Result: Up-regulated in Transcription
  misc_feature: MA Experiment 20000496 PARAMETER Experiment Name: At_Guard_Cells_P Parameter: Harvest Date Value: 7/19/2002
  misc_feature: MA Experiment 20000496 PARAMETER Experiment Name: At_Guard_Cells_P Parameter: Organism Value: Canola
  misc_feature: MA Experiment 20000496 PARAMETER Experiment Name: At_Guard_Cells_P Parameter: Tissue Value: Guard Cells vs. Leaves
  misc_feature: MA Experiment ID: 20001248 Result: Up-regulated in Transcription
  misc_feature: MA Experiment 20001248 PARAMETER Experiment Name: At_Far-red-induction_P Parameter: Age (day) Value: 7
  misc_feature: MA Experiment 20001248 PARAMETER Experiment Name: At_Far-red-induction_P Parameter: Light Value: Far-red vs. White
  misc_feature: MA Experiment 20001248 PARAMETER Experiment Name: At_Far-red-induction_P Parameter: Organism Value: A. thaliana
  misc_feature: MA Experiment 20001248 PARAMETER Experiment Name: At_Far-red-induction_P Parameter: Plant Line Value: Columbia
  misc_feature: MA Experiment 20001248 PARAMETER Experiment Name: At_Far-red-induction_P Parameter: Timepoint (hr) Value: 4
  misc_feature: MA Experiment 20001248 PARAMETER Experiment Name: At_Far-red-induction_P Parameter: Tissue Value: Whole Plant
  misc_feature: MA Experiment ID: 20001451 Result: Up-regulated in Transcription
  misc_feature: MA Experiment 20001451 PARAMETER Experiment Name: At_Far-red-induction_P Parameter: Age (day) Value: 7
  misc_feature: MA Experiment 20001451 PARAMETER Experiment Name: At_Far-red-induction_P Parameter: Light Value: Far-red vs. White
  misc_feature: MA Experiment 20001451 PARAMETER Experiment Name: At_Far-red-induction_P Parameter: Organism Value: A. thaliana
  misc_feature: MA Experiment 20001451 PARAMETER Experiment Name: At_Far-red-induction_P Parameter: Plant Line Value: Columbia
  misc_feature: MA Experiment 20001451 PARAMETER Experiment Name: At_Far-red-induction_P Parameter: Timepoint (hr) Value: 24
  misc_feature: MA Experiment 20001451 PARAMETER Experiment Name: At_Far-red-induction_P Parameter: Tissue Value: Whole Plant

SEQ ID NO: 31326 - protein, 125 aa, Arabidopsis thaliana; identical to SEQ ID NO: 27736
  peptide (1)..(125): Ceres Seq. ID no. 13489946
  misc_feature (13)..(42): Pfam Name: SAM domain (Sterile alpha motif) Pfam Description: SAM domain (Sterile alpha motif)
  misc_feature (1)..(125): Homolog of NCBI NO: 18398048 NR Description: auxin-regulated protein [Arabidopsis thaliana]
  misc_feature (1)..(125): Homolog of NCBI NO: 6466959 NR Description: unknown protein [Arabidopsis thaliana]

SEQ ID NO: 31327 - protein, 77 aa, Arabidopsis thaliana; identical to SEQ ID NO: 27737
  peptide (1)..(77): Ceres Seq. ID no. 13489947
  misc_feature (1)..(77): Homolog of NCBI NO: 18398048 NR Description: auxin-regulated protein [Arabidopsis thaliana]
  misc_feature (1)..(77): Homolog of NCBI NO: 6466959 NR Description: unknown protein [Arabidopsis thaliana]

SEQ ID NO: 31328 - DNA, 1104 bp, Arabidopsis thaliana; identical to SEQ ID NO: 27738
  misc_feature (1)..(1104): Ceres Seq. ID no. 12331667
  misc_feature: MA Experiment ID: 108573 Result: Up-regulated in Transcription
  misc_feature: MA Experiment 108573 PARAMETER Experiment Name: At_Drought_cDNA_P Parameter: Timepoint (hr) Value: 6
  misc_feature: MA Experiment 108573 PARAMETER Experiment Name: At_Drought_cDNA_P Parameter: Tissue Value: Aerial
  misc_feature: MA Experiment 108573 PARAMETER Experiment Name: At_Drought_cDNA_P Parameter: Treatment Value: Drought vs. No Drought
  misc_feature: MA Experiment ID: 20000171 Result: Up-regulated in Transcription
  misc_feature: MA Experiment 20000171 PARAMETER Experiment Name: At_42deg_Heat_P Parameter: Age (day) Value: 14
  misc_feature: MA Experiment 20000171 PARAMETER Experiment Name: At_42deg_Heat_P Parameter: Organism Value: A. thaliana
  misc_feature: MA Experiment 20000171 PARAMETER Experiment Name: At_42deg_Heat_P Parameter: Plant Line Value: WS
  misc_feature: MA Experiment 20000171 PARAMETER Experiment Name: At_42deg_Heat_P Parameter: Temperature (deg C) Value: 42 vs. 22
  misc_feature: MA Experiment 20000171 PARAMETER Experiment Name: At_42deg_Heat_P Parameter: Timepoint (hr) Value: 1
  misc_feature: MA Experiment 20000171 PARAMETER Experiment Name: At_42deg_Heat_P Parameter: Tissue Value: Aerial
  misc_feature: MA Experiment ID: 20000224 Result: Down-regulated in Transcription
  misc_feature: MA Experiment ID: 20001905 Result: Up-regulated in Transcription
  misc_feature: MA Experiment 20001905 PARAMETER Experiment Name: At_Drought_Reproduction_P Parameter: Age (day) Value: 40
  misc_feature: MA Experiment 20001905 PARAMETER Experiment Name: At_Drought_Reproduction_P Parameter: Organism Value: A. thaliana
  misc_feature: MA Experiment 20001905 PARAMETER Experiment Name: At_Drought_Reproduction_P Parameter: Plant Line Value: WS
  misc_feature: MA Experiment 20001905 PARAMETER Experiment Name: At_Drought_Reproduction_P Parameter: Timepoint (day) Value: 10
  misc_feature: MA Experiment 20001905 PARAMETER Experiment Name: At_Drought_Reproduction_P Parameter: Tissue Value: Rosettes
  misc_feature: MA Experiment 20001905 PARAMETER Experiment Name: At_Drought_Reproduction_P Parameter: Treatment Value: Drought vs. No Drought

SEQ ID NO: 31329 - protein, 152 aa, Arabidopsis thaliana; identical to SEQ ID NO: 27739
  peptide (1)..(152): Ceres Seq. ID no. 12331668
  misc_feature (7)..(146): Homolog of NCBI NO: 27469691 NR Description: Similar to chromosome 20 open reading frame 169
  misc_feature (7)..(145): Homolog of NCBI NO: 12838117 NR Description: unnamed protein product [Mus musculus]
  misc_feature (7)..(145): Homolog of NCBI NO: 12833500 NR Description: unnamed protein product [Mus musculus]
  misc_feature (1)..(145): Homolog of NCBI NO: 34860687 NR Description: similar to chromosome 20 open reading frame 169
  misc_feature (1)..(75): Homolog of NCBI NO: 34912286 NR Description: P0451D05.3 [Oryza sativa (japonica
  misc_feature (7)..(146): Homolog of NCBI NO: 23618848 NR Description: chromosome 20 open reading frame 169
  misc_feature (7)..(146): Homolog of NCBI NO: 11561813 NR Description: dJ453C12.4.1 (novel protein (similar to
  misc_feature (1)..(146): Homolog of NCBI NO: 14270398 NR Description: hypothetical protein [Homo sapiens]
  misc_feature (1)..(150): Homolog of NCBI NO: 12324600 NR Description: unknown protein; 19658-19089 [Arabidopsis
  misc_feature (1)..(152): Homolog of NCBI NO: 18412584 NR Description: Expressed protein

SEQ ID NO: 31330 - protein, 120 aa, Arabidopsis thaliana; identical to SEQ ID NO: 27740
  peptide (1)..(120): Ceres Seq. ID no. 12331669
  misc_feature (1)..(114): Homolog of NCBI NO: 27469691 NR Description: Similar to chromosome 20 open reading frame 169
  misc_feature (1)..(113): Homolog of NCBI NO: 12838117 NR Description: unnamed protein product [Mus musculus]
  misc_feature (1)..(113): Homolog of NCBI NO: 12833500 NR Description: unnamed protein product [Mus musculus]
  misc_feature (1)..(113): Homolog of NCBI NO: 34860687 NR Description: similar to chromosome 20 open reading frame 169
  misc_feature (1)..(43): Homolog of NCBI NO: 34912286 NR Description: P0451D05.3 [Oryza sativa (japonica
  misc_feature (1)..(114): Homolog of NCBI NO: 23618848 NR Description: chromosome 20 open reading frame 169
  misc_feature (1)..(114): Homolog of NCBI NO: 11561813 NR Description: dJ453C12.4.1 (novel protein (similar to
  misc_feature (1)..(114): Homolog of NCBI NO: 14270398 NR Description: hypothetical protein [Homo sapiens]
  misc_feature (1)..(118): Homolog of NCBI NO: 12324600 NR Description: unknown protein; 19658-19089 [Arabidopsis
  misc_feature (1)..(120): Homolog of NCBI NO: 18412584 NR Description: Expressed protein

SEQ ID NO: 31331 - protein, 76 aa, Arabidopsis thaliana; identical to SEQ ID NO: 27741
  peptide (1)..(76): Ceres Seq. ID no. 12331670

SEQ ID NO: 31332 - DNA, 680 bp, Arabidopsis thaliana; identical to SEQ ID NO: 27742
  misc_feature (1)..(680): Ceres Seq. ID no. 12331621
  misc_feature: MA Experiment ID: 108434 Result: Up-regulated in Transcription
  misc_feature: MA Experiment 108434 PARAMETER Experiment Name: At_Root_Tips_cDNA_P Parameter: Tissue Value: Root Tips
  misc_feature: MA Experiment ID: 20000180 Result: Up-regulated in Transcription
  misc_feature: MA Experiment 20000180 PARAMETER Experiment Name: At_Germinating_Seeds_P Parameter: Age (hr) Value: 24 vs. 0
  misc_feature: MA Experiment 20000180 PARAMETER Experiment Name: At_Germinating_Seeds_P Parameter: Tissue Value: Germinating Seeds
  misc_feature: MA Experiment ID: 20000185 Result: Up-regulated in Transcription
  misc_feature: MA Experiment 20000185 PARAMETER Experiment Name: At_Roots__P Parameter: Age (day) Value: 7 vs. 21
  misc_feature: MA Experiment 20000185 PARAMETER Experiment Name: At_Roots__P Parameter: Organism Value: A. thaliana
  misc_feature: MA Experiment 20000185 PARAMETER Experiment Name: At_Roots__P Parameter: Tissue Value: Roots vs. Whole Plant
  misc_feature: MA Experiment ID: 20000234 Result: Up-regulated in Transcription
  misc_feature: MA Experiment 20000234 PARAMETER Experiment Name: At_Siliques_P Parameter: Age (day) Value: 21
  misc_feature: MA Experiment 20000234 PARAMETER Experiment Name: At_Siliques_P Parameter: Organism Value: A. thaliana
  misc_feature: MA Experiment 20000234 PARAMETER Experiment Name: At_Siliques_P Parameter: Plant Line Value: WS
  misc_feature: MA Experiment 20000234 PARAMETER Experiment Name: At_Siliques_P Parameter: Tissue Value: Less Than 5mm Siliques vs. Whole Plant
  misc_feature: MA Experiment ID: 20000439 Result: Up-regulated in Transcription
  misc_feature: MA Experiment 20000439 PARAMETER Experiment Name: At_Roots__P Parameter: Age (day) Value: 14 vs. 21
  misc_feature: MA Experiment 20000439 PARAMETER Experiment Name: At_Roots__P Parameter: Organism Value: A. thaliana
  misc_feature: MA Experiment 20000439 PARAMETER Experiment Name: At_Roots__P Parameter: Tissue Value: Roots vs. Whole Plant

SEQ ID NO: 31333 - protein, 122 aa, Arabidopsis thaliana; identical to SEQ ID NO: 27743
  peptide (1)..(122): Ceres Seq. ID no. 12331622
  misc_feature (8)..(122): Pfam Name: Mitochondrial ATP synthase g subunit Pfam Description: Mitochondrial ATP synthase g subunit
  misc_feature (1)..(120): Homolog of NCBI NO: 34912342 NR Description: P0518F01.5 [Oryza sativa (japonica
  misc_feature (1)..(122): Homolog of NCBI NO: 15236143 NR Description: putative protein
  misc_feature (1)..(122): Homolog of NCBI NO: 15224821 NR Description: copia-like retroelement pol polyprotein
  misc_feature (1)..(122): Homolog of NCBI NO: 15233603 NR Description: putative protein

SEQ ID NO: 31334 - DNA, 1090 bp, Arabidopsis thaliana; identical to SEQ ID NO: 27744
  misc_feature (1)..(1090): Ceres Seq. ID no. 13489767
  misc_feature: MA Experiment ID: 108463 Result: Down-regulated in Transcription
  misc_feature: MA Experiment 108463 PARAMETER Experiment Name: At_Germinating_Seeds_cDNA_P Parameter: Age (day) Value: 3 vs. 0
  misc_feature: MA Experiment 108463 PARAMETER Experiment Name: At_Germinating_Seeds_cDNA_P Parameter: Tissue Value: Germinating Seeds
  misc_feature: MA Experiment ID: 108464 Result: Down-regulated in Transcription
  misc_feature: MA Experiment 108464 PARAMETER Experiment Name: At_Germinating_Seeds_cDNA_P Parameter: Age (day) Value: 4 vs. 0
  misc_feature: MA Experiment 108464 PARAMETER Experiment Name: At_Germinating_Seeds_cDNA_P Parameter: Tissue Value: Germinating Seeds
  misc_feature: MA Experiment ID: 108488 Result: Down-regulated in Transcription
  misc_feature: MA Experiment ID: 20000111 Result: Down-regulated in Transcription
  misc_feature: MA Experiment 20000111 PARAMETER Experiment Name: At_42deg_Heat_cDNA_P Parameter: Temperature (deg C) Value: 42 vs. 22
  misc_feature: MA Experiment 20000111 PARAMETER Experiment Name: At_42deg_Heat_cDNA_P Parameter: Timepoint (hr) Value: 6
  misc_feature: MA Experiment 20000111 PARAMETER Experiment Name: At_42deg_Heat_cDNA_P Parameter: Tissue Value: Aerial
  misc_feature: MA Experiment ID: 20000113 Result: Down-regulated in Transcription
  misc_feature: MA Experiment 20000113 PARAMETER Experiment Name: At_42deg_Heat_cDNA_P Parameter: Temperature (deg C) Value: 42 vs. 22
  misc_feature: MA Experiment 20000113 PARAMETER Experiment Name: At_42deg_Heat_cDNA_P Parameter: Timepoint (hr) Value: 8
  misc_feature: MA Experiment 20000113 PARAMETER Experiment Name: At_42deg_Heat_cDNA_P Parameter: Tissue Value: Aerial
  misc_feature: MA Experiment ID: 20000179 Result: Up-regulated in Transcription
  misc_feature: MA Experiment 20000179 PARAMETER Experiment Name: At_Germinating_Seeds_P Parameter: Age (hr) Value: 6 vs. 0
  misc_feature: MA Experiment 20000179 PARAMETER Experiment Name: At_Germinating_Seeds_P Parameter: Tissue Value: Germinating Seeds
  misc_feature: MA Experiment ID: 20000438 Result: Down-regulated in Transcription
  misc_feature: MA Experiment 20000438 PARAMETER Experiment Name: At_Shoots__P Parameter: Age (day) Value: 14
  misc_feature: MA Experiment 20000438 PARAMETER Experiment Name: At_Shoots__P Parameter: Tissue Value: Shoots vs. Whole Plant
  misc_feature: MA Experiment ID: 20000439 Result: Down-regulated in Transcription
  misc_feature: MA Experiment 20000439 PARAMETER Experiment Name: At_Roots__P Parameter: Age (day) Value: 14 vs. 21
  misc_feature: MA Experiment 20000439 PARAMETER Experiment Name: At_Roots__P Parameter: Organism Value: A. thaliana
  misc_feature: MA Experiment 20000439 PARAMETER Experiment Name: At_Roots__P Parameter: Tissue Value: Roots vs. Whole Plant
  misc_feature: MA Experiment ID: 20001904 Result: Up-regulated in Transcription
  misc_feature: MA Experiment 20001904 PARAMETER Experiment Name: At_Drought_Reproduction_P Parameter: Age (day) Value: 37
  misc_feature: MA Experiment 20001904 PARAMETER Experiment Name: At_Drought_Reproduction_P Parameter: Organism Value: A. thaliana
  misc_feature: MA Experiment 20001904 PARAMETER Experiment Name: At_Drought_Reproduction_P Parameter: Plant Line Value: WS
  misc_feature: MA Experiment 20001904 PARAMETER Experiment Name: At_Drought_Reproduction_P Parameter: Timepoint (day) Value: 7
  misc_feature: MA Experiment 20001904 PARAMETER Experiment Name: At_Drought_Reproduction_P Parameter: Tissue Value: Rosettes
  misc_feature: MA Experiment 20001904 PARAMETER Experiment Name: At_Drought_Reproduction_P Parameter: Treatment Value: Drought vs. No Drought

SEQ ID NO: 31335 - protein, 214 aa, Arabidopsis thaliana; identical to SEQ ID NO: 27745
  peptide (1)..(214): Ceres Seq. ID no. 13489768
  misc_feature (15)..(176): Pfam Name: Ras family Pfam Description: Ras family
  misc_feature (1)..(214): Homolog of NCBI NO: 541979 NR Description: GTP-binding protein, ras-like - fava bean
  misc_feature (1)..(213): Homolog of NCBI NO: 730512 NR Description: RAS-RELATED PROTEIN RIC2
  misc_feature (1)..(213): Homolog of NCBI NO: 13195452 NR Description: GTP-binding protein [Oryza sativa]
  misc_feature (1)..(214): Homolog of NCBI NO: 21536533 NR Description: Rab-type small GTP-binding protein-like
  misc_feature (1)..(214): Homolog of NCBI NO: 15242483 NR Description: GTP-binding protein, putative [Arabidopsis
  misc_feature (1)..(214): Homolog of NCBI NO: 15234020 NR Description: Ras family GTP-binding protein [Arabidopsis

SEQ ID NO: 31336 - DNA, 842 bp, Arabidopsis thaliana; identical to SEQ ID NO: 27746
  misc_feature (1)..(842): Ceres Seq. ID no. 12738275
  misc_feature: MA Experiment ID: 108461 Result: Up-regulated in Transcription
  misc_feature: MA Experiment 108461 PARAMETER Experiment Name: At_Germinating_Seeds_cDNA_P Parameter: Age (day) Value: 1 vs. 0
  misc_feature: MA Experiment 108461 PARAMETER Experiment Name: At_Germinating_Seeds_cDNA_P Parameter: Tissue Value: Germinating Seeds
  misc_feature: MA Experiment ID: 108462 Result: Up-regulated in Transcription
  misc_feature: MA Experiment 108462 PARAMETER Experiment Name: At_Germinating_Seeds_cDNA_P Parameter: Age (day) Value: 2 vs. 0
  misc_feature: MA Experiment 108462 PARAMETER Experiment Name: At_Germinating_Seeds_cDNA_P Parameter: Tissue Value: Germinating Seeds
  misc_feature: MA Experiment ID: 108464 Result: Up-regulated in Transcription
  misc_feature: MA Experiment 108464 PARAMETER Experiment Name: At_Germinating_Seeds_cDNA_P Parameter: Age (day) Value: 4 vs. 0
  misc_feature: MA Experiment 108464 PARAMETER Experiment Name: At_Germinating_Seeds_cDNA_P Parameter: Tissue Value: Germinating Seeds
  misc_feature: MA Experiment ID: 108473 Result: Down-regulated in Transcription
  misc_feature: MA Experiment 108473 PARAMETER Experiment Name: At_Drought_Flowers_cDNA_P Parameter: Timepoint (hr) Value: 7 d
  misc_feature: MA Experiment 108473 PARAMETER Experiment Name: At_Drought_Flowers_cDNA_P Parameter: Tissue Value: Flower
  misc_feature: MA Experiment 108473 PARAMETER Experiment Name: At_Drought_Flowers_cDNA_P Parameter: Treatment Value: Drought vs. No Drought
  misc_feature: MA Experiment ID: 108489 Result: Down-regulated in Transcription
  misc_feature: MA Experiment ID: 108573 Result: Down-regulated in Transcription
  misc_feature: MA Experiment 108573 PARAMETER Experiment Name: At_Drought_cDNA_P Parameter: Timepoint (hr) Value: 6
  misc_feature: MA Experiment 108573 PARAMETER Experiment Name: At_Drought_cDNA_P Parameter: Tissue Value: Aerial
  misc_feature: MA Experiment 108573 PARAMETER Experiment Name: At_Drought_cDNA_P Parameter: Treatment Value: Drought vs. No Drought
  misc_feature: MA Experiment ID: 108574 Result: Up-regulated in Transcription
  misc_feature: MA Experiment 108574 PARAMETER Experiment Name: At_Wounding__cDNA_P Parameter: Timepoint (hr) Value: 1
  misc_feature: MA Experiment 108574 PARAMETER Experiment Name: At_Wounding__cDNA_P Parameter: Tissue Value: Aerial
  misc_feature: MA Experiment 108574 PARAMETER Experiment Name: At_Wounding__cDNA_P Parameter: Treatment Value: Wounding vs. No Wounding
  misc_feature: MA Experiment ID: 108576 Result: Down-regulated in Transcription
  misc_feature: MA Experiment 108576 PARAMETER Experiment Name: At_42deg_Heat_cDNA_P Parameter: Temperature (deg C) Value: 42 vs. 22
  misc_feature: MA Experiment 108576 PARAMETER Experiment Name: At_42deg_Heat_cDNA_P Parameter: Timepoint (hr) Value: 1
  misc_feature: MA Experiment 108576 PARAMETER Experiment Name: At_42deg_Heat_cDNA_P Parameter: Tissue Value: Aerial
  misc_feature: MA Experiment ID: 108579 Result: Up-regulated in Transcription
  misc_feature: MA Experiment 108579 PARAMETER Experiment Name: At_4deg_Cold_cDNA_P Parameter: Temperature (deg C) Value: 4 vs. 22
  misc_feature: MA Experiment 108579 PARAMETER Experiment Name: At_4deg_Cold_cDNA_P Parameter: Timepoint (hr) Value: 6
  misc_feature: MA Experiment 108579 PARAMETER Experiment Name: At_4deg_Cold_cDNA_P Parameter: Tissue Value: Aerial
  misc_feature: MA Experiment ID: 108585 Result: Down-regulated in Transcription
  misc_feature: MA Experiment 108585 PARAMETER Experiment Name: At_5mM_NaNP_cDNA_P Parameter: Timepoint (hr) Value: 6
  misc_feature: MA Experiment 108585 PARAMETER Experiment Name: At_5mM_NaNP_cDNA_P Parameter: Tissue Value: Aerial
  misc_feature: MA Experiment 108585 PARAMETER Experiment Name: At_5mM_NaNP_cDNA_P Parameter: Treatment Value: null
  misc_feature: MA Experiment ID: 20000090 Result: Down-regulated in Transcription
  misc_feature: MA Experiment ID: 20000111 Result: Down-regulated in Transcription
  misc_feature: MA Experiment 20000111 PARAMETER Experiment Name: At_42deg_Heat_cDNA_P Parameter: Temperature (deg C) Value: 42 vs. 22
  misc_feature: MA Experiment 20000111 PARAMETER Experiment Name: At_42deg_Heat_cDNA_P Parameter: Timepoint (hr) Value: 6
  misc_feature: MA Experiment 20000111 PARAMETER Experiment Name: At_42deg_Heat_cDNA_P Parameter: Tissue Value: Aerial
  misc_feature: MA Experiment ID: 20000113 Result: Down-regulated in Transcription
  misc_feature: MA Experiment 20000113 PARAMETER Experiment Name: At_42deg_Heat_cDNA_P Parameter: Temperature (deg C) Value: 42 vs. 22
  misc_feature: MA Experiment 20000113 PARAMETER Experiment Name: At_42deg_Heat_cDNA_P Parameter: Timepoint (hr) Value: 8
  misc_feature: MA Experiment 20000113 PARAMETER Experiment Name: At_42deg_Heat_cDNA_P Parameter: Tissue Value: Aerial
  misc_feature: MA Experiment ID: 20000171 Result: Down-regulated in Transcription
  misc_feature: MA Experiment 20000171 PARAMETER Experiment Name: At_42deg_Heat_P Parameter: Age (day) Value: 14
  misc_feature: MA Experiment 20000171 PARAMETER Experiment Name: At_42deg_Heat_P Parameter: Organism Value: A. thaliana
  misc_feature: MA Experiment 20000171 PARAMETER Experiment Name: At_42deg_Heat_P Parameter: Plant Line Value: WS
  misc_feature: MA Experiment 20000171 PARAMETER Experiment Name: At_42deg_Heat_P Parameter: Temperature (deg C) Value: 42 vs. 22
  misc_feature: MA Experiment 20000171 PARAMETER Experiment Name: At_42deg_Heat_P Parameter: Timepoint (hr) Value: 1
  misc_feature: MA Experiment 20000171 PARAMETER Experiment Name: At_42deg_Heat_P Parameter: Tissue Value: Aerial
  misc_feature: MA Experiment ID: 20000173 Result: Down-regulated in Transcription
  misc_feature: MA Experiment 20000173 PARAMETER Experiment Name: At_42deg_Heat_P Parameter: Age (day) Value: 14
  misc_feature: MA Experiment 20000173 PARAMETER Experiment Name: At_42deg_Heat_P Parameter: Organism Value: A. thaliana
  misc_feature: MA Experiment 20000173 PARAMETER Experiment Name: At_42deg_Heat_P Parameter: Plant Line Value: WS
  misc_feature: MA Experiment 20000173 PARAMETER Experiment Name: At_42deg_Heat_P Parameter: Temperature (deg C) Value: 42 vs. 22
  misc_feature: MA Experiment 20000173 PARAMETER Experiment Name: At_42deg_Heat_P Parameter: Timepoint (hr) Value: 6
  misc_feature: MA Experiment 20000173 PARAMETER Experiment Name: At_42deg_Heat_P Parameter: Tissue Value: Aerial
  misc_feature: MA Experiment ID: 20000180 Result: Up-regulated in Transcription
  misc_feature: MA Experiment 20000180 PARAMETER Experiment Name: At_Germinating_Seeds_P Parameter: Age (hr) Value: 24 vs. 0
  misc_feature: MA Experiment 20000180 PARAMETER Experiment Name: At_Germinating_Seeds_P Parameter: Tissue Value: Germinating Seeds
  misc_feature: MA Experiment ID: 20000234 Result: Up-regulated in Transcription
  misc_feature: MA Experiment 20000234 PARAMETER Experiment Name: At_Siliques_P Parameter: Age (day) Value: 21
  misc_feature: MA Experiment 20000234 PARAMETER Experiment Name: At_Siliques_P Parameter: Organism Value: A. thaliana
  misc_feature: MA Experiment 20000234 PARAMETER Experiment Name: At_Siliques_P Parameter: Plant Line Value: WS
  misc_feature: MA Experiment 20000234 PARAMETER Experiment Name: At_Siliques_P Parameter: Tissue Value: Less Than 5mm Siliques vs. Whole Plant
  misc_feature: MA Experiment ID: 20000264 Result: Up-regulated in Transcription
  misc_feature: MA Experiment 20000264 PARAMETER Experiment Name: At_Open_Flower_P Parameter: Age (day) Value: 21
  misc_feature: MA Experiment 20000264 PARAMETER Experiment Name: At_Open_Flower_P Parameter: Plant Line Value: WS
  misc_feature: MA Experiment 20000264 PARAMETER Experiment Name: At_Open_Flower_P Parameter: Tissue Value: Open Flower vs. Whole Plant
  misc_feature: MA Experiment ID: 20000265 Result: Up-regulated in Transcription
  misc_feature: MA Experiment 20000265 PARAMETER Experiment Name: At_Open_Flower_P Parameter: Age (day) Value: 21
  misc_feature: MA Experiment 20000265 PARAMETER Experiment Name: At_Open_Flower_P Parameter: Plant Line Value: WS
  misc_feature: MA Experiment 20000265 PARAMETER Experiment Name: At_Open_Flower_P Parameter: Tissue Value: Closed Flower vs. Whole Plant
  misc_feature: MA Experiment ID: 20000286 Result: Up-regulated in Transcription
  misc_feature: MA Experiment 20000286 PARAMETER Experiment Name: At_Open_Flower_P Parameter: Age (day) Value: 21
  misc_feature: MA Experiment 20000286 PARAMETER Experiment Name: At_Open_Flower_P Parameter: Plant Line Value: WS
  misc_feature: MA Experiment 20000286 PARAMETER Experiment Name: At_Open_Flower_P Parameter: Tissue Value: Half Open vs. Whole Plant
  misc_feature: MA Experiment ID: 20000438 Result: Up-regulated in Transcription
  misc_feature: MA Experiment 20000438 PARAMETER Experiment Name: At_Shoots__P Parameter: Age (day) Value: 14
  misc_feature: MA Experiment 20000438 PARAMETER Experiment Name: At_Shoots__P Parameter: Tissue Value: Shoots vs. Whole Plant
  misc_feature: MA Experiment ID: 20000452 Result: Up-regulated in Transcription
  misc_feature: MA Experiment 20000452 PARAMETER Experiment Name: At_CS6879_Shoots-Roots_P Parameter: Age (day) Value: 14
  misc_feature: MA Experiment 20000452 PARAMETER Experiment Name: At_CS6879_Shoots-Roots_P Parameter: Organism Value: A. thaliana
  misc_feature: MA Experiment 20000452 PARAMETER Experiment Name: At_CS6879_Shoots-Roots_P Parameter: Plant Line Value: CS6879 vs. WS
  misc_feature: MA Experiment 20000452 PARAMETER Experiment Name: At_CS6879_Shoots-Roots_P Parameter: Tissue Value: Shoots
  misc_feature: MA Experiment ID: 20000573 Result: Down-regulated in Transcription
  misc_feature: MA Experiment 20000573 PARAMETER Experiment Name: At_100uM_ABA_Mutants__P Parameter: Organism Value: A. thaliana
  misc_feature: MA Experiment 20000573 PARAMETER Experiment Name: At_100uM_ABA_Mutants__P Parameter: Plant Line Value: CS22 vs. Ler wt
  misc_feature: MA Experiment 20000573 PARAMETER Experiment Name: At_100uM_ABA_Mutants__P Parameter: Timepoint (hr) Value: N/A
  misc_feature: MA Experiment 20000573 PARAMETER Experiment Name: At_100uM_ABA_Mutants__P Parameter: Tissue Value: Whole Plant
  misc_feature: MA Experiment 20000573 PARAMETER Experiment Name: At_100uM_ABA_Mutants__P Parameter: Treatment Value: None
  misc_feature: MA Experiment ID: 20000574 Result: Down-regulated in Transcription
  misc_feature: MA Experiment 20000574 PARAMETER Experiment Name: At_100uM_ABA_Mutants__P Parameter: Organism Value: A. thaliana
  misc_feature: MA Experiment 20000574 PARAMETER Experiment Name: At_100uM_ABA_Mutants__P Parameter: Plant Line Value: CS23 vs. Ler wt
  misc_feature: MA Experiment 20000574 PARAMETER Experiment Name: At_100uM_ABA_Mutants__P Parameter: Timepoint (hr) Value: N/A
  misc_feature: MA Experiment 20000574 PARAMETER Experiment Name: At_100uM_ABA_Mutants__P Parameter: Tissue Value: Whole Plant
  misc_feature: MA Experiment 20000574 PARAMETER Experiment Name: At_100uM_ABA_Mutants__P Parameter: Treatment Value: None
  misc_feature: MA Experiment ID: 20000794 Result: Up-regulated in Transcription
  misc_feature: MA Experiment 20000794 PARAMETER Experiment Name: At_Petals_P Parameter: Age (day) Value: 23-25 days
  misc_feature: MA Experiment 20000794 PARAMETER Experiment Name: At_Petals_P Parameter: Plant Line Value: WS
  misc_feature: MA Experiment 20000794 PARAMETER Experiment Name: At_Petals_P Parameter: Tissue Value: Petals vs. Whole plant
  misc_feature: MA Experiment ID: 20001247 Result: Down-regulated in Transcription
  misc_feature: MA Experiment 20001247 PARAMETER Experiment Name: At_Far-red-induction_P Parameter: Age (day) Value: 7
  misc_feature: MA Experiment 20001247 PARAMETER Experiment Name: At_Far-red-induction_P Parameter: Light Value: Far-red vs. White
  misc_feature: MA Experiment 20001247 PARAMETER Experiment Name: At_Far-red-induction_P Parameter: Organism Value: A. thaliana
  misc_feature: MA Experiment 20001247 PARAMETER Experiment Name: At_Far-red-induction_P Parameter: Plant Line Value: Columbia
  misc_feature: MA Experiment 20001247 PARAMETER Experiment Name: At_Far-red-induction_P Parameter: Timepoint (hr) Value: 1
  misc_feature: MA Experiment 20001247 PARAMETER Experiment Name: At_Far-red-induction_P Parameter: Tissue Value: Whole Plant
  misc_feature: MA Experiment ID: 20001248 Result: Down-regulated in Transcription
  misc_feature: MA Experiment 20001248 PARAMETER Experiment Name: At_Far-red-induction_P Parameter: Age (day) Value: 7
  misc_feature: MA Experiment 20001248 PARAMETER Experiment Name: At_Far-red-induction_P Parameter: Light Value: Far-red vs. White
  misc_feature: MA Experiment 20001248 PARAMETER Experiment Name: At_Far-red-induction_P Parameter: Organism Value: A. thaliana
  misc_feature: MA Experiment 20001248 PARAMETER Experiment Name: At_Far-red-induction_P Parameter: Plant Line Value: Columbia
  misc_feature: MA Experiment 20001248 PARAMETER Experiment Name: At_Far-red-induction_P Parameter: Timepoint (hr) Value: 4
  misc_feature: MA Experiment 20001248 PARAMETER Experiment Name: At_Far-red-induction_P Parameter: Tissue Value: Whole Plant
  misc_feature: MA Experiment ID: 20001450 Result: Down-regulated in Transcription
  misc_feature: MA Experiment 20001450 PARAMETER Experiment Name: At_Far-red-induction_P Parameter: Age (day) Value: 7
  misc_feature: MA Experiment 20001450 PARAMETER Experiment Name: At_Far-red-induction_P Parameter: Light Value: Far-red vs. White
  misc_feature: MA Experiment 20001450 PARAMETER Experiment Name: At_Far-red-induction_P Parameter: Organism Value: A. thaliana
  misc_feature: MA Experiment 20001450 PARAMETER Experiment Name: At_Far-red-induction_P Parameter: Plant Line Value: Columbia
  misc_feature: MA Experiment 20001450 PARAMETER Experiment Name: At_Far-red-induction_P Parameter: Timepoint (hr) Value: 8
  misc_feature: MA Experiment 20001450 PARAMETER Experiment Name: At_Far-red-induction_P Parameter: Tissue Value: Whole Plant
  misc_feature: MA Experiment ID: 20001558 Result: Down-regulated in Transcription
  misc_feature: MA Experiment 20001558 PARAMETER Experiment Name: At_Drought_Soil_Dry_P Parameter: Age (day) Value: 27
  misc_feature: MA Experiment 20001558 PARAMETER Experiment Name: At_Drought_Soil_Dry_P Parameter: Organism Value: A. thaliana
  misc_feature: MA Experiment 20001558 PARAMETER Experiment Name: At_Drought_Soil_Dry_P Parameter: Plant Line Value: WS
  misc_feature: MA Experiment 20001558 PARAMETER Experiment Name: At_Drought_Soil_Dry_P Parameter: Post Timepoint (hr) Value: 6
  misc_feature: MA Experiment 20001558 PARAMETER Experiment Name: At_Drought_Soil_Dry_P Parameter: Post-Treatment Value: Re-Water vs. No Drought
  misc_feature: MA Experiment 20001558 PARAMETER Experiment Name: At_Drought_Soil_Dry_P Parameter: Timepoint (day) Value: 13
  misc_feature: MA Experiment 20001558 PARAMETER Experiment Name: At_Drought_Soil_Dry_P Parameter: Treatment Value: Drought vs. No Drought
  misc_feature: MA Experiment ID: 20001757 Result: Down-regulated in Transcription
  misc_feature: MA Experiment 20001757 PARAMETER Experiment Name: At_50mM_NH4NO3_L-to-H_P Parameter: Timepoint (hr) Value: 6
  misc_feature: MA Experiment 20001757 PARAMETER Experiment Name: At_50mM_NH4NO3_L-to-H_P Parameter: Tissue Value: Leaf
  misc_feature: MA Experiment 20001757 PARAMETER Experiment Name: At_50mM_NH4NO3_L-to-H_P Parameter: Treatment Value: 50mM NH4NO3 vs 100mM Mannitol

SEQ ID NO: 31337 - protein, 235 aa, Arabidopsis thaliana; identical to SEQ ID NO: 27747
  peptide (1)..(235): Ceres Seq. ID no. 12738276
  misc_feature (1)..(86): Pfam Name: Thiolase, N-terminal domain Pfam Description: Thiolase, N-terminal domain
  misc_feature (1)..(228): Homolog of NCBI NO: 37535022 NR Description: putative thiolase [Oryza sativa (japonica
  misc_feature (1)..(235): Homolog of NCBI NO: 7433644 NR Description: acetyl-CoA C-acyltransferase (EC 2.3.1.16)
  misc_feature (1)..(228): Homolog of NCBI NO: 29367431 NR Description: 3-ketoacyl-CoA thiolase-like protein
  misc_feature (1)..(232): Homolog of NCBI NO: 421810 NR Description: acetyl-CoA C-acyltransferase (EC 2.3.1.16)
  misc_feature (1)..(228): Homolog of NCBI NO: 34597334 NR Description: acetoacetyl CoA thiolase [Helianthus annuus]
  misc_feature (1)..(228): Homolog of NCBI NO: 15225798 NR Description: 3-ketoacyl-CoA thiolase
  misc_feature (1)..(232): Homolog of NCBI NO: 7433647 NR Description: acetyl-CoA C-acyltransferase (EC 2.3.1.16)
  misc_feature (1)..(232): Homolog of NCBI NO: 393707 NR Description: 3-ketoacyl-CoA thiolase; acetyl-CoA
  misc_feature (1)..(235): Homolog of NCBI NO: 30695564 NR Description: acetyl-CoA C-acyltransferase 1 (3-ketoacyl-CoA
  misc_feature (1)..(235): Homolog of NCBI NO: 30695561 NR Description: acetyl-CoA C-acyltransferase 1 (3-ketoacyl-CoA

SEQ ID NO: 31338 - protein, 187 aa, Arabidopsis thaliana; identical to SEQ ID NO: 27748
  peptide (1)..(187): Ceres Seq. ID no. 12738277
  misc_feature (1)..(180): Homolog of NCBI NO: 37535022 NR Description: putative thiolase [Oryza sativa (japonica
  misc_feature (1)..(187): Homolog of NCBI NO: 7433644 NR Description: acetyl-CoA C-acyltransferase (EC 2.3.1.16)
  misc_feature (1)..(180): Homolog of NCBI NO: 29367431 NR Description: 3-ketoacyl-CoA thiolase-like protein
  misc_feature (1)..(184): Homolog of NCBI NO: 421810 NR Description: acetyl-CoA C-acyltransferase (EC 2.3.1.16)
  misc_feature (1)..(180): Homolog of NCBI NO: 34597334 NR Description: acetoacetyl CoA thiolase [Helianthus annuus]
  misc_feature (1)..(180): Homolog of NCBI NO: 15225798 NR Description: 3-ketoacyl-CoA thiolase
  misc_feature (1)..(184): Homolog of NCBI NO: 7433647 NR Description: acetyl-CoA C-acyltransferase (EC 2.3.1.16)
  misc_feature (1)..(184): Homolog of NCBI NO: 393707 NR Description: 3-ketoacyl-CoA thiolase; acetyl-CoA
  misc_feature (1)..(187): Homolog of NCBI NO: 30695564 NR Description: acetyl-CoA C-acyltransferase 1 (3-ketoacyl-CoA
  misc_feature (1)..(187): Homolog of NCBI NO: 30695561 NR Description: acetyl-CoA C-acyltransferase 1 (3-ketoacyl-CoA

SEQ ID NO: 31339 - protein, 153 aa, Arabidopsis thaliana; identical to SEQ ID NO: 27749
  peptide (1)..(153): Ceres Seq. ID no. 12738278
  misc_feature (1)..(146): Homolog of NCBI NO: 37535022 NR Description: putative thiolase [Oryza sativa (japonica
  misc_feature (1)..(153): Homolog of NCBI NO: 7433644 NR Description: acetyl-CoA C-acyltransferase (EC 2.3.1.16)
  misc_feature (1)..(146): Homolog of NCBI NO: 29367431 NR Description: 3-ketoacyl-CoA thiolase-like protein
  misc_feature (1)..(150): Homolog of NCBI NO: 421810 NR Description: acetyl-CoA C-acyltransferase (EC 2.3.1.16)
  misc_feature (1)..(146): Homolog of NCBI NO: 34597334 NR Description: acetoacetyl CoA thiolase [Helianthus annuus]
  misc_feature (1)..(146): Homolog of NCBI NO: 15225798 NR Description: 3-ketoacyl-CoA thiolase
  misc_feature (1)..(150): Homolog of NCBI NO: 7433647 NR Description: acetyl-CoA C-acyltransferase (EC 2.3.1.16)
  misc_feature (1)..(150): Homolog of NCBI NO: 393707 NR Description: 3-ketoacyl-CoA thiolase; acetyl-CoA
  misc_feature (1)..(153): Homolog of NCBI NO: 30695564 NR Description: acetyl-CoA C-acyltransferase 1 (3-ketoacyl-CoA
  misc_feature (1)..(153): Homolog of NCBI NO: 30695561 NR Description: acetyl-CoA C-acyltransferase 1 (3-ketoacyl-CoA

SEQ ID NO: 31340 - DNA, 1392 bp, Arabidopsis thaliana; identical to SEQ ID NO: 27750
  misc_feature (1)..(1392): Ceres Seq. ID no. 13492415
  misc_feature: MA Experiment ID: 108434 Result: Down-regulated in Transcription
  misc_feature: MA Experiment 108434 PARAMETER Experiment Name: At_Root_Tips_cDNA_P Parameter: Tissue Value: Root Tips
  misc_feature: MA Experiment ID: 108561 Result: Up-regulated in Transcription
  misc_feature: MA Experiment 108561 PARAMETER Experiment Name: At_100uM_ABA_cDNA_P Parameter: Timepoint (hr) Value: 6
  misc_feature: MA Experiment 108561 PARAMETER Experiment Name: At_100uM_ABA_cDNA_P Parameter: Tissue Value: Aerial
  misc_feature: MA Experiment 108561 PARAMETER Experiment Name: At_100uM_ABA_cDNA_P Parameter: Treatment Value: 100uM ABA vs. No Treatment
  misc_feature: MA Experiment ID: 20000185 Result: Up-regulated in Transcription
  misc_feature: MA Experiment 20000185 PARAMETER Experiment Name: At_Roots__P Parameter: Age (day) Value: 7 vs. 21
  misc_feature: MA Experiment 20000185 PARAMETER Experiment Name: At_Roots__P Parameter: Organism Value: A. thaliana
  misc_feature: MA Experiment 20000185 PARAMETER Experiment Name: At_Roots__P Parameter: Tissue Value: Roots vs. Whole Plant
  misc_feature: MA Experiment ID: 20000437 Result: Up-regulated in Transcription
  misc_feature: MA Experiment 20000437 PARAMETER Experiment Name: At_Drought_P Parameter: Age (day) Value: 8
  misc_feature: MA Experiment 20000437 PARAMETER Experiment Name: At_Drought_P Parameter: Organism Value: A. thaliana
  misc_feature: MA Experiment 20000437 PARAMETER Experiment Name: At_Drought_P Parameter: Plant Line Value: WS
  misc_feature: MA Experiment 20000437 PARAMETER Experiment Name: At_Drought_P Parameter: Timepoint (hr) Value: 24
  misc_feature: MA Experiment 20000437 PARAMETER Experiment Name: At_Drought_P Parameter: Tissue Value: Whole Plant
  misc_feature: MA Experiment 20000437 PARAMETER Experiment Name: At_Drought_P Parameter: Treatment Value: Drought vs. No Drought
  misc_feature: MA Experiment ID: 20000439 Result: Up-regulated in Transcription
  misc_feature: MA Experiment 20000439 PARAMETER Experiment Name: At_Roots__P Parameter: Age (day) Value: 14 vs. 21
  misc_feature: MA Experiment 20000439 PARAMETER Experiment Name: At_Roots__P Parameter: Organism Value: A. thaliana
  misc_feature: MA Experiment 20000439 PARAMETER Experiment Name: At_Roots__P Parameter: Tissue Value: Roots vs. Whole Plant
  misc_feature: MA Experiment ID: 20000451 Result: Up-regulated in Transcription
  misc_feature: MA Experiment 20000451 PARAMETER Experiment Name: At_CS6879_Shoots-Roots_P Parameter: Age (day) Value: 14
  misc_feature: MA Experiment 20000451 PARAMETER Experiment Name: At_CS6879_Shoots-Roots_P Parameter: Organism Value: A. thaliana
  misc_feature: MA Experiment 20000451 PARAMETER Experiment Name: At_CS6879_Shoots-Roots_P Parameter: Plant Line Value: CS6879 vs. WS
  misc_feature: MA Experiment 20000451 PARAMETER Experiment Name: At_CS6879_Shoots-Roots_P Parameter: Tissue Value: Roots
  misc_feature: MA Experiment ID: 20001451 Result: Up-regulated in Transcription
  misc_feature: MA Experiment 20001451 PARAMETER Experiment Name: At_Far-red-induction_P Parameter: Age (day) Value: 7
  misc_feature: MA Experiment 20001451 PARAMETER Experiment Name: At_Far-red-induction_P Parameter: Light Value: Far-red vs. White
  misc_feature: MA Experiment 20001451 PARAMETER Experiment Name: At_Far-red-induction_P Parameter: Organism Value: A. thaliana
  misc_feature: MA Experiment 20001451 PARAMETER Experiment Name: At_Far-red-induction_P Parameter: Plant Line Value: Columbia
  misc_feature: MA Experiment 20001451 PARAMETER Experiment Name: At_Far-red-induction_P Parameter: Timepoint (hr) Value: 24
  misc_feature: MA Experiment 20001451 PARAMETER Experiment Name: At_Far-red-induction_P Parameter: Tissue Value: Whole Plant

SEQ ID NO: 31341 - protein, 358 aa, Arabidopsis thaliana; identical to SEQ ID NO: 27751
  peptide (1)..(358): Ceres Seq. ID no. 13492416
  misc_feature (49)..(298): Pfam Name: Peroxidase Pfam Description: Peroxidase
  misc_feature (31)..(339): Homolog of NCBI NO: 1279654 NR Description: peroxidase [Populus balsamifera subsp.
  misc_feature (71)..(324): Homolog of NCBI NO: 38261094 NR Description: peroxidase [Brassica napus]
  misc_feature (13)..(335): Homolog of NCBI NO: 5002348 NR Description: peroxidase 5 precursor [Phaseolus vulgaris]
  misc_feature (15)..(334): Homolog of NCBI NO: 8546851 NR Description: peroxidase [Ipomoea batatas]
  misc_feature (32)..(335): Homolog of NCBI NO: 1730490 NR Description: Peroxidase A2
  misc_feature (32)..(335): Homolog of NCBI NO: 11513747 NR Description: Chain A, Arabidopsis Thaliana Peroxidase A2
  misc_feature (1)..(335): Homolog of NCBI NO: 15240140 NR Description: peroxidase, putative [Arabidopsis thaliana]
  misc_feature (1)..(335): Homolog of NCBI NO: 21593262 NR Description: peroxidase [Arabidopsis thaliana]
  misc_feature (1)..(358): Homolog of NCBI NO: 21594792 NR Description: peroxidase [Arabidopsis thaliana]
  misc_feature (1)..(358): Homolog of NCBI NO: 15240141 NR Description: peroxidase, putative [Arabidopsis thaliana]

SEQ ID NO: 31342 - DNA, 1547 bp, Arabidopsis thaliana; identical to SEQ ID NO: 27752
  misc_feature (1)..(1547): Ceres Seq. ID no. 12327682
  misc_feature: MA Experiment ID: 108488 Result: Down-regulated in Transcription
  misc_feature: MA Experiment ID: 108573 Result: Up-regulated in Transcription
  misc_feature: MA Experiment 108573 PARAMETER Experiment Name: At_Drought_cDNA_P Parameter: Timepoint (hr) Value: 6
  misc_feature: MA Experiment 108573 PARAMETER Experiment Name: At_Drought_cDNA_P Parameter: Tissue Value: Aerial
  misc_feature: MA Experiment 108573 PARAMETER Experiment Name: At_Drought_cDNA_P Parameter: Treatment Value: Drought vs. No Drought
  misc_feature: MA Experiment ID: 20000171 Result: Down-regulated in Transcription
  misc_feature: MA Experiment 20000171 PARAMETER Experiment Name: At_42deg_Heat_P Parameter: Age (day) Value: 14
  misc_feature: MA Experiment 20000171 PARAMETER Experiment Name: At_42deg_Heat_P Parameter: Organism Value: A. thaliana
  misc_feature: MA Experiment 20000171 PARAMETER Experiment Name: At_42deg_Heat_P Parameter: Plant Line Value: WS
  misc_feature: MA Experiment 20000171 PARAMETER Experiment Name: At_42deg_Heat_P Parameter: Temperature (deg C) Value: 42 vs. 22
  misc_feature: MA Experiment 20000171 PARAMETER Experiment Name: At_42deg_Heat_P Parameter: Timepoint (hr) Value: 1
  misc_feature: MA Experiment 20000171 PARAMETER Experiment Name: At_42deg_Heat_P Parameter: Tissue Value: Aerial
  misc_feature: MA Experiment ID: 20000437 Result: Up-regulated in Transcription
  misc_feature: MA Experiment 20000437 PARAMETER Experiment Name: At_Drought_P Parameter: Age (day) Value: 8
  misc_feature: MA Experiment 20000437 PARAMETER Experiment Name: At_Drought_P Parameter: Organism Value: A. thaliana
  misc_feature: MA Experiment 20000437 PARAMETER Experiment Name: At_Drought_P Parameter: Plant Line Value: WS
  misc_feature: MA Experiment 20000437 PARAMETER Experiment Name: At_Drought_P Parameter: Timepoint (hr) Value: 24
  misc_feature: MA Experiment 20000437 PARAMETER Experiment Name: At_Drought_P Parameter: Tissue Value: Whole Plant
  misc_feature: MA Experiment 20000437 PARAMETER Experiment Name: At_Drought_P Parameter: Treatment Value: Drought vs. No Drought
  misc_feature: MA Experiment ID: 20000794 Result: Up-regulated in Transcription
  misc_feature: MA Experiment 20000794 PARAMETER Experiment Name: At_Petals_P Parameter: Age (day) Value: 23-25 days
  misc_feature: MA Experiment 20000794 PARAMETER Experiment Name: At_Petals_P Parameter: Plant Line Value: WS
  misc_feature: MA Experiment 20000794 PARAMETER Experiment Name: At_Petals_P Parameter: Tissue Value: Petals vs. Whole plant
  misc_feature: MA Experiment ID: 20001904 Result: Up-regulated in Transcription
  misc_feature: MA Experiment 20001904 PARAMETER Experiment Name: At_Drought_Reproduction_P Parameter: Age (day) Value: 37
  misc_feature: MA Experiment 20001904 PARAMETER Experiment Name: At_Drought_Reproduction_P Parameter: Organism Value: A. thaliana
  misc_feature: MA Experiment 20001904 PARAMETER Experiment Name: At_Drought_Reproduction_P Parameter: Plant Line Value: WS
  misc_feature: MA Experiment 20001904 PARAMETER Experiment Name: At_Drought_Reproduction_P Parameter: Timepoint (day) Value: 7
  misc_feature: MA Experiment 20001904 PARAMETER Experiment Name: At_Drought_Reproduction_P Parameter: Tissue Value: Rosettes
  misc_feature: MA Experiment 20001904 PARAMETER Experiment Name: At_Drought_Reproduction_P Parameter: Treatment Value: Drought vs. No Drought
  misc_feature: MA Experiment ID: 20001905 Result: Up-regulated in Transcription
  misc_feature: MA Experiment 20001905 PARAMETER Experiment Name: At_Drought_Reproduction_P Parameter: Age (day) Value: 40
  misc_feature: MA Experiment 20001905 PARAMETER Experiment Name: At_Drought_Reproduction_P Parameter: Organism Value: A. thaliana
  misc_feature: MA Experiment 20001905 PARAMETER Experiment Name: At_Drought_Reproduction_P Parameter: Plant Line Value: WS
  misc_feature: MA Experiment 20001905 PARAMETER Experiment Name: At_Drought_Reproduction_P Parameter: Timepoint (day) Value: 10
  misc_feature: MA Experiment 20001905 PARAMETER Experiment Name: At_Drought_Reproduction_P Parameter: Tissue Value: Rosettes
  misc_feature: MA Experiment 20001905 PARAMETER Experiment Name: At_Drought_Reproduction_P Parameter: Treatment Value: Drought vs. No Drought
  misc_feature: MA Experiment ID: 20001906 Result: Up-regulated in Transcription
  misc_feature: MA Experiment 20001906 PARAMETER Experiment Name: At_Drought_Reproduction_P Parameter: Age (day) Value: 35
  misc_feature: MA Experiment 20001906 PARAMETER Experiment Name: At_Drought_Reproduction_P Parameter: Organism Value: A. thaliana
  misc_feature: MA Experiment 20001906 PARAMETER Experiment Name: At_Drought_Reproduction_P Parameter: Plant Line Value: WS
  misc_feature: MA Experiment 20001906 PARAMETER Experiment Name: At_Drought_Reproduction_P Parameter: Timepoint (day) Value: 5
  misc_feature: MA Experiment 20001906 PARAMETER Experiment Name: At_Drought_Reproduction_P Parameter: Tissue Value: Siliques
  misc_feature: MA Experiment 20001906 PARAMETER Experiment Name: At_Drought_Reproduction_P Parameter: Treatment Value: Drought vs. No Drought
  misc_feature: MA Experiment ID: 20001908 Result: Up-regulated in Transcription
  misc_feature: MA Experiment 20001908 PARAMETER Experiment Name: At_Drought_Reproduction_P Parameter: Age (day) Value: 40
  misc_feature: MA Experiment 20001908 PARAMETER Experiment Name: At_Drought_Reproduction_P Parameter: Organism Value: A. thaliana
  misc_feature: MA Experiment 20001908 PARAMETER Experiment Name: At_Drought_Reproduction_P Parameter: Plant Line Value: WS
  misc_feature: MA Experiment 20001908 PARAMETER Experiment Name: At_Drought_Reproduction_P Parameter: Timepoint (day) Value: 10
  misc_feature: MA Experiment 20001908 PARAMETER Experiment Name: At_Drought_Reproduction_P Parameter: Tissue Value: Siliques
  misc_feature: MA Experiment 20001908 PARAMETER Experiment Name: At_Drought_Reproduction_P Parameter: Treatment Value: Drought vs. No Drought
  misc_feature: MA Experiment ID: 20001911 Result: Up-regulated in Transcription
  misc_feature: MA Experiment 20001911 PARAMETER Experiment Name: At_Drought_Reproduction_P Parameter: Age (day) Value: 40
  misc_feature: MA Experiment 20001911 PARAMETER Experiment Name: At_Drought_Reproduction_P Parameter: Organism Value: A. thaliana
  misc_feature: MA Experiment 20001911 PARAMETER Experiment Name: At_Drought_Reproduction_P Parameter: Plant Line Value: WS
  misc_feature: MA Experiment 20001911 PARAMETER Experiment Name: At_Drought_Reproduction_P Parameter: Timepoint (day) Value: 10
  misc_feature: MA Experiment 20001911 PARAMETER Experiment Name: At_Drought_Reproduction_P Parameter: Tissue Value: Flowers
  misc_feature: MA Experiment 20001911 PARAMETER Experiment Name: At_Drought_Reproduction_P Parameter: Treatment Value: Drought vs. No Drought

SEQ ID NO: 31343 - protein, 354 aa, Arabidopsis thaliana; identical to SEQ ID NO: 27753
  peptide (1)..(354): Ceres Seq. ID no. 12327683
  misc_feature (104)..(190): Pfam Name: Acyl CoA binding protein Pfam Description: Acyl CoA binding protein
  misc_feature (90)..(338): Homolog of NCBI NO: 31204677 NR Description: ENSANGP00000017422 [Anopheles gambiae]
  misc_feature (75)..(335): Homolog of NCBI NO: 21312284 NR Description: RIKEN cDNA 2610100E10 [Mus musculus]
  misc_feature (75)..(335): Homolog of NCBI NO: 34880749 NR Description: similar to RIKEN cDNA 2610100E10 [Rattus
  misc_feature (78)..(335): Homolog of NCBI NO: 14150169 NR Description: hypothetical protein MGC2404 [Homo sapiens]
  misc_feature (2)..(346): Homolog of NCBI NO: 32488636 NR Description: OSJNBa0032F06.12 [Oryza sativa (japonica
  misc_feature (1)..(348): Homolog of NCBI NO: 21593070 NR Description: putative acyl-CoA binding protein [Arabidopsis
  misc_feature (1)..(348): Homolog of NCBI NO: 21284389 NR Description: acyl-CoA binding protein [Arabidopsis thaliana]
  misc_feature (1)..(348): Homolog of NCBI NO: 15238757 NR Description: putative protein
  misc_feature (1)..(273): Homolog of NCBI NO: 12039034 NR Description: acyl-CoA binding protein 2 [Arabidopsis thaliana]
  misc_feature (1)..(354): Homolog of NCBI NO: 15234270 NR Description: putative acyl-CoA binding protein

SEQ ID NO: 31344 - protein, 198 aa, Arabidopsis thaliana; identical to SEQ ID NO: 27754
  peptide (1)..(198): Ceres Seq. ID no. 12327684
  misc_feature (109)..(141): Pfam Name: Ankyrin repeat Pfam Description: Ankyrin repeat
  misc_feature (1)..(182): Homolog of NCBI NO: 31204677 NR Description: ENSANGP00000017422 [Anopheles gambiae]
  misc_feature (1)..(179): Homolog of NCBI NO: 21312284 NR Description: RIKEN cDNA 2610100E10 [Mus musculus]
  misc_feature (1)..(179): Homolog of NCBI NO: 34880749 NR Description: similar to RIKEN cDNA 2610100E10 [Rattus
  misc_feature (1)..(179): Homolog of NCBI NO: 14150169 NR Description: hypothetical protein MGC2404 [Homo sapiens]
  misc_feature (1)..(190): Homolog of NCBI NO: 32488636 NR Description: OSJNBa0032F06.12 [Oryza sativa (japonica
  misc_feature (1)..(192): Homolog of NCBI NO: 21593070 NR Description: putative acyl-CoA binding protein [Arabidopsis
  misc_feature (1)..(192): Homolog of NCBI NO: 21284389 NR Description: acyl-CoA binding protein [Arabidopsis thaliana]
  misc_feature (1)..(192): Homolog of NCBI NO: 15238757 NR Description: putative protein
  misc_feature (1)..(117): Homolog of NCBI NO: 12039034 NR Description: acyl-CoA binding protein 2 [Arabidopsis thaliana]
  misc_feature (1)..(198): Homolog of NCBI NO: 15234270 NR Description: putative acyl-CoA binding protein

SEQ ID NO: 31345 - protein, 183 aa, Arabidopsis thaliana; identical to SEQ ID NO: 27755
  peptide (1)..(183): Ceres Seq. ID no. 12327685
  misc_feature (94)..(126): Pfam Name: Ankyrin repeat Pfam Description: Ankyrin repeat
  misc_feature (1)..(167): Homolog of NCBI NO: 31204677 NR Description: ENSANGP00000017422 [Anopheles gambiae]
  misc_feature (1)..(164): Homolog of NCBI NO: 21312284 NR Description: RIKEN cDNA 2610100E10 [Mus musculus]
  misc_feature (1)..(164): Homolog of NCBI NO: 34880749 NR Description: similar to RIKEN cDNA 2610100E10 [Rattus
  misc_feature (1)..(164): Homolog of NCBI NO: 14150169 NR Description: hypothetical protein MGC2404 [Homo sapiens]
  misc_feature (1)..(175): Homolog of NCBI NO: 32488636 NR Description: OSJNBa0032F06.12 [Oryza sativa (japonica
  misc_feature (1)..(177): Homolog of NCBI NO: 21593070 NR Description: putative acyl-CoA binding protein [Arabidopsis
  misc_feature (1)..(177): Homolog of NCBI NO: 21284389 NR Description: acyl-CoA binding protein [Arabidopsis thaliana]
  misc_feature (1)..(177): Homolog of NCBI NO: 15238757 NR Description: putative protein
  misc_feature (1)..(102): Homolog of NCBI NO: 12039034 NR Description: acyl-CoA binding protein 2 [Arabidopsis thaliana]
  misc_feature (1)..(183): Homolog of NCBI NO: 15234270 NR Description: putative acyl-CoA binding protein

SEQ ID NO: 31346 - DNA, 1519 bp, Arabidopsis thaliana; identical to SEQ ID NO: 27756
  misc_feature (1)..(1519): Ceres Seq. ID no. 12558479
  misc_feature: MA Experiment ID: 20001451 Result: Down-regulated in Transcription
  misc_feature: MA Experiment 20001451 PARAMETER Experiment Name: At_Far-red-induction_P Parameter: Age (day) Value: 7
  misc_feature: MA Experiment 20001451 PARAMETER Experiment Name: At_Far-red-induction_P Parameter: Light Value: Far-red vs. White
  misc_feature: MA Experiment 20001451 PARAMETER Experiment Name: At_Far-red-induction_P Parameter: Organism Value: A. thaliana
  misc_feature: MA Experiment 20001451 PARAMETER Experiment Name: At_Far-red-induction_P Parameter: Plant Line Value: Columbia
  misc_feature: MA Experiment 20001451 PARAMETER Experiment Name: At_Far-red-induction_P Parameter: Timepoint (hr) Value: 24
  misc_feature: MA Experiment 20001451 PARAMETER Experiment Name: At_Far-red-induction_P Parameter: Tissue Value: Whole Plant
  misc_feature: MA Experiment ID: 20001557 Result: Up-regulated in Transcription
  misc_feature: MA Experiment 20001557 PARAMETER Experiment Name: At_Drought_Soil_Dry_P Parameter: Age (day) Value: 27
  misc_feature: MA Experiment 20001557 PARAMETER Experiment Name: At_Drought_Soil_Dry_P Parameter: Organism Value: A. thaliana
  misc_feature: MA Experiment 20001557 PARAMETER Experiment Name: At_Drought_Soil_Dry_P Parameter: Plant Line Value: WS
  misc_feature: MA Experiment 20001557 PARAMETER Experiment Name: At_Drought_Soil_Dry_P Parameter: Post Timepoint (hr) Value: 3
  misc_feature: MA Experiment 20001557 PARAMETER Experiment Name: At_Drought_Soil_Dry_P Parameter: Post-Treatment Value: Re-Water vs. No Drought
  misc_feature: MA Experiment 20001557 PARAMETER Experiment Name: At_Drought_Soil_Dry_P Parameter: Timepoint (day) Value: 13
  misc_feature: MA Experiment 20001557 PARAMETER Experiment Name: At_Drought_Soil_Dry_P Parameter: Treatment Value: Drought vs. No Drought

SEQ ID NO: 31347 - protein, 381 aa, Arabidopsis thaliana; identical to SEQ ID NO: 27757
  peptide (1)..(381): Ceres Seq. ID no. 12558480
  misc_feature (1)..(381): Homolog of NCBI NO: 100424 NR Description: ADP,ATP carrier protein precursor - potato
  misc_feature (1)..(381): Homolog of NCBI NO: 113457 NR Description: ADP,ATP carrier protein, mitochondrial precursor
  misc_feature (1)..(381): Homolog of NCBI NO: 1890116 NR Description: ADP/ATP translocator [Lycopersicon esculentum]
  misc_feature (6)..(380): Homolog of NCBI NO: 113461 NR Description: ADP,ATP carrier protein, mitochondrial precursor
  misc_feature (2)..(381): Homolog of NCBI NO: 3334115 NR Description: ADP,ATP carrier protein 1, mitochondrial (ADP/ATP translocase 1) (Adenine nucleotide translocator 1) (ANT
  misc_feature (1)..(381): Homolog of NCBI NO: 478810 NR Description: ADP,ATP carrier protein - Arabidopsis thaliana
  misc_feature (1)..(381): Homolog of NCBI NO: 15240640 NR Description: adenosine nucleotide translocator
  misc_feature (1)..(381): Homolog of NCBI NO: 444790 NR Description: nucleotide translocator
  misc_feature (4)..(381): Homolog of NCBI NO: 99658 NR Description: ADP,ATP carrier protein - Arabidopsis thaliana
  misc_feature (1)..(381): Homolog of NCBI NO: 15231937 NR Description: adenylate translocator
  misc_feature (1)..(381): Homolog of NCBI NO: 100424 NR Description: ADP,ATP carrier protein precursor - potato
  misc_feature (1)..(381): Homolog of NCBI NO: 113457 NR Description: ADP,ATP carrier protein, mitochondrial precursor
  misc_feature (1)..(381): Homolog of NCBI NO: 1890116 NR Description: ADP/ATP translocator [Lycopersicon esculentum]
  misc_feature (6)..(380): Homolog of NCBI NO: 113461 NR Description: ADP,ATP carrier protein, mitochondrial precursor
  misc_feature (2)..(381): Homolog of NCBI NO: 3334115 NR Description: ADP,ATP carrier protein 1, mitochondrial (ADP/ATP translocase 1) (Adenine nucleotide translocator 1) (ANT
  misc_feature (1)..(381): Homolog of NCBI NO: 478810 NR Description: ADP,ATP carrier protein - Arabidopsis thaliana
  misc_feature (1)..(381): Homolog of NCBI NO: 15240640 NR Description: adenosine nucleotide translocator
  misc_feature (1)..(381): Homolog of NCBI NO: 444790 NR Description: nucleotide translocator
  misc_feature (4)..(381): Homolog of NCBI NO: 99658 NR Description: ADP,ATP carrier protein - Arabidopsis thaliana
  misc_feature (1)..(381): Homolog of NCBI NO: 15231937 NR Description: adenylate translocator

SEQ ID NO: 31348 - protein, 363 aa, Arabidopsis thaliana; identical to SEQ ID NO: 27758
  peptide (1)..(363): Ceres Seq. ID no. 12558481
  misc_feature (1)..(363): Homolog of NCBI NO: 100424 NR Description: ADP,ATP carrier protein precursor - potato
  misc_feature (1)..(363): Homolog of NCBI NO: 113457 NR Description: ADP,ATP carrier protein, mitochondrial precursor
  misc_feature (1)..(363): Homolog of NCBI NO: 1890116 NR Description: ADP/ATP translocator [Lycopersicon esculentum]
  misc_feature (1)..(362): Homolog of NCBI NO: 113461 NR Description: ADP,ATP carrier protein, mitochondrial precursor
  misc_feature (1)..(363): Homolog of NCBI NO: 3334115 NR Description: ADP,ATP carrier protein 1, mitochondrial (ADP/ATP translocase 1) (Adenine nucleotide translocator 1) (ANT
  misc_feature (1)..(363): Homolog of NCBI NO: 478810 NR Description: ADP,ATP carrier protein - Arabidopsis thaliana
  misc_feature (1)..(363): Homolog of NCBI NO: 15240640 NR Description: adenosine nucleotide translocator
  misc_feature (1)..(363): Homolog of NCBI NO: 444790 NR Description: nucleotide translocator
  misc_feature (1)..(363): Homolog of NCBI NO: 99658 NR Description: ADP,ATP carrier protein - Arabidopsis thaliana
  misc_feature (1)..(363): Homolog of NCBI NO: 15231937 NR Description: adenylate translocator
  misc_feature (1)..(363): Homolog of NCBI NO: 100424 NR Description: ADP,ATP carrier protein precursor - potato
  misc_feature (1)..(363): Homolog of NCBI NO: 113457 NR Description: ADP,ATP carrier protein, mitochondrial precursor
  misc_feature (1)..(363): Homolog of NCBI NO: 1890116 NR Description: ADP/ATP translocator [Lycopersicon esculentum]
  misc_feature (1)..(362): Homolog of NCBI NO: 113461 NR Description: ADP,ATP carrier protein, mitochondrial precursor
  misc_feature (1)..(363): Homolog of NCBI NO: 3334115 NR Description: ADP,ATP carrier protein 1, mitochondrial (ADP/ATP translocase 1) (Adenine nucleotide translocator 1) (ANT
  misc_feature (1)..(363): Homolog of NCBI NO: 478810 NR Description: ADP,ATP carrier protein - Arabidopsis thaliana
  misc_feature (1)..(363): Homolog of NCBI NO: 15240640 NR Description: adenosine nucleotide translocator
  misc_feature (1)..(363): Homolog of NCBI NO: 444790 NR Description: nucleotide translocator
  misc_feature (1)..(363): Homolog of NCBI NO: 99658 NR Description: ADP,ATP carrier protein - Arabidopsis thaliana
  misc_feature (1)..(363): Homolog of NCBI NO: 15231937 NR Description: adenylate translocator

SEQ ID NO: 31349 - protein, 346 aa, Arabidopsis thaliana; identical to SEQ ID NO: 27759
  peptide (1)..(346): Ceres Seq. ID no. 12558482
  misc_feature (1)..(346): Homolog of NCBI NO: 100424 NR Description: ADP,ATP carrier protein precursor - potato
  misc_feature (1)..(346): Homolog of NCBI NO: 113457 NR Description: ADP,ATP carrier protein, mitochondrial precursor
  misc_feature (1)..(346): Homolog of NCBI NO: 1890116 NR Description: ADP/ATP translocator [Lycopersicon esculentum]
  misc_feature (1)..(345): Homolog of NCBI NO: 113461 NR Description: ADP,ATP carrier protein, mitochondrial precursor
  misc_feature (1)..(346): Homolog of NCBI NO: 3334115 NR Description: ADP,ATP carrier protein 1, mitochondrial (ADP/ATP translocase 1) (Adenine nucleotide translocator 1) (ANT
  misc_feature (1)..(346): Homolog of NCBI NO: 478810 NR Description: ADP,ATP carrier protein - Arabidopsis thaliana
  misc_feature (1)..(346): Homolog of NCBI NO: 15240640 NR Description: adenosine nucleotide translocator
  misc_feature (1)..(346): Homolog of NCBI NO: 444790 NR Description: nucleotide translocator
  misc_feature (1)..(346): Homolog of NCBI NO: 99658 NR Description: ADP,ATP carrier protein - Arabidopsis thaliana
  misc_feature (1)..(346): Homolog of NCBI NO: 15231937 NR Description: adenylate translocator
  misc_feature (1)..(346): Homolog of NCBI NO: 100424 NR Description: ADP,ATP carrier protein precursor - potato
  misc_feature (1)..(346): Homolog of NCBI NO: 113457 NR Description: ADP,ATP carrier protein, mitochondrial precursor
  misc_feature (1)..(346): Homolog of NCBI NO: 1890116 NR Description: ADP/ATP translocator [Lycopersicon esculentum]
  misc_feature (1)..(345): Homolog of NCBI NO: 113461 NR Description: ADP,ATP carrier protein, mitochondrial precursor
  misc_feature (1)..(346): Homolog of NCBI NO: 3334115 NR Description: ADP,ATP carrier protein 1, mitochondrial (ADP/ATP translocase 1) (Adenine nucleotide translocator 1) (ANT
  misc_feature (1)..(346): Homolog of NCBI NO: 478810 NR Description: ADP,ATP carrier protein - Arabidopsis thaliana
  misc_feature (1)..(346): Homolog of NCBI NO: 15240640 NR Description: adenosine nucleotide translocator
  misc_feature (1)..(346): Homolog of NCBI NO: 444790 NR Description: nucleotide translocator
  misc_feature (1)..(346): Homolog of NCBI NO: 99658 NR Description: ADP,ATP carrier protein - Arabidopsis thaliana
  misc_feature (1)..(346): Homolog of NCBI NO: 15231937 NR Description: adenylate translocator

SEQ ID NO: 31350 - DNA, 1314 bp, Arabidopsis thaliana; identical to SEQ ID NO: 27760
  misc_feature (1)..(1314): Ceres Seq. ID no. 12371735
  misc_feature: MA Experiment ID: 108433 Result: Up-regulated in Transcription
  misc_feature: MA Experiment 108433 PARAMETER Experiment Name: At_rhl_Mutant2_cDNA_P Parameter: Age (day) Value: 7
  misc_feature: MA Experiment 108433 PARAMETER Experiment Name: At_rhl_Mutant2_cDNA_P Parameter: Organism Value: A. thaliana
  misc_feature: MA Experiment 108433 PARAMETER Experiment Name: At_rhl_Mutant2_cDNA_P Parameter: Plant Line Value: rhl Mutant vs. wt landsburg
  misc_feature: MA Experiment 108433 PARAMETER Experiment Name: At_rhl_Mutant2_cDNA_P Parameter: Tissue Value: Roots
  misc_feature: MA Experiment ID: 108434 Result: Down-regulated in Transcription
  misc_feature: MA Experiment 108434 PARAMETER Experiment Name: At_Root_Tips_cDNA_P Parameter: Tissue Value: Root Tips
  misc_feature: MA Experiment ID: 108461 Result: Down-regulated in Transcription
  misc_feature: MA Experiment 108461 PARAMETER Experiment Name: At_Germinating_Seeds_cDNA_P Parameter: Age (day) Value: 1 vs. 0
  misc_feature: MA Experiment 108461 PARAMETER Experiment Name: At_Germinating_Seeds_cDNA_P Parameter: Tissue Value: Germinating Seeds
  misc_feature: MA Experiment ID: 108572 Result: Up-regulated in Transcription
  misc_feature: MA Experiment 108572 PARAMETER Experiment Name: At_Drought_cDNA_P Parameter: Timepoint (hr) Value: 1
  misc_feature: MA Experiment 108572 PARAMETER Experiment Name: At_Drought_cDNA_P Parameter: Tissue Value: Aerial
  misc_feature: MA Experiment 108572 PARAMETER Experiment Name: At_Drought_cDNA_P Parameter: Treatment Value: Drought vs. No Drought
  misc_feature: MA Experiment ID: 108573 Result: Up-regulated in Transcription
  misc_feature: MA Experiment 108573 PARAMETER Experiment Name: At_Drought_cDNA_P Parameter: Timepoint (hr) Value: 6
  misc_feature: MA Experiment 108573 PARAMETER Experiment Name: At_Drought_cDNA_P Parameter: Tissue Value: Aerial
  misc_feature: MA Experiment 108573 PARAMETER Experiment Name: At_Drought_cDNA_P Parameter: Treatment Value: Drought vs. No Drought
  misc_feature: MA Experiment ID: 108577 Result: Down-regulated in Transcription
  misc_feature: MA Experiment 108577 PARAMETER Experiment Name: At_42deg_Heat_cDNA_P Parameter: Temperature (deg C) Value: 42 vs. 22
  misc_feature: MA Experiment 108577 PARAMETER Experiment Name: At_42deg_Heat_cDNA_P Parameter: Timepoint (hr) Value: 6
  misc_feature: MA Experiment 108577 PARAMETER Experiment Name: At_42deg_Heat_cDNA_P Parameter: Tissue Value: Aerial
  misc_feature: MA Experiment ID: 108585 Result: Down-regulated in Transcription
  misc_feature: MA Experiment 108585 PARAMETER Experiment Name: At_5mM_NaNP_cDNA_P Parameter: Timepoint (hr) Value: 6
  misc_feature: MA Experiment 108585 PARAMETER Experiment Name: At_5mM_NaNP_cDNA_P Parameter: Tissue Value: Aerial
  misc_feature: MA Experiment 108585 PARAMETER Experiment Name: At_5mM_NaNP_cDNA_P Parameter: Treatment Value: null
  misc_feature: MA Experiment ID: 108594 Result: Down-regulated in Transcription
  misc_feature: MA Experiment 108594 PARAMETER Experiment Name: At_Ler-rhl_Root_cDNA_P Parameter: Plant Line Value: null
  misc_feature: MA Experiment ID: 108595 Result: Down-regulated in Transcription
  misc_feature: MA Experiment 108595 PARAMETER Experiment Name: At_Ler-pi_Ovule_cDNA_P Parameter: Plant Line Value: null
  misc_feature: MA Experiment ID: 108605 Result: Up-regulated in Transcription
  misc_feature: MA Experiment 108605 PARAMETER Experiment Name: At_100uM_ABA_cDNA_P Parameter: Timepoint (hr) Value: 6
  misc_feature: MA Experiment 108605 PARAMETER Experiment Name: At_100uM_ABA_cDNA_P Parameter: Tissue Value: Aerial
  misc_feature: MA Experiment 108605 PARAMETER Experiment Name: At_100uM_ABA_cDNA_P Parameter: Treatment Value: 100uM ABA vs. No Treatment
  misc_feature: MA Experiment ID: 20000069 Result: Up-regulated in Transcription
  misc_feature: MA Experiment 20000069 PARAMETER Experiment Name: At_100uM_ABA_Mutants_cDNA_P Parameter: Plant Line Value: CS23
  misc_feature: MA Experiment 20000069 PARAMETER Experiment Name: At_100uM_ABA_Mutants_cDNA_P Parameter: Timepoint (hr) Value: 6
  misc_feature: MA Experiment 20000069 PARAMETER Experiment Name: At_100uM_ABA_Mutants_cDNA_P Parameter: Tissue Value: Aerial
  misc_feature: MA Experiment 20000069 PARAMETER Experiment Name: At_100uM_ABA_Mutants_cDNA_P Parameter: Treatment Value: 100uM ABA vs. No Treatment
  misc_feature: MA Experiment ID: 20000071 Result: Up-regulated in Transcription
  misc_feature: MA Experiment 20000071 PARAMETER Experiment Name: At_100uM_ABA_Mutants_cDNA_P Parameter: Plant Line Value: CS8104
  misc_feature: MA Experiment 20000071 PARAMETER Experiment Name: At_100uM_ABA_Mutants_cDNA_P Parameter: Timepoint (hr) Value: 6
  misc_feature: MA Experiment 20000071 PARAMETER Experiment Name: At_100uM_ABA_Mutants_cDNA_P Parameter: Tissue Value: Aerial
  misc_feature: MA Experiment 20000071 PARAMETER Experiment Name: At_100uM_ABA_Mutants_cDNA_P Parameter: Treatment Value: 100uM ABA vs. No Treatment
  misc_feature: MA Experiment ID: 20000111 Result: Down-regulated in Transcription
  misc_feature: MA Experiment 20000111 PARAMETER Experiment Name: At_42deg_Heat_cDNA_P Parameter: Temperature (deg C) Value: 42 vs. 22
  misc_feature: MA Experiment 20000111 PARAMETER Experiment Name: At_42deg_Heat_cDNA_P Parameter: Timepoint (hr) Value: 6
  misc_feature: MA Experiment 20000111 PARAMETER Experiment Name: At_42deg_Heat_cDNA_P Parameter: Tissue Value: Aerial
  misc_feature: MA Experiment ID: 20000169 Result: Up-regulated in Transcription
  misc_feature: MA Experiment 20000169 PARAMETER Experiment Name: At_100uM_ABA_P Parameter: Age (day) Value: 14
  misc_feature: MA Experiment 20000169 PARAMETER Experiment Name: At_100uM_ABA_P Parameter: Organism Value: A. thaliana
  misc_feature: MA Experiment 20000169 PARAMETER Experiment Name: At_100uM_ABA_P Parameter: Plant Line Value: WS
  misc_feature: MA Experiment 20000169 PARAMETER Experiment Name: At_100uM_ABA_P Parameter: Timepoint (hr) Value: 6
  misc_feature: MA Experiment 20000169 PARAMETER Experiment Name: At_100uM_ABA_P Parameter: Tissue Value: Aerial
  misc_feature: MA Experiment 20000169 PARAMETER Experiment Name: At_100uM_ABA_P Parameter: Treatment Value: 100uM ABA vs. No Treatment
  misc_feature: MA Experiment ID: 20000173 Result: Down-regulated in Transcription
  misc_feature: MA Experiment 20000173 PARAMETER Experiment Name: At_42deg_Heat_P Parameter: Age (day) Value: 14
  misc_feature: MA Experiment 20000173 PARAMETER Experiment Name: At_42deg_Heat_P Parameter: Organism Value: A. thaliana
  misc_feature: MA Experiment 20000173 PARAMETER Experiment Name: At_42deg_Heat_P Parameter: Plant Line Value: WS
  misc_feature: MA Experiment 20000173 PARAMETER Experiment Name: At_42deg_Heat_P Parameter: Temperature (deg C) Value: 42 vs. 22
  misc_feature: MA Experiment 20000173 PARAMETER Experiment Name: At_42deg_Heat_P Parameter: Timepoint (hr) Value: 6
  misc_feature: MA Experiment 20000173 PARAMETER Experiment Name: At_42deg_Heat_P Parameter: Tissue Value: Aerial
  misc_feature: MA Experiment ID: 20000184 Result: Down-regulated in Transcription
  misc_feature: MA Experiment 20000184 PARAMETER Experiment Name: At_Shoots__P Parameter: Age (day) Value: 7
  misc_feature: MA Experiment 20000184 PARAMETER Experiment Name: At_Shoots__P Parameter: Tissue Value: Shoots vs. Whole Plant
  misc_feature: MA Experiment ID: 20000227 Result: Down-regulated in Transcription
  misc_feature: MA Experiment 20000227 PARAMETER Experiment Name: At_Root-Tips-vs-Tops_P Parameter: Tissue Value: Root Tips vs. Root Tops
  misc_feature: MA Experiment ID: 20000234 Result: Down-regulated in Transcription
  misc_feature: MA Experiment 20000234 PARAMETER Experiment Name: At_Siliques_P Parameter: Age (day) Value: 21
  misc_feature: MA Experiment 20000234 PARAMETER Experiment Name: At_Siliques_P Parameter: Organism Value: A. thaliana
  misc_feature: MA Experiment 20000234 PARAMETER Experiment Name: At_Siliques_P Parameter: Plant Line Value: WS
  misc_feature: MA Experiment 20000234 PARAMETER Experiment Name: At_Siliques_P Parameter: Tissue Value: Less Than 5mm Siliques vs. Whole Plant
  misc_feature: MA Experiment ID: 20000235 Result: Down-regulated in Transcription
  misc_feature: MA Experiment 20000235 PARAMETER Experiment Name: At_Siliques_P Parameter: Age (day) Value: 21
  misc_feature: MA Experiment 20000235 PARAMETER Experiment Name: At_Siliques_P Parameter: Organism Value: A. thaliana
  misc_feature: MA Experiment 20000235 PARAMETER Experiment Name: At_Siliques_P Parameter: Plant Line Value: WS
  misc_feature: MA Experiment 20000235 PARAMETER Experiment Name: At_Siliques_P Parameter: Tissue Value: 5-10mm Siliques vs. Whole Plant
  misc_feature: MA Experiment ID: 20000265 Result: Down-regulated in Transcription
  misc_feature: MA Experiment 20000265 PARAMETER Experiment Name: At_Open_Flower_P Parameter: Age (day) Value: 21
  misc_feature: MA Experiment 20000265 PARAMETER Experiment Name: At_Open_Flower_P Parameter: Plant Line Value: WS
  misc_feature: MA Experiment 20000265 PARAMETER Experiment Name: At_Open_Flower_P Parameter: Tissue Value: Closed Flower vs. Whole Plant
  misc_feature: MA Experiment ID: 20000286 Result: Down-regulated in Transcription
  misc_feature: MA Experiment 20000286 PARAMETER Experiment Name: At_Open_Flower_P Parameter: Age (day) Value: 21
  misc_feature: MA Experiment 20000286 PARAMETER Experiment Name: At_Open_Flower_P Parameter: Plant Line Value: WS
  misc_feature: MA Experiment 20000286 PARAMETER Experiment Name: At_Open_Flower_P Parameter: Tissue Value: Half Open vs. Whole Plant
  misc_feature: MA Experiment ID: 20000436 Result: Up-regulated in Transcription
  misc_feature: MA Experiment 20000436 PARAMETER Experiment Name: At_Drought_P Parameter: Age (day) Value: 7
  misc_feature: MA Experiment 20000436 PARAMETER Experiment Name: At_Drought_P Parameter: Organism Value: A. thaliana
  misc_feature: MA Experiment 20000436 PARAMETER Experiment Name: At_Drought_P Parameter: Plant Line Value: WS
  misc_feature: MA Experiment 20000436 PARAMETER Experiment Name: At_Drought_P Parameter: Timepoint (hr) Value: 12
  misc_feature: MA Experiment 20000436 PARAMETER Experiment Name: At_Drought_P Parameter: Tissue Value: Whole Plant
  misc_feature: MA Experiment 20000436 PARAMETER Experiment Name: At_Drought_P Parameter: Treatment Value: Drought vs. No Drought
  misc_feature: MA Experiment ID: 20000437 Result: Up-regulated in Transcription
  misc_feature: MA Experiment 20000437 PARAMETER Experiment Name: At_Drought_P Parameter: Age (day) Value: 8
  misc_feature: MA Experiment 20000437 PARAMETER Experiment Name: At_Drought_P Parameter: Organism Value: A. thaliana
  misc_feature: MA Experiment 20000437 PARAMETER Experiment Name: At_Drought_P Parameter: Plant Line Value: WS
  misc_feature: MA Experiment 20000437 PARAMETER Experiment Name: At_Drought_P Parameter: Timepoint (hr) Value: 24
  misc_feature: MA Experiment 20000437 PARAMETER Experiment Name: At_Drought_P Parameter: Tissue Value: Whole Plant
  misc_feature: MA Experiment 20000437 PARAMETER Experiment Name: At_Drought_P Parameter: Treatment Value: Drought vs. No Drought
  misc_feature: MA Experiment ID: 20000573 Result: Down-regulated in Transcription
  misc_feature: MA Experiment 20000573 PARAMETER Experiment Name: At_100uM_ABA_Mutants__P Parameter: Organism Value: A. thaliana
  misc_feature: MA Experiment 20000573 PARAMETER Experiment Name: At_100uM_ABA_Mutants__P Parameter: Plant Line Value: CS22 vs. Ler wt
  misc_feature: MA Experiment 20000573 PARAMETER Experiment Name: At_100uM_ABA_Mutants__P Parameter: Timepoint (hr) Value: N/A
  misc_feature: MA Experiment 20000573 PARAMETER Experiment Name: At_100uM_ABA_Mutants__P Parameter: Tissue Value: Whole Plant
  misc_feature: MA Experiment 20000573 PARAMETER Experiment Name: At_100uM_ABA_Mutants__P Parameter: Treatment Value: None
  misc_feature: MA Experiment ID: 20000574 Result: Down-regulated in Transcription
  misc_feature: MA Experiment 20000574 PARAMETER Experiment Name: At_100uM_ABA_Mutants__P Parameter: Organism Value: A. thaliana
  misc_feature: MA Experiment 20000574 PARAMETER Experiment Name: At_100uM_ABA_Mutants__P Parameter: Plant Line Value: CS23 vs. Ler wt
  misc_feature: MA Experiment 20000574 PARAMETER Experiment Name: At_100uM_ABA_Mutants__P Parameter: Timepoint (hr) Value: N/A
  misc_feature: MA Experiment 20000574 PARAMETER Experiment Name: At_100uM_ABA_Mutants__P Parameter: Tissue Value: Whole Plant
  misc_feature: MA Experiment 20000574 PARAMETER Experiment Name: At_100uM_ABA_Mutants__P Parameter: Treatment Value: None
  misc_feature: MA Experiment ID: 20000794 Result: Up-regulated in Transcription
  misc_feature: MA Experiment 20000794 PARAMETER Experiment Name: At_Petals_P Parameter: Age (day) Value: 23-25 days
  misc_feature: MA Experiment 20000794 PARAMETER Experiment Name: At_Petals_P Parameter: Plant Line Value: WS
  misc_feature: MA Experiment 20000794 PARAMETER Experiment Name: At_Petals_P Parameter: Tissue Value: Petals vs. Whole plant
  misc_feature: MA Experiment ID: 20001557 Result: Down-regulated in Transcription
  misc_feature: MA Experiment 20001557 PARAMETER Experiment Name: At_Drought_Soil_Dry_P Parameter: Age (day) Value: 27
  misc_feature: MA Experiment 20001557 PARAMETER Experiment Name: At_Drought_Soil_Dry_P Parameter: Organism Value: A. thaliana
  misc_feature: MA Experiment 20001557 PARAMETER Experiment Name: At_Drought_Soil_Dry_P Parameter: Plant Line Value: WS
  misc_feature: MA Experiment 20001557 PARAMETER Experiment Name: At_Drought_Soil_Dry_P Parameter: Post Timepoint (hr) Value: 3
  misc_feature: MA Experiment 20001557 PARAMETER Experiment Name: At_Drought_Soil_Dry_P Parameter: Post-Treatment Value: Re-Water vs. No Drought
  misc_feature: MA Experiment 20001557 PARAMETER Experiment Name: At_Drought_Soil_Dry_P Parameter: Timepoint (day) Value: 13
  misc_feature: MA Experiment 20001557 PARAMETER Experiment Name: At_Drought_Soil_Dry_P Parameter: Treatment Value: Drought vs. No Drought
  misc_feature: MA Experiment ID: 20001558 Result: Down-regulated in Transcription
  misc_feature: MA Experiment 20001558 PARAMETER Experiment Name: At_Drought_Soil_Dry_P Parameter: Age (day) Value: 27
  misc_feature: MA Experiment 20001558 PARAMETER Experiment Name: At_Drought_Soil_Dry_P Parameter: Organism Value: A. thaliana
  misc_feature: MA Experiment 20001558 PARAMETER Experiment Name: At_Drought_Soil_Dry_P Parameter: Plant Line Value: WS
  misc_feature: MA Experiment 20001558 PARAMETER Experiment Name: At_Drought_Soil_Dry_P Parameter: Post Timepoint (hr) Value: 6
  misc_feature: MA Experiment 20001558 PARAMETER Experiment Name: At_Drought_Soil_Dry_P Parameter: Post-Treatment Value: Re-Water vs. No Drought
  misc_feature: MA Experiment 20001558 PARAMETER Experiment Name: At_Drought_Soil_Dry_P Parameter: Timepoint (day) Value: 13
  misc_feature: MA Experiment 20001558 PARAMETER Experiment Name: At_Drought_Soil_Dry_P Parameter: Treatment Value: Drought vs. No Drought
  misc_feature: MA Experiment ID: 20001560 Result: Down-regulated in Transcription
  misc_feature: MA Experiment 20001560 PARAMETER Experiment Name: At_Drought_Soil_Dry_P Parameter: Age (day) Value: 28
  misc_feature: MA Experiment 20001560 PARAMETER Experiment Name: At_Drought_Soil_Dry_P Parameter: Organism Value: A. thaliana
  misc_feature: MA Experiment 20001560 PARAMETER Experiment Name: At_Drought_Soil_Dry_P Parameter: Plant Line Value: WS
  misc_feature: MA Experiment 20001560 PARAMETER Experiment Name: At_Drought_Soil_Dry_P Parameter: Post Timepoint (hr) Value: None
  misc_feature: MA Experiment 20001560 PARAMETER Experiment Name: At_Drought_Soil_Dry_P Parameter: Post-Treatment Value: None
  misc_feature: MA Experiment 20001560 PARAMETER Experiment Name: At_Drought_Soil_Dry_P Parameter: Timepoint (day) Value: 14
  misc_feature: MA Experiment 20001560 PARAMETER Experiment Name: At_Drought_Soil_Dry_P Parameter: Treatment Value: Drought vs. No Drought
  misc_feature: MA Experiment ID: 20001911 Result: Up-regulated in Transcription
  misc_feature: MA Experiment 20001911 PARAMETER Experiment Name: At_Drought_Reproduction_P Parameter: Age (day) Value: 40
  misc_feature: MA Experiment 20001911 PARAMETER Experiment Name: At_Drought_Reproduction_P Parameter: Organism Value: A. thaliana
  misc_feature: MA Experiment 20001911 PARAMETER Experiment Name: At_Drought_Reproduction_P Parameter: Plant Line Value: WS
  misc_feature: MA Experiment 20001911 PARAMETER Experiment Name: At_Drought_Reproduction_P Parameter: Timepoint (day) Value: 10
  misc_feature: MA Experiment 20001911 PARAMETER Experiment Name: At_Drought_Reproduction_P Parameter: Tissue Value: Flowers
  misc_feature: MA Experiment 20001911 PARAMETER Experiment Name: At_Drought_Reproduction_P Parameter: Treatment Value: Drought vs. No Drought

SEQ ID NO: 31351 - protein, 346 aa, Arabidopsis thaliana; identical to SEQ ID NO: 27761
  peptide (1)..(346): Ceres Seq. ID no. 12371736
  misc_feature (64)..(335): Pfam Name: Choline/ethanolamine kinase Pfam Description: Choline/ethanolamine kinase
  misc_feature (8)..(341): Homolog of NCBI NO: 12323732 NR Description: putative choline kinase; 4535-2895 [Arabidopsis
  misc_feature (14)..(342): Homolog of NCBI NO: 25348157 NR Description: protein choline kinase F1O17.1 [imported] -
  misc_feature (14)..(342): Homolog of NCBI NO: 22330627 NR Description: putative choline kinase
  misc_feature (1)..(341): Homolog of NCBI NO: 7488652 NR Description: choline kinase (EC 2.7.1.32) CK1 - soybean
  misc_feature (1)..(341): Homolog of NCBI NO: 12311795 NR Description: choline kinase [Pisum sativum]
  misc_feature (1)..(341): Homolog of NCBI NO: 7488653 NR Description: choline kinase (EC 2.7.1.32) CK2 - soybean
  misc_feature (8)..(341): Homolog of NCBI NO: 15217543 NR Description: choline kinase, putative; protein id: At1g71697.1
  misc_feature (1)..(346): Homolog of NCBI NO: 21537276 NR Description: choline kinase GmCK2p-like protein [Arabidopsis
  misc_feature (1)..(346): Homolog of NCBI NO: 15234032 NR Description: choline kinase GmCK2p -like protein
  misc_feature (1)..(346): Homolog of NCBI NO: 21594823 NR Description: choline kinase GmCK2p-like protein [Arabidopsis

SEQ ID NO: 31352 - protein, 304 aa, Arabidopsis thaliana; identical to SEQ ID NO: 27762
  peptide (1)..(304): Ceres Seq. ID no. 12371737
  misc_feature (22)..(293): Pfam Name: Choline/ethanolamine kinase Pfam Description: Choline/ethanolamine kinase
  misc_feature (1)..(299): Homolog of NCBI NO: 12323732 NR Description: putative choline kinase; 4535-2895 [Arabidopsis
  misc_feature (1)..(300): Homolog of NCBI NO: 25348157 NR Description: protein choline kinase F1O17.1 [imported] -
  misc_feature (1)..(300): Homolog of NCBI NO: 22330627 NR Description: putative choline kinase
  misc_feature (1)..(299): Homolog of NCBI NO: 7488652 NR Description: choline kinase (EC 2.7.1.32) CK1 - soybean
  misc_feature (1)..(299): Homolog of NCBI NO: 12311795 NR Description: choline kinase [Pisum sativum]
  misc_feature (1)..(299): Homolog of NCBI NO: 7488653 NR Description: choline kinase (EC 2.7.1.32) CK2 - soybean
  misc_feature (1)..(299): Homolog of NCBI NO: 15217543 NR Description: choline kinase, putative; protein id: At1g71697.1
  misc_feature (1)..(304): Homolog of NCBI NO: 21537276 NR Description: choline kinase GmCK2p-like protein [Arabidopsis
  misc_feature (1)..(304): Homolog of NCBI NO: 15234032 NR Description: choline kinase GmCK2p -like protein
  misc_feature (1)..(304): Homolog of NCBI NO: 21594823 NR Description: choline kinase GmCK2p-like protein [Arabidopsis

SEQ ID NO: 31353 - protein, 300 aa, Arabidopsis thaliana; identical to SEQ ID NO: 27763
  peptide (1)..(300): Ceres Seq. ID no. 12371738
  misc_feature (18)..(289): Pfam Name: Choline/ethanolamine kinase Pfam Description: Choline/ethanolamine kinase
  misc_feature (1)..(295): Homolog of NCBI NO: 12323732 NR Description: putative choline kinase; 4535-2895 [Arabidopsis
  misc_feature (1)..(296): Homolog of NCBI NO: 25348157 NR Description: protein choline kinase F1O17.1 [imported] -
  misc_feature (1)..(296): Homolog of NCBI NO: 22330627 NR Description: putative choline kinase
  misc_feature (1)..(295): Homolog of NCBI NO: 7488652 NR Description: choline kinase (EC 2.7.1.32) CK1 - soybean
  misc_feature (1)..(295): Homolog of NCBI NO: 12311795 NR Description: choline kinase [Pisum sativum]
  misc_feature (1)..(295): Homolog of NCBI NO: 7488653 NR Description: choline kinase (EC 2.7.1.32) CK2 - soybean
  misc_feature (1)..(295): Homolog of NCBI NO: 15217543 NR Description: choline kinase, putative; protein id: At1g71697.1
  misc_feature (1)..(300): Homolog of NCBI NO: 21537276 NR Description: choline kinase GmCK2p-like protein [Arabidopsis
  misc_feature (1)..(300): Homolog of NCBI NO: 15234032 NR Description: choline kinase GmCK2p -like protein
  misc_feature (1)..(300): Homolog of NCBI NO: 21594823 NR Description: choline kinase GmCK2p-like protein [Arabidopsis

SEQ ID NO: 31354 - DNA, 1014 bp, Arabidopsis thaliana; identical to SEQ ID NO: 27764
  misc_feature (1)..(1014): Ceres Seq. ID no. 13489272
  misc_feature: MA Experiment ID: 108577 Result: Down-regulated in Transcription
  misc_feature: MA Experiment 108577 PARAMETER Experiment Name: At_42deg_Heat_cDNA_P Parameter: Temperature (deg C) Value: 42 vs. 22
  misc_feature: MA Experiment 108577 PARAMETER Experiment Name: At_42deg_Heat_cDNA_P Parameter: Timepoint (hr) Value: 6
  misc_feature: MA Experiment 108577 PARAMETER Experiment Name: At_42deg_Heat_cDNA_P Parameter: Tissue Value: Aerial
  misc_feature: MA Experiment ID: 20000111 Result: Down-regulated in Transcription
  misc_feature: MA Experiment 20000111 PARAMETER Experiment Name: At_42deg_Heat_cDNA_P Parameter: Temperature (deg C) Value: 42 vs. 22
  misc_feature: MA Experiment 20000111 PARAMETER Experiment Name: At_42deg_Heat_cDNA_P Parameter: Timepoint (hr) Value: 6
  misc_feature: MA Experiment 20000111 PARAMETER Experiment Name: At_42deg_Heat_cDNA_P Parameter: Tissue Value: Aerial
  misc_feature: MA Experiment ID: 20000113 Result: Down-regulated in Transcription
  misc_feature: MA Experiment 20000113 PARAMETER Experiment Name: At_42deg_Heat_cDNA_P Parameter: Temperature (deg C) Value: 42 vs. 22
  misc_feature: MA Experiment 20000113 PARAMETER Experiment Name: At_42deg_Heat_cDNA_P Parameter: Timepoint (hr) Value: 8
  misc_feature: MA Experiment 20000113 PARAMETER Experiment Name: At_42deg_Heat_cDNA_P Parameter: Tissue Value: Aerial
  misc_feature: MA Experiment ID: 20000173 Result: Down-regulated in Transcription
  misc_feature: MA Experiment 20000173 PARAMETER Experiment Name: At_42deg_Heat_P Parameter: Age (day) Value: 14
  misc_feature: MA Experiment 20000173 PARAMETER Experiment Name: At_42deg_Heat_P Parameter: Organism Value: A. thaliana
  misc_feature: MA Experiment 20000173 PARAMETER Experiment Name: At_42deg_Heat_P Parameter: Plant Line Value: WS
  misc_feature: MA Experiment 20000173 PARAMETER Experiment Name: At_42deg_Heat_P Parameter: Temperature (deg C) Value: 42 vs. 22
  misc_feature: MA Experiment 20000173 PARAMETER Experiment Name: At_42deg_Heat_P Parameter: Timepoint (hr) Value: 6
  misc_feature: MA Experiment 20000173 PARAMETER Experiment Name: At_42deg_Heat_P Parameter: Tissue Value: Aerial
  misc_feature: MA Experiment ID: 20000224 Result: Down-regulated in Transcription

SEQ ID NO: 31355 - protein, 255 aa, Arabidopsis thaliana; identical to SEQ ID NO: 27765
  peptide (1)..(255): Ceres Seq. ID no. 13489273
  misc_feature (27)..(255): Pfam Name: HAD superfamily, subfamily IIIB (Acid phosphatase) Pfam Description: HAD superfamily, subfamily IIIB (Acid
  misc_feature (16)..(255): Homolog of NCBI NO: 15224907 NR Description: acid phosphatase -related [Arabidopsis thaliana]
  misc_feature (43)..(254): Homolog of NCBI NO: 445113 NR Description: acid phosphatase 1
  misc_feature (43)..(254): Homolog of NCBI NO: 130718 NR Description: Acid phosphatase precursor 1
  misc_feature (23)..(255): Homolog of NCBI NO: 15241412 NR Description: acid phosphatase [Arabidopsis thaliana]
  misc_feature (42)..(255): Homolog of NCBI NO: 15234949 NR Description: acid phosphatase - like protein [Arabidopsis
  misc_feature (1)..(254): Homolog of NCBI NO: 15233526 NR Description: acid phosphatase-related protein [Arabidopsis
  misc_feature (1)..(255): Homolog of NCBI NO: 15233504 NR Description: acid phosphatase-related protein [Arabidopsis

SEQ ID NO: 31356 - DNA, 1610 bp, Arabidopsis thaliana; identical to SEQ ID NO: 27766
  misc_feature (1)..(1610): Ceres Seq. ID no. 12325174
  misc_feature: MA Experiment ID: 108434 Result: Up-regulated in Transcription
  misc_feature: MA Experiment 108434 PARAMETER Experiment Name: At_Root_Tips_cDNA_P Parameter: Tissue Value: Root Tips
  misc_feature: MA Experiment ID: 108461 Result: Down-regulated in Transcription
  misc_feature: MA Experiment 108461 PARAMETER Experiment Name: At_Germinating_Seeds_cDNA_P Parameter: Age (day) Value: 1 vs. 0
  misc_feature: MA Experiment 108461 PARAMETER Experiment Name: At_Germinating_Seeds_cDNA_P Parameter: Tissue Value: Germinating Seeds
  misc_feature: MA Experiment ID: 108462 Result: Down-regulated in Transcription
  misc_feature: MA Experiment 108462 PARAMETER Experiment Name: At_Germinating_Seeds_cDNA_P Parameter: Age (day) Value: 2 vs. 0
  misc_feature: MA Experiment 108462 PARAMETER Experiment Name: At_Germinating_Seeds_cDNA_P Parameter: Tissue Value: Germinating Seeds
  misc_feature: MA Experiment ID: 108463 Result: Down-regulated in Transcription
  misc_feature: MA Experiment 108463 PARAMETER Experiment Name: At_Germinating_Seeds_cDNA_P Parameter: Age (day) Value: 3 vs. 0
  misc_feature: MA Experiment 108463 PARAMETER Experiment Name: At_Germinating_Seeds_cDNA_P Parameter: Tissue Value: Germinating Seeds
  misc_feature: MA Experiment ID: 108585 Result: Up-regulated in Transcription
  misc_feature: MA Experiment 108585 PARAMETER Experiment Name: At_5mM_NaNP_cDNA_P Parameter: Timepoint (hr) Value: 6
  misc_feature: MA Experiment 108585 PARAMETER Experiment Name: At_5mM_NaNP_cDNA_P Parameter: Tissue Value: Aerial
  misc_feature: MA Experiment 108585 PARAMETER Experiment Name: At_5mM_NaNP_cDNA_P Parameter: Treatment Value: null
  misc_feature: MA Experiment ID: 108595 Result: Up-regulated in Transcription
  misc_feature: MA Experiment 108595 PARAMETER Experiment Name: At_Ler-pi_Ovule_cDNA_P Parameter: Plant Line Value: null
  misc_feature: MA Experiment ID: 20000180 Result: Down-regulated in Transcription
  misc_feature: MA Experiment 20000180 PARAMETER Experiment Name: At_Germinating_Seeds_P Parameter: Age (hr) Value: 24 vs. 0
  misc_feature: MA Experiment 20000180 PARAMETER Experiment Name: At_Germinating_Seeds_P Parameter: Tissue Value: Germinating Seeds
  misc_feature: MA Experiment ID: 20000184 Result: Up-regulated in Transcription
  misc_feature: MA Experiment 20000184 PARAMETER Experiment Name: At_Shoots__P Parameter: Age (day) Value: 7
  misc_feature: MA Experiment 20000184 PARAMETER Experiment Name: At_Shoots__P Parameter: Tissue Value: Shoots vs. Whole Plant
  misc_feature: MA Experiment ID: 20000234 Result: Up-regulated in Transcription
  misc_feature: MA Experiment 20000234 PARAMETER Experiment Name: At_Siliques_P Parameter: Age (day) Value: 21
  misc_feature: MA Experiment 20000234 PARAMETER Experiment Name: At_Siliques_P Parameter: Organism Value: A. thaliana
  misc_feature: MA Experiment 20000234 PARAMETER Experiment Name: At_Siliques_P Parameter: Plant Line Value: WS
  misc_feature: MA Experiment 20000234 PARAMETER Experiment Name: At_Siliques_P Parameter: Tissue Value: Less Than 5mm Siliques vs. Whole Plant
  misc_feature: MA Experiment ID: 20000264 Result: Up-regulated in Transcription
  misc_feature: MA Experiment 20000264 PARAMETER Experiment Name: At_Open_Flower_P Parameter: Age (day) Value: 21
  misc_feature: MA Experiment 20000264 PARAMETER Experiment Name: At_Open_Flower_P Parameter: Plant Line Value: WS
  misc_feature: MA Experiment 20000264 PARAMETER Experiment Name: At_Open_Flower_P Parameter: Tissue Value: Open Flower vs. Whole Plant
  misc_feature: MA Experiment ID: 20000265 Result: Up-regulated in Transcription
  misc_feature: MA Experiment 20000265 PARAMETER Experiment Name: At_Open_Flower_P Parameter: Age (day) Value: 21
  misc_feature: MA Experiment 20000265 PARAMETER Experiment Name: At_Open_Flower_P Parameter: Plant Line Value: WS
  misc_feature: MA Experiment 20000265 PARAMETER Experiment Name: At_Open_Flower_P Parameter: Tissue Value: Closed Flower vs. Whole Plant
  misc_feature: MA Experiment ID: 20000286 Result: Up-regulated in Transcription
  misc_feature: MA Experiment 20000286 PARAMETER Experiment Name: At_Open_Flower_P Parameter: Age (day) Value: 21
  misc_feature: MA Experiment 20000286 PARAMETER Experiment Name: At_Open_Flower_P Parameter: Plant Line Value: WS
  misc_feature: MA Experiment 20000286 PARAMETER Experiment Name: At_Open_Flower_P Parameter: Tissue Value: Half Open vs. Whole Plant
  misc_feature: MA Experiment ID: 20001557 Result: Up-regulated in Transcription
  misc_feature: MA Experiment 20001557 PARAMETER Experiment Name: At_Drought_Soil_Dry_P Parameter: Age (day) Value: 27
  misc_feature: MA Experiment 20001557 PARAMETER Experiment Name: At_Drought_Soil_Dry_P Parameter: Organism Value: A. thaliana
  misc_feature: MA Experiment 20001557 PARAMETER Experiment Name: At_Drought_Soil_Dry_P Parameter: Plant Line Value: WS
  misc_feature: MA Experiment 20001557 PARAMETER Experiment Name: At_Drought_Soil_Dry_P Parameter: Post Timepoint (hr) Value: 3
  misc_feature: MA Experiment 20001557 PARAMETER Experiment Name: At_Drought_Soil_Dry_P Parameter: Post-Treatment Value: Re-Water vs. No Drought
  misc_feature: MA Experiment 20001557 PARAMETER Experiment Name: At_Drought_Soil_Dry_P Parameter: Timepoint (day) Value: 13
  misc_feature: MA Experiment 20001557 PARAMETER Experiment Name: At_Drought_Soil_Dry_P Parameter: Treatment Value: Drought vs. No Drought

SEQ ID NO: 31357 - protein, 414 aa, Arabidopsis thaliana; identical to SEQ ID NO: 27767
  peptide (1)..(414): Ceres Seq. ID no. 12325175
  misc_feature (100)..(171): Pfam Name: RNA recognition motif. (a.k.a. RRM, RBD, or RNP domain) Pfam Description: RNA recognition motif. (a.k.a. RRM, RBD, or RNP
  misc_feature (178)..(411): Homolog of NCBI NO: 23274133 NR Description: Similar to serine/arginine repetitive matrix 1
  misc_feature (9)..(256): Homolog of NCBI NO: 3253165 NR Description: SR protein [Homo sapiens]
  misc_feature (191)..(414): Homolog of NCBI NO: 34905768 NR Description: P0401G10.10 [Oryza sativa (japonica
  misc_feature (1)..(78): Homolog of NCBI NO: 30684163 NR Description: proline-rich protein -related [Arabidopsis
  misc_feature (1)..(78): Homolog of NCBI NO: 9843651 NR Description: SRM102 [Arabidopsis thaliana]
  misc_feature (212)..(413): Homolog of NCBI NO: 30684163 NR Description: proline-rich protein -related [Arabidopsis
  misc_feature (212)..(413): Homolog of NCBI NO: 9843651 NR Description: SRM102 [Arabidopsis thaliana]
  misc_feature (119)..(379): Homolog of NCBI NO: 34905768 NR Description: P0401G10.10 [Oryza sativa (japonica
  misc_feature (1)..(414): Homolog of NCBI NO: 15027957 NR Description: putative arginine/serine-rich protein
  misc_feature (1)..(414): Homolog of NCBI NO: 15219287 NR Description: arginine/serine-rich protein, putative

SEQ ID NO: 31358 - protein, 284 aa, Arabidopsis thaliana; identical to SEQ ID NO: 27768
  peptide (1)..(284): Ceres Seq. ID no. 12325176
  misc_feature (85)..(283): Pfam Name: Extensin-like region Pfam Description: Extensin-like region
  misc_feature (1)..(114): Homolog of NCBI NO: 18032270 NR Description: splicing-related factor RNPS1 [Homo sapiens]
  misc_feature (1)..(114): Homolog of NCBI NO: 6857826 NR Description: RNA-binding protein S1, serine-rich domain; SR
  misc_feature (48)..(281): Homolog of NCBI NO: 23274133 NR Description: Similar to serine/arginine repetitive matrix 1
  misc_feature (1)..(126): Homolog of NCBI NO: 3253165 NR Description: SR protein [Homo sapiens]
  misc_feature (61)..(284): Homolog of NCBI NO: 34905768 NR Description: P0401G10.10 [Oryza sativa (japonica
  misc_feature (82)..(283): Homolog of NCBI NO: 30684163 NR Description: proline-rich protein -related [Arabidopsis
  misc_feature (82)..(283): Homolog of NCBI NO: 9843651 NR Description: SRM102 [Arabidopsis thaliana]
  misc_feature (1)..(249): Homolog of NCBI NO: 34905768 NR Description: P0401G10.10 [Oryza sativa (japonica
  misc_feature (1)..(284): Homolog of NCBI NO: 15027957 NR Description: putative arginine/serine-rich protein
  misc_feature (1)..(284): Homolog of NCBI NO: 15219287 NR Description: arginine/serine-rich protein, putative

SEQ ID NO: 31359 - protein, 256 aa, Arabidopsis thaliana; identical to SEQ ID NO: 27769
  peptide (1)..(256): Ceres Seq. ID no. 12325177
  misc_feature (57)..(255): Pfam Name: Extensin-like region Pfam Description: Extensin-like region
  misc_feature (1)..(86): Homolog of NCBI NO: 18032270 NR Description: splicing-related factor RNPS1 [Homo sapiens]
  misc_feature (1)..(86): Homolog of NCBI NO: 6857826 NR Description: RNA-binding protein S1, serine-rich domain; SR
  misc_feature (20)..(253): Homolog of NCBI NO: 23274133 NR Description: Similar to serine/arginine repetitive matrix 1
  misc_feature (1)..(98): Homolog of NCBI NO: 3253165 NR Description: SR protein [Homo sapiens]
  misc_feature (33)..(256): Homolog of NCBI NO: 34905768 NR Description: P0401G10.10 [Oryza sativa (japonica
  misc_feature (54)..(255): Homolog of NCBI NO: 30684163 NR Description: proline-rich protein -related [Arabidopsis
  misc_feature (54)..(255): Homolog of NCBI NO: 9843651 NR Description: SRM102 [Arabidopsis thaliana]
  misc_feature (1)..(221): Homolog of NCBI NO: 34905768 NR Description: P0401G10.10 [Oryza sativa (japonica
  misc_feature (1)..(256): Homolog of NCBI NO: 15027957 NR Description: putative arginine/serine-rich protein
  misc_feature (1)..(256): Homolog of NCBI NO: 15219287 NR Description: arginine/serine-rich protein, putative

SEQ ID NO: 31360 - DNA, 1098 bp, Arabidopsis thaliana; identical to SEQ ID NO: 27770
  misc_feature (1)..(1098): Ceres Seq. ID no. 12331633
  misc_feature: MA Experiment ID: 108435 Result: Up-regulated in Transcription
  misc_feature: MA Experiment 108435 PARAMETER Experiment Name: At_stm_Mutants_cDNA_P Parameter: Plant Line Value: wt Landsburg vs stm
  misc_feature: MA Experiment 108435 PARAMETER Experiment Name: At_stm_Mutants_cDNA_P Parameter: Tissue Value: Shoot Apical Meristem Region
  misc_feature: MA Experiment ID: 108464 Result: Up-regulated in Transcription
  misc_feature: MA Experiment 108464 PARAMETER Experiment Name: At_Germinating_Seeds_cDNA_P Parameter: Age (day) Value: 4 vs. 0
  misc_feature: MA Experiment 108464 PARAMETER Experiment Name: At_Germinating_Seeds_cDNA_P Parameter: Tissue Value: Germinating Seeds
  misc_feature: MA Experiment ID: 108501 Result: Up-regulated in Transcription
  misc_feature: MA Experiment 108501 PARAMETER Experiment Name: At_ap2_floral_buds_cDNA_P Parameter: Plant Line Value: ap2 (Ler.)
  misc_feature: MA Experiment 108501 PARAMETER Experiment Name: At_ap2_floral_buds_cDNA_P Parameter: Tissue Value: Closed Flower
  misc_feature: MA Experiment ID: 108579 Result: Up-regulated in Transcription
  misc_feature: MA Experiment 108579 PARAMETER Experiment Name: At_4deg_Cold_cDNA_P Parameter: Temperature (deg C) Value: 4 vs. 22
  misc_feature: MA Experiment 108579 PARAMETER Experiment Name: At_4deg_Cold_cDNA_P Parameter: Timepoint (hr) Value: 6
  misc_feature: MA Experiment 108579 PARAMETER Experiment Name: At_4deg_Cold_cDNA_P Parameter: Tissue Value: Aerial
  misc_feature: MA Experiment ID: 108595 Result: Up-regulated in Transcription
  misc_feature: MA Experiment 108595 PARAMETER Experiment Name: At_Ler-pi_Ovule_cDNA_P Parameter: Plant Line Value: null
  misc_feature: MA Experiment ID: 20000069 Result: Down-regulated in Transcription
  misc_feature: MA Experiment 20000069 PARAMETER Experiment Name: At_100uM_ABA_Mutants_cDNA_P Parameter: Plant Line Value: CS23
  misc_feature: MA Experiment 20000069 PARAMETER Experiment Name: At_100uM_ABA_Mutants_cDNA_P Parameter: Timepoint (hr) Value: 6
  misc_feature: MA Experiment 20000069 PARAMETER Experiment Name: At_100uM_ABA_Mutants_cDNA_P Parameter: Tissue Value: Aerial
  misc_feature: MA Experiment 20000069 PARAMETER Experiment Name: At_100uM_ABA_Mutants_cDNA_P Parameter: Treatment Value: 100uM ABA vs. No Treatment
  misc_feature: MA Experiment ID: 20000070 Result: Down-regulated in Transcription
  misc_feature: MA Experiment 20000070 PARAMETER Experiment Name: At_100uM_ABA_Mutants_cDNA_P Parameter: Plant Line Value: CS24
  misc_feature: MA Experiment 20000070 PARAMETER Experiment Name: At_100uM_ABA_Mutants_cDNA_P Parameter: Timepoint (hr) Value: 6
  misc_feature: MA Experiment 20000070 PARAMETER Experiment Name: At_100uM_ABA_Mutants_cDNA_P Parameter: Tissue Value: Aerial
  misc_feature: MA Experiment 20000070 PARAMETER Experiment Name: At_100uM_ABA_Mutants_cDNA_P Parameter: Treatment Value: 100uM ABA vs. No Treatment
  misc_feature: MA Experiment ID: 20000071 Result: Down-regulated in Transcription
  misc_feature: MA Experiment 20000071 PARAMETER Experiment Name: At_100uM_ABA_Mutants_cDNA_P Parameter: Plant Line Value: CS8104
  misc_feature: MA Experiment 20000071 PARAMETER Experiment Name: At_100uM_ABA_Mutants_cDNA_P Parameter: Timepoint (hr) Value: 6
  misc_feature: MA Experiment 20000071 PARAMETER Experiment Name: At_100uM_ABA_Mutants_cDNA_P Parameter: Tissue Value: Aerial
  misc_feature: MA Experiment 20000071 PARAMETER Experiment Name: At_100uM_ABA_Mutants_cDNA_P Parameter: Treatment Value: 100uM ABA vs. No Treatment
  misc_feature: MA Experiment ID: 20000086 Result: Down-regulated in Transcription
  misc_feature: MA Experiment 20000086 PARAMETER Experiment Name: At_100uM_ABA_Mutants_cDNA_P Parameter: Plant Line Value: CS22
  misc_feature: MA Experiment 20000086 PARAMETER Experiment Name: At_100uM_ABA_Mutants_cDNA_P Parameter: Timepoint (hr) Value: 6
  misc_feature: MA Experiment 20000086 PARAMETER Experiment Name: At_100uM_ABA_Mutants_cDNA_P Parameter: Tissue Value: Aerial
  misc_feature: MA Experiment 20000086 PARAMETER Experiment Name: At_100uM_ABA_Mutants_cDNA_P Parameter: Treatment Value: 100uM ABA vs. No Treatment
  misc_feature: MA Experiment ID: 20000087 Result: Down-regulated in Transcription
  misc_feature: MA Experiment 20000087 PARAMETER Experiment Name: At_100uM_ABA_Mutants_cDNA_P Parameter: Plant Line Value: WS
  misc_feature: MA Experiment 20000087 PARAMETER Experiment Name: At_100uM_ABA_Mutants_cDNA_P Parameter: Timepoint (hr) Value: 6
  misc_feature: MA Experiment 20000087 PARAMETER Experiment Name: At_100uM_ABA_Mutants_cDNA_P Parameter: Tissue Value: Aerial
  misc_feature: MA Experiment 20000087 PARAMETER Experiment Name: At_100uM_ABA_Mutants_cDNA_P Parameter: Treatment Value: 100uM ABA vs. No Treatment
  misc_feature: MA Experiment ID: 20000088 Result: Down-regulated in Transcription
  misc_feature: MA Experiment 20000088 PARAMETER Experiment Name: At_100uM_ABA_Mutants_cDNA_P Parameter: Plant Line Value: Landsberg
  misc_feature: MA Experiment 20000088 PARAMETER Experiment Name: At_100uM_ABA_Mutants_cDNA_P Parameter: Timepoint (hr) Value: 6
  misc_feature: MA Experiment 20000088 PARAMETER Experiment Name: At_100uM_ABA_Mutants_cDNA_P Parameter: Tissue Value: Aerial
  misc_feature: MA Experiment 20000088 PARAMETER Experiment Name: At_100uM_ABA_Mutants_cDNA_P Parameter: Treatment Value: 100uM ABA vs. No Treatment
  misc_feature: MA Experiment ID: 20000089 Result: Down-regulated in Transcription
  misc_feature: MA Experiment ID: 20000090 Result: Down-regulated in Transcription
  misc_feature: MA Experiment ID: 20000117 Result: Down-regulated in Transcription
  misc_feature: MA Experiment 20000117 PARAMETER Experiment Name: At_100uM_ABA_Mutants_cDNA_P Parameter: Plant Line Value: Columbia
  misc_feature: MA Experiment 20000117 PARAMETER Experiment Name: At_100uM_ABA_Mutants_cDNA_P Parameter: Timepoint (hr) Value: 6
  misc_feature: MA Experiment 20000117 PARAMETER Experiment Name: At_100uM_ABA_Mutants_cDNA_P Parameter: Tissue Value: Aerial
  misc_feature: MA Experiment 20000117 PARAMETER Experiment Name: At_100uM_ABA_Mutants_cDNA_P Parameter: Treatment Value: 100uM ABA vs. No Treatment
  misc_feature: MA Experiment ID: 20000224 Result: Up-regulated in Transcription
  misc_feature: MA Experiment ID: 20000227 Result: Up-regulated in Transcription
  misc_feature: MA Experiment 20000227 PARAMETER Experiment Name: At_Root-Tips-vs-Tops_P Parameter: Tissue Value: Root Tips vs. Root Tops
  misc_feature: MA Experiment ID: 20000234 Result: Up-regulated in Transcription
  misc_feature: MA Experiment 20000234 PARAMETER Experiment Name: At_Siliques_P Parameter: Age (day) Value: 21
  misc_feature: MA Experiment 20000234 PARAMETER Experiment Name: At_Siliques_P Parameter: Organism Value: A. thaliana
  misc_feature: MA Experiment 20000234 PARAMETER Experiment Name: At_Siliques_P Parameter: Plant Line Value: WS
  misc_feature: MA Experiment 20000234 PARAMETER Experiment Name: At_Siliques_P Parameter: Tissue Value: Less Than 5mm Siliques vs. Whole Plant
  misc_feature: MA Experiment ID: 20000264 Result: Up-regulated in Transcription
  misc_feature: MA Experiment 20000264 PARAMETER Experiment Name: At_Open_Flower_P Parameter: Age (day) Value: 21
  misc_feature: MA Experiment 20000264 PARAMETER Experiment Name: At_Open_Flower_P Parameter: Plant Line Value: WS
  misc_feature: MA Experiment 20000264 PARAMETER Experiment Name: At_Open_Flower_P Parameter: Tissue Value: Open Flower vs. Whole Plant
  misc_feature: MA Experiment ID: 20000286 Result: Up-regulated in Transcription
  misc_feature: MA Experiment 20000286 PARAMETER Experiment Name: At_Open_Flower_P Parameter: Age (day) Value: 21
  misc_feature: MA Experiment 20000286 PARAMETER Experiment Name: At_Open_Flower_P Parameter: Plant Line Value: WS
  misc_feature: MA Experiment 20000286 PARAMETER Experiment Name: At_Open_Flower_P Parameter: Tissue Value: Half Open vs. Whole Plant
  misc_feature: MA Experiment ID: 20000437 Result: Down-regulated in Transcription
  misc_feature: MA Experiment 20000437 PARAMETER Experiment Name: At_Drought_P Parameter: Age (day) Value: 8
  misc_feature: MA Experiment 20000437 PARAMETER Experiment Name: At_Drought_P Parameter: Organism Value: A. thaliana
  misc_feature: MA Experiment 20000437 PARAMETER Experiment Name: At_Drought_P Parameter: Plant Line Value: WS
  misc_feature: MA Experiment 20000437 PARAMETER Experiment Name: At_Drought_P Parameter: Timepoint (hr) Value: 24
  misc_feature: MA Experiment 20000437 PARAMETER Experiment Name: At_Drought_P Parameter: Tissue Value: Whole Plant
  misc_feature: MA Experiment 20000437 PARAMETER Experiment Name: At_Drought_P Parameter: Treatment Value: Drought vs. No Drought
  misc_feature: MA Experiment ID: 20000438 Result: Up-regulated in Transcription
  misc_feature: MA Experiment 20000438 PARAMETER Experiment Name: At_Shoots__P Parameter: Age (day) Value: 14
  misc_feature: MA Experiment 20000438 PARAMETER Experiment Name: At_Shoots__P Parameter: Tissue Value: Shoots vs. Whole Plant
  misc_feature: MA Experiment ID: 20000451 Result: Down-regulated in Transcription
  misc_feature: MA Experiment 20000451 PARAMETER Experiment Name: At_CS6879_Shoots-Roots_P Parameter: Age (day) Value: 14
  misc_feature: MA Experiment 20000451 PARAMETER Experiment Name: At_CS6879_Shoots-Roots_P Parameter: Organism Value: A. thaliana
  misc_feature: MA Experiment 20000451 PARAMETER Experiment Name: At_CS6879_Shoots-Roots_P Parameter: Plant Line Value: CS6879 vs. WS
  misc_feature: MA Experiment 20000451 PARAMETER Experiment Name: At_CS6879_Shoots-Roots_P Parameter: Tissue Value: Roots
  misc_feature: MA Experiment ID: 20000495 Result: Up-regulated in Transcription
  misc_feature: MA Experiment 20000495 PARAMETER Experiment Name: At_Guard_Cells_P Parameter: Harvest Date Value: 8/2/2002
  misc_feature: MA Experiment 20000495 PARAMETER Experiment Name: At_Guard_Cells_P Parameter: Organism Value: A. thaliana
  misc_feature: MA Experiment 20000495 PARAMETER Experiment Name: At_Guard_Cells_P Parameter: Tissue Value: Guard Cells vs. Leaves
  misc_feature: MA Experiment ID: 20000576 Result: Up-regulated in Transcription
  misc_feature: MA Experiment 20000576 PARAMETER Experiment Name: At_100uM_ABA_Mutants__P Parameter: Organism Value: A. thaliana
  misc_feature: MA Experiment 20000576 PARAMETER Experiment Name: At_100uM_ABA_Mutants__P Parameter: Plant Line Value: CS23
  misc_feature: MA Experiment 20000576 PARAMETER Experiment Name: At_100uM_ABA_Mutants__P Parameter: Timepoint (hr) Value: 6
  misc_feature: MA Experiment 20000576 PARAMETER Experiment Name: At_100uM_ABA_Mutants__P Parameter: Tissue Value: Whole Plant
  misc_feature: MA Experiment 20000576 PARAMETER Experiment Name: At_100uM_ABA_Mutants__P Parameter: Treatment Value: 1uM ABA vs. No Treatment
  misc_feature: MA Experiment ID: 20000794 Result: Up-regulated in Transcription
  misc_feature: MA Experiment 20000794 PARAMETER Experiment Name: At_Petals_P Parameter: Age (day) Value: 23-25 days
  misc_feature: MA Experiment 20000794 PARAMETER Experiment Name: At_Petals_P Parameter: Plant Line Value: WS
  misc_feature: MA Experiment 20000794 PARAMETER Experiment Name: At_Petals_P Parameter: Tissue Value: Petals vs. Whole plant
  misc_feature: MA Experiment ID: 20001248 Result: Down-regulated in Transcription
  misc_feature: MA Experiment 20001248 PARAMETER Experiment Name: At_Far-red-induction_P Parameter: Age (day) Value: 7
  misc_feature: MA Experiment 20001248 PARAMETER Experiment Name: At_Far-red-induction_P Parameter: Light Value: Far-red vs. White
  misc_feature: MA Experiment 20001248 PARAMETER Experiment Name: At_Far-red-induction_P Parameter: Organism Value: A. thaliana
  misc_feature: MA Experiment 20001248 PARAMETER Experiment Name: At_Far-red-induction_P Parameter: Plant Line Value: Columbia
  misc_feature: MA Experiment 20001248 PARAMETER Experiment Name: At_Far-red-induction_P Parameter: Timepoint (hr) Value: 4
  misc_feature: MA Experiment 20001248 PARAMETER Experiment Name: At_Far-red-induction_P Parameter: Tissue Value: Whole Plant
  misc_feature: MA Experiment ID: 20001458 Result: Down-regulated in Transcription
  misc_feature: MA Experiment 20001458 PARAMETER Experiment Name: At_50mM_NH4NO3_L-to-H_P Parameter: Age (day) Value: Undefined
  misc_feature: MA Experiment 20001458 PARAMETER Experiment Name: At_50mM_NH4NO3_L-to-H_P Parameter: Organism Value: Undefined
  misc_feature: MA Experiment 20001458 PARAMETER Experiment Name: At_50mM_NH4NO3_L-to-H_P Parameter: Plant Line Value: Undefined
  misc_feature: MA Experiment 20001458 PARAMETER Experiment Name: At_50mM_NH4NO3_L-to-H_P Parameter: Timepoint (hr) Value: 2
  misc_feature: MA Experiment 20001458 PARAMETER Experiment Name: At_50mM_NH4NO3_L-to-H_P Parameter: Tissue Value: Siliques
  misc_feature: MA Experiment 20001458 PARAMETER Experiment Name: At_50mM_NH4NO3_L-to-H_P Parameter: Treatment Value: 50mM NH4NO3 vs. 100mM Manitol
  misc_feature: MA Experiment ID: 20001556 Result: Down-regulated in Transcription
  misc_feature: MA Experiment 20001556 PARAMETER Experiment Name: At_Drought_Soil_Dry_P Parameter: Age (day) Value: 26
  misc_feature: MA Experiment 20001556 PARAMETER Experiment Name: At_Drought_Soil_Dry_P Parameter: Organism Value: A. thaliana
  misc_feature: MA Experiment 20001556 PARAMETER Experiment Name: At_Drought_Soil_Dry_P Parameter: Plant Line Value: WS
  misc_feature: MA Experiment 20001556 PARAMETER Experiment Name: At_Drought_Soil_Dry_P Parameter: Post Timepoint (hr) Value: None
  misc_feature: MA Experiment 20001556 PARAMETER Experiment Name: At_Drought_Soil_Dry_P Parameter: Post-Treatment Value: None
  misc_feature: MA Experiment 20001556 PARAMETER Experiment Name: At_Drought_Soil_Dry_P Parameter: Timepoint (day) Value: 12
  misc_feature: MA Experiment 20001556 PARAMETER Experiment Name: At_Drought_Soil_Dry_P Parameter: Treatment Value: Drought vs. No Drought
  misc_feature: MA Experiment ID: 20001557 Result: Down-regulated in Transcription
  misc_feature: MA Experiment 20001557 PARAMETER Experiment Name: At_Drought_Soil_Dry_P Parameter: Age (day) Value: 27
  misc_feature: MA Experiment 20001557 PARAMETER Experiment Name: At_Drought_Soil_Dry_P Parameter: Organism Value: A. thaliana
  misc_feature: MA Experiment 20001557 PARAMETER Experiment Name: At_Drought_Soil_Dry_P Parameter: Plant Line Value: WS
  misc_feature: MA Experiment 20001557 PARAMETER Experiment Name: At_Drought_Soil_Dry_P Parameter: Post Timepoint (hr) Value: 3
  misc_feature: MA Experiment 20001557 PARAMETER Experiment Name: At_Drought_Soil_Dry_P Parameter: Post-Treatment Value: Re-Water vs. No Drought
  misc_feature: MA Experiment 20001557 PARAMETER Experiment Name: At_Drought_Soil_Dry_P Parameter: Timepoint (day) Value: 13
  misc_feature: MA Experiment 20001557 PARAMETER Experiment Name: At_Drought_Soil_Dry_P Parameter: Treatment Value: Drought vs. No Drought
  misc_feature: MA Experiment ID: 20001558 Result: Down-regulated in Transcription
  misc_feature: MA Experiment 20001558 PARAMETER Experiment Name: At_Drought_Soil_Dry_P Parameter: Age (day) Value: 27
  misc_feature: MA Experiment 20001558 PARAMETER Experiment Name: At_Drought_Soil_Dry_P Parameter: Organism Value: A. thaliana
  misc_feature: MA Experiment 20001558 PARAMETER Experiment Name: At_Drought_Soil_Dry_P Parameter: Plant Line Value: WS
  misc_feature: MA Experiment 20001558 PARAMETER Experiment Name: At_Drought_Soil_Dry_P Parameter: Post Timepoint (hr) Value: 6
  misc_feature: MA Experiment 20001558 PARAMETER Experiment Name: At_Drought_Soil_Dry_P Parameter: Post-Treatment Value: Re-Water vs. No Drought
  misc_feature: MA Experiment 20001558 PARAMETER Experiment Name: At_Drought_Soil_Dry_P Parameter: Timepoint (day) Value: 13
  misc_feature: MA Experiment 20001558 PARAMETER Experiment Name: At_Drought_Soil_Dry_P Parameter: Treatment Value: Drought vs. No Drought
  misc_feature: MA Experiment ID: 20001905 Result: Down-regulated in Transcription
  misc_feature: MA Experiment 20001905 PARAMETER Experiment Name: At_Drought_Reproduction_P Parameter: Age (day) Value: 40
  misc_feature: MA Experiment 20001905 PARAMETER Experiment Name: At_Drought_Reproduction_P Parameter: Organism Value: A. thaliana
  misc_feature: MA Experiment 20001905 PARAMETER Experiment Name: At_Drought_Reproduction_P Parameter: Plant Line Value: WS
  misc_feature: MA Experiment 20001905 PARAMETER Experiment Name: At_Drought_Reproduction_P Parameter: Timepoint (day) Value: 10
  misc_feature: MA Experiment 20001905 PARAMETER Experiment Name: At_Drought_Reproduction_P Parameter: Tissue Value: Rosettes
  misc_feature: MA Experiment 20001905 PARAMETER Experiment Name: At_Drought_Reproduction_P Parameter: Treatment Value: Drought vs. No Drought
  misc_feature: MA Experiment ID: 20001906 Result: Down-regulated in Transcription
  misc_feature: MA Experiment 20001906 PARAMETER Experiment Name: At_Drought_Reproduction_P Parameter: Age (day) Value: 35
  misc_feature: MA Experiment 20001906 PARAMETER Experiment Name: At_Drought_Reproduction_P Parameter: Organism Value: A. thaliana
  misc_feature: MA Experiment 20001906 PARAMETER Experiment Name: At_Drought_Reproduction_P Parameter: Plant Line Value: WS
  misc_feature: MA Experiment 20001906 PARAMETER Experiment Name: At_Drought_Reproduction_P Parameter: Timepoint (day) Value: 5
  misc_feature: MA Experiment 20001906 PARAMETER Experiment Name: At_Drought_Reproduction_P Parameter: Tissue Value: Siliques
  misc_feature: MA Experiment 20001906 PARAMETER Experiment Name: At_Drought_Reproduction_P Parameter: Treatment Value: Drought vs. No Drought
  misc_feature: MA Experiment ID: 20001907 Result: Down-regulated in Transcription
  misc_feature: MA Experiment 20001907 PARAMETER Experiment Name: At_Drought_Reproduction_P Parameter: Age (day) Value: 37
  misc_feature: MA Experiment 20001907 PARAMETER Experiment Name: At_Drought_Reproduction_P Parameter: Organism Value: A. thaliana
  misc_feature: MA Experiment 20001907 PARAMETER Experiment Name: At_Drought_Reproduction_P Parameter: Plant Line Value: WS
  misc_feature: MA Experiment 20001907 PARAMETER Experiment Name: At_Drought_Reproduction_P Parameter: Timepoint (day) Value: 7
  misc_feature: MA Experiment 20001907 PARAMETER Experiment Name: At_Drought_Reproduction_P Parameter: Tissue Value: Siliques
  misc_feature: MA Experiment 20001907 PARAMETER Experiment Name: At_Drought_Reproduction_P Parameter: Treatment Value: Drought vs. No Drought

SEQ ID NO: 31361 - protein, 305 aa, Arabidopsis thaliana; identical to SEQ ID NO: 27771
  peptide (1)..(305): Ceres Seq. ID no. 12331634
  misc_feature (75)..(285): Pfam Name: Major intrinsic protein Pfam Description: Major intrinsic protein
  misc_feature (77)..(293): Homolog of NCBI NO: 5139541 NR Description: nodulin26-like major intrinsic protein [Pisum
  misc_feature (59)..(289): Homolog of NCBI NO: 15777893 NR Description: early embryogenesis aquaglyceroporin [Pinus taeda]
  misc_feature (75)..(289): Homolog of NCBI NO: 17025880 NR Description: multifunctional aquaporin [Medicago truncatula]
  misc_feature (66)..(290): Homolog of NCBI NO: 37573042 NR Description: putative nodulin [Oryza sativa (japonica
  misc_feature (73)..(290): Homolog of NCBI NO: 28971941 NR Description: putative nodulin [Oryza sativa (japonica
  misc_feature (62)..(295): Homolog of NCBI NO: 9971217 NR Description: MIP [Adiantum capillus-veneris]
  misc_feature (74)..(305): Homolog of NCBI NO: 37536006 NR Description: putative nodulin-26 [Oryza sativa (japonica
  misc_feature (1)..(305): Homolog of NCBI NO: 13447791 NR Description: NOD26-like membrane integral protein ZmNIP3-1
  misc_feature (10)..(305): Homolog of NCBI NO: 15235034 NR Description: major intrinsic protein (MIP) - like
  misc_feature (1)..(305): Homolog of NCBI NO: 15220826 NR Description: nodulin-like protein; protein id: At1g80760.1

SEQ ID NO: 31362 - protein, 182 aa, Arabidopsis thaliana; identical to SEQ ID NO: 27772
  peptide (1)..(182): Ceres Seq. ID no. 12331635
  misc_feature (1)..(162): Pfam Name: Major intrinsic protein Pfam Description: Major intrinsic protein
  misc_feature (1)..(170): Homolog of NCBI NO: 5139541 NR Description: nodulin26-like major intrinsic protein [Pisum
  misc_feature (1)..(166): Homolog of NCBI NO: 15777893 NR Description: early embryogenesis aquaglyceroporin [Pinus taeda]
  misc_feature (1)..(166): Homolog of NCBI NO: 17025880 NR Description: multifunctional aquaporin [Medicago truncatula]
  misc_feature (1)..(167): Homolog of NCBI NO: 37573042 NR Description: putative nodulin [Oryza sativa (japonica
  misc_feature (1)..(167): Homolog of NCBI NO: 28971941 NR Description: putative nodulin [Oryza sativa (japonica
  misc_feature (1)..(172): Homolog of NCBI NO: 9971217 NR Description: MIP [Adiantum capillus-veneris]
  misc_feature (1)..(182): Homolog of NCBI NO: 37536006 NR Description: putative nodulin-26 [Oryza sativa (japonica
  misc_feature (1)..(182): Homolog of NCBI NO: 13447791 NR Description: NOD26-like membrane integral protein ZmNIP3-1
  misc_feature (1)..(182): Homolog of NCBI NO: 15235034 NR Description: major intrinsic protein (MIP) - like
  misc_feature (1)..(182): Homolog of NCBI NO: 15220826 NR Description: nodulin-like protein; protein id: At1g80760.1

SEQ ID NO: 31363 - DNA, 2351 bp, Arabidopsis thaliana; identical to SEQ ID NO: 27773
  misc_feature (1)..(2351): Ceres Seq. ID no. 13491443
  misc_feature: MA Experiment ID: 108434 Result: Up-regulated in Transcription
  misc_feature: MA Experiment 108434 PARAMETER Experiment Name: At_Root_Tips_cDNA_P Parameter: Tissue Value: Root Tips
  misc_feature: MA Experiment ID: 108462 Result: Down-regulated in Transcription
  misc_feature: MA Experiment 108462 PARAMETER Experiment Name: At_Germinating_Seeds_cDNA_P Parameter: Age (day) Value: 2 vs. 0
  misc_feature: MA Experiment 108462 PARAMETER Experiment Name: At_Germinating_Seeds_cDNA_P Parameter: Tissue Value: Germinating Seeds
  misc_feature: MA Experiment ID: 108463 Result: Down-regulated in Transcription
  misc_feature: MA Experiment 108463 PARAMETER Experiment Name: At_Germinating_Seeds_cDNA_P Parameter: Age (day) Value: 3 vs. 0
  misc_feature: MA Experiment 108463 PARAMETER Experiment Name: At_Germinating_Seeds_cDNA_P Parameter: Tissue Value: Germinating Seeds
  misc_feature: MA Experiment ID: 108464 Result: Down-regulated in Transcription
  misc_feature: MA Experiment 108464 PARAMETER Experiment Name: At_Germinating_Seeds_cDNA_P Parameter: Age (day) Value: 4 vs. 0
  misc_feature: MA Experiment 108464 PARAMETER Experiment Name: At_Germinating_Seeds_cDNA_P Parameter: Tissue Value: Germinating Seeds
  misc_feature: MA Experiment ID: 20000086 Result: Up-regulated in Transcription
  misc_feature: MA Experiment 20000086 PARAMETER Experiment Name: At_100uM_ABA_Mutants_cDNA_P Parameter: Plant Line Value: CS22
  misc_feature: MA Experiment 20000086 PARAMETER Experiment Name: At_100uM_ABA_Mutants_cDNA_P Parameter: Timepoint (hr) Value: 6
  misc_feature: MA Experiment 20000086 PARAMETER Experiment Name: At_100uM_ABA_Mutants_cDNA_P Parameter: Tissue Value: Aerial
  misc_feature: MA Experiment 20000086 PARAMETER Experiment Name: At_100uM_ABA_Mutants_cDNA_P Parameter: Treatment Value: 100uM ABA vs. No Treatment
  misc_feature: MA Experiment ID: 20000088 Result: Up-regulated in Transcription
  misc_feature: MA Experiment 20000088 PARAMETER Experiment Name: At_100uM_ABA_Mutants_cDNA_P Parameter: Plant Line Value: Landsberg
  misc_feature: MA Experiment 20000088 PARAMETER Experiment Name: At_100uM_ABA_Mutants_cDNA_P Parameter: Timepoint (hr) Value: 6
  misc_feature: MA Experiment 20000088 PARAMETER Experiment Name: At_100uM_ABA_Mutants_cDNA_P Parameter: Tissue Value: Aerial
  misc_feature: MA Experiment 20000088 PARAMETER Experiment Name: At_100uM_ABA_Mutants_cDNA_P Parameter: Treatment Value: 100uM ABA vs. No Treatment
  misc_feature: MA Experiment ID: 20000179 Result: Down-regulated in Transcription
  misc_feature: MA Experiment 20000179 PARAMETER Experiment Name: At_Germinating_Seeds_P Parameter: Age (hr) Value: 6 vs. 0
  misc_feature: MA Experiment 20000179 PARAMETER Experiment Name: At_Germinating_Seeds_P Parameter: Tissue Value: Germinating Seeds
  misc_feature: MA Experiment ID: 20000180 Result: Down-regulated in Transcription
  misc_feature: MA Experiment 20000180 PARAMETER Experiment Name: At_Germinating_Seeds_P Parameter: Age (hr) Value: 24 vs. 0
  misc_feature: MA Experiment 20000180 PARAMETER Experiment Name: At_Germinating_Seeds_P Parameter: Tissue Value: Germinating Seeds
  misc_feature: MA Experiment ID: 20001248 Result: Up-regulated in Transcription
  misc_feature: MA Experiment 20001248 PARAMETER Experiment Name: At_Far-red-induction_P Parameter: Age (day) Value: 7
  misc_feature: MA Experiment 20001248 PARAMETER Experiment Name: At_Far-red-induction_P Parameter: Light Value: Far-red vs. White
  misc_feature: MA Experiment 20001248 PARAMETER Experiment Name: At_Far-red-induction_P Parameter: Organism Value: A. thaliana
  misc_feature: MA Experiment 20001248 PARAMETER Experiment Name: At_Far-red-induction_P Parameter: Plant Line Value: Columbia
  misc_feature: MA Experiment 20001248 PARAMETER Experiment Name: At_Far-red-induction_P Parameter: Timepoint (hr) Value: 4
  misc_feature: MA Experiment 20001248 PARAMETER Experiment Name: At_Far-red-induction_P Parameter: Tissue Value: Whole Plant
  misc_feature: MA Experiment ID: 20001458 Result: Up-regulated in Transcription
  misc_feature: MA Experiment 20001458 PARAMETER Experiment Name: At_50mM_NH4NO3_L-to-H_P Parameter: Age (day) Value: Undefined
  misc_feature: MA Experiment 20001458 PARAMETER Experiment Name: At_50mM_NH4NO3_L-to-H_P Parameter: Organism Value: Undefined
  misc_feature: MA Experiment 20001458 PARAMETER Experiment Name: At_50mM_NH4NO3_L-to-H_P Parameter: Plant Line Value: Undefined
  misc_feature: MA Experiment 20001458 PARAMETER Experiment Name: At_50mM_NH4NO3_L-to-H_P Parameter: Timepoint (hr) Value: 2
  misc_feature: MA Experiment 20001458 PARAMETER Experiment Name: At_50mM_NH4NO3_L-to-H_P Parameter: Tissue Value: Siliques
  misc_feature: MA Experiment 20001458 PARAMETER Experiment Name: At_50mM_NH4NO3_L-to-H_P Parameter: Treatment Value: 50mM NH4NO3 vs. 100mM Manitol
  misc_feature: MA Experiment ID: 20001555 Result: Up-regulated in Transcription
  misc_feature: MA Experiment 20001555 PARAMETER Experiment Name: At_Drought_Soil_Dry_P Parameter: Age (day) Value: 24
  misc_feature: MA Experiment 20001555 PARAMETER Experiment Name: At_Drought_Soil_Dry_P Parameter: Organism Value: A. thaliana
  misc_feature: MA Experiment 20001555 PARAMETER Experiment Name: At_Drought_Soil_Dry_P Parameter: Plant Line Value: WS
  misc_feature: MA Experiment 20001555 PARAMETER Experiment Name: At_Drought_Soil_Dry_P Parameter: Post Timepoint (hr) Value: None
  misc_feature: MA Experiment 20001555 PARAMETER Experiment Name: At_Drought_Soil_Dry_P Parameter: Post-Treatment Value: None
  misc_feature: MA Experiment 20001555 PARAMETER Experiment Name: At_Drought_Soil_Dry_P Parameter: Timepoint (day) Value: 10
  misc_feature: MA Experiment 20001555 PARAMETER Experiment Name: At_Drought_Soil_Dry_P Parameter: Treatment Value: Drought vs. No Drought
  misc_feature: MA Experiment ID: 20001556 Result: Up-regulated in Transcription
  misc_feature: MA Experiment 20001556 PARAMETER Experiment Name: At_Drought_Soil_Dry_P Parameter: Age (day) Value: 26
  misc_feature: MA Experiment 20001556 PARAMETER Experiment Name: At_Drought_Soil_Dry_P Parameter: Organism Value: A. thaliana
  misc_feature: MA Experiment 20001556 PARAMETER Experiment Name: At_Drought_Soil_Dry_P Parameter: Plant Line Value: WS
  misc_feature: MA Experiment 20001556 PARAMETER Experiment Name: At_Drought_Soil_Dry_P Parameter: Post Timepoint (hr) Value: None
  misc_feature: MA Experiment 20001556 PARAMETER Experiment Name: At_Drought_Soil_Dry_P Parameter: Post-Treatment Value: None
  misc_feature: MA Experiment 20001556 PARAMETER Experiment Name: At_Drought_Soil_Dry_P Parameter: Timepoint (day) Value: 12
  misc_feature: MA Experiment 20001556 PARAMETER Experiment Name: At_Drought_Soil_Dry_P Parameter: Treatment Value: Drought vs. No Drought
  misc_feature: MA Experiment ID: 20001557 Result: Up-regulated in Transcription
  misc_feature: MA Experiment 20001557 PARAMETER Experiment Name: At_Drought_Soil_Dry_P Parameter: Age (day) Value: 27
  misc_feature: MA Experiment 20001557 PARAMETER Experiment Name: At_Drought_Soil_Dry_P Parameter: Organism Value: A. thaliana
  misc_feature: MA Experiment 20001557 PARAMETER Experiment Name: At_Drought_Soil_Dry_P Parameter: Plant Line Value: WS
  misc_feature: MA Experiment 20001557 PARAMETER Experiment Name: At_Drought_Soil_Dry_P Parameter: Post Timepoint (hr) Value: 3
  misc_feature: MA Experiment 20001557 PARAMETER Experiment Name: At_Drought_Soil_Dry_P Parameter: Post-Treatment Value: Re-Water vs. No Drought
  misc_feature: MA Experiment 20001557 PARAMETER Experiment Name: At_Drought_Soil_Dry_P Parameter: Timepoint (day) Value: 13
  misc_feature: MA Experiment 20001557 PARAMETER Experiment Name: At_Drought_Soil_Dry_P Parameter: Treatment Value: Drought vs. No Drought
  misc_feature: MA Experiment ID: 20001558 Result: Up-regulated in Transcription
  misc_feature: MA Experiment 20001558 PARAMETER Experiment Name: At_Drought_Soil_Dry_P Parameter: Age (day) Value: 27
  misc_feature: MA Experiment 20001558 PARAMETER Experiment Name: At_Drought_Soil_Dry_P Parameter: Organism Value: A. thaliana
  misc_feature: MA Experiment 20001558 PARAMETER Experiment Name: At_Drought_Soil_Dry_P Parameter: Plant Line Value: WS
  misc_feature: MA Experiment 20001558 PARAMETER Experiment Name: At_Drought_Soil_Dry_P Parameter: Post Timepoint (hr) Value: 6
  misc_feature: MA Experiment 20001558 PARAMETER Experiment Name: At_Drought_Soil_Dry_P Parameter: Post-Treatment Value: Re-Water vs. No Drought
  misc_feature: MA Experiment 20001558 PARAMETER Experiment Name: At_Drought_Soil_Dry_P Parameter: Timepoint (day) Value: 13
  misc_feature: MA Experiment 20001558 PARAMETER Experiment Name: At_Drought_Soil_Dry_P Parameter: Treatment Value: Drought vs. No Drought
  misc_feature: MA Experiment ID: 20001559 Result: Up-regulated in Transcription
  misc_feature: MA Experiment 20001559 PARAMETER Experiment Name: At_Drought_Soil_Dry_P Parameter: Age (day) Value: 28
  misc_feature: MA Experiment 20001559 PARAMETER Experiment Name: At_Drought_Soil_Dry_P Parameter: Organism Value: A. thaliana
  misc_feature: MA Experiment 20001559 PARAMETER Experiment Name: At_Drought_Soil_Dry_P Parameter: Plant Line Value: WS
  misc_feature: MA Experiment 20001559 PARAMETER Experiment Name: At_Drought_Soil_Dry_P Parameter: Post Timepoint (hr) Value: 29
  misc_feature: MA Experiment 20001559 PARAMETER Experiment Name: At_Drought_Soil_Dry_P Parameter: Post-Treatment Value: Re-Water vs. No Drought
  misc_feature: MA Experiment 20001559 PARAMETER Experiment Name: At_Drought_Soil_Dry_P Parameter: Timepoint (day) Value: 14
  misc_feature: MA Experiment 20001559 PARAMETER Experiment Name: At_Drought_Soil_Dry_P Parameter: Treatment Value: Drought vs. No Drought

SEQ ID NO: 31364 - protein, 671 aa, Arabidopsis thaliana; identical to SEQ ID NO: 27774
  peptide (1)..(671): Ceres Seq. ID no. 13491444
  misc_feature (109)..(327): Pfam Name: DEAD/DEAH box helicase Pfam Description: DEAD/DEAH box helicase
  misc_feature (23)..(669): Homolog of NCBI NO: 10764780 NR Description: RNA helicase II/Gu [Xenopus laevis]
  misc_feature (1)..(668): Homolog of NCBI NO: 34852522 NR Description: similar to Nucleolar RNA helicase II (Nucleolar
  misc_feature (1)..(670): Homolog of NCBI NO: 2135315 NR Description: RNA helicase Gu - human (fragment)
  misc_feature (1)..(670): Homolog of NCBI NO: 34879863 NR Description: similar to Nucleolar RNA helicase II (Nucleolar
  misc_feature (12)..(670): Homolog of NCBI NO: 26368308 NR Description: unnamed protein product [Mus musculus]
  misc_feature (12)..(670): Homolog of NCBI NO: 21410145 NR Description: Ddx21 protein [Mus musculus]
  misc_feature (12)..(670): Homolog of NCBI NO: 10092595 NR Description: DEAD/H (Asp-Glu-Ala-Asp/His) box polypeptide 21
  misc_feature (12)..(670): Homolog of NCBI NO: 13959325 NR Description: Nucleolar RNA helicase II (Nucleolar RNA helicase
  misc_feature (1)..(671): Homolog of NCBI NO: 7484683 NR Description: RNA helicase prh75 - spinach
  misc_feature (6)..(667): Homolog of NCBI NO: 7211427 NR Description: RNA helicase [Vigna radiata]

SEQ ID NO: 31365 - protein, 667 aa, Arabidopsis thaliana; identical to SEQ ID NO: 27775
  peptide (1)..(667): Ceres Seq. ID no. 13491445
  misc_feature (105)..(323): Pfam Name: DEAD/DEAH box helicase Pfam Description: DEAD/DEAH box helicase
  misc_feature (19)..(665): Homolog of NCBI NO: 10764780 NR Description: RNA helicase II/Gu [Xenopus laevis]
  misc_feature (1)..(664): Homolog of NCBI NO: 34852522 NR Description: similar to Nucleolar RNA helicase II (Nucleolar
  misc_feature (1)..(666): Homolog of NCBI NO: 2135315 NR Description: RNA helicase Gu - human (fragment)
  misc_feature (1)..(666): Homolog of NCBI NO: 34879863 NR Description: similar to Nucleolar RNA helicase II (Nucleolar
  misc_feature (8)..(666): Homolog of NCBI NO: 21410145 NR Description: Ddx21 protein [Mus musculus]
  misc_feature (8)..(666): Homolog of NCBI NO: 26368308 NR Description: unnamed protein product [Mus musculus]
  misc_feature (8)..(666): Homolog of NCBI NO: 10092595 NR Description: DEAD/H (Asp-Glu-Ala-Asp/His) box polypeptide 21
  misc_feature (8)..(666): Homolog of NCBI NO: 13959325 NR Description: Nucleolar RNA helicase II (Nucleolar RNA helicase
  misc_feature (1)..(667): Homolog of NCBI NO: 7484683 NR Description: RNA helicase prh75 - spinach
  misc_feature (2)..(663): Homolog of NCBI NO: 7211427 NR Description: RNA helicase [Vigna radiata]

SEQ ID NO: 31366 - protein, 657 aa, Arabidopsis thaliana; identical to SEQ ID NO: 27776
  peptide (1)..(657): Ceres Seq. ID no. 13491446
  misc_feature (95)..(313): Pfam Name: DEAD/DEAH box helicase Pfam Description: DEAD/DEAH box helicase
  misc_feature (9)..(655): Homolog of NCBI NO: 10764780 NR Description: RNA helicase II/Gu [Xenopus laevis]
  misc_feature (1)..(654): Homolog of NCBI NO: 34852522 NR Description: similar to Nucleolar RNA helicase II (Nucleolar
  misc_feature (1)..(656): Homolog of NCBI NO: 2135315 NR Description: RNA helicase Gu - human (fragment)
  misc_feature (1)..(656): Homolog of NCBI NO: 34879863 NR Description: similar to Nucleolar RNA helicase II (Nucleolar
  misc_feature (1)..(656): Homolog of NCBI NO: 26368308 NR Description: unnamed protein product [Mus musculus]
  misc_feature (1)..(656): Homolog of NCBI NO: 21410145 NR Description: Ddx21 protein [Mus musculus]
  misc_feature (1)..(656): Homolog of NCBI NO: 10092595 NR Description: DEAD/H (Asp-Glu-Ala-Asp/His) box polypeptide 21
  misc_feature (1)..(656): Homolog of NCBI NO: 13959325 NR Description: Nucleolar RNA helicase II (Nucleolar RNA helicase
  misc_feature (1)..(657): Homolog of NCBI NO: 7484683 NR Description: RNA helicase prh75 - spinach
  misc_feature (1)..(653): Homolog of NCBI NO: 7211427 NR Description: RNA helicase [Vigna radiata]

SEQ ID NO: 31367 - DNA, 705 bp, Arabidopsis thaliana; identical to SEQ ID NO: 27777
  misc_feature (1)..(705): Ceres Seq. ID no. 12580042
  misc_feature: MA Experiment ID: 108434 Result: Up-regulated in Transcription
  misc_feature: MA Experiment 108434 PARAMETER Experiment Name: At_Root_Tips_cDNA_P Parameter: Tissue Value: Root Tips
  misc_feature: MA Experiment ID: 108462 Result: Down-regulated in Transcription
  misc_feature: MA Experiment 108462 PARAMETER Experiment Name: At_Germinating_Seeds_cDNA_P Parameter: Age (day) Value: 2 vs. 0
  misc_feature: MA Experiment 108462 PARAMETER Experiment Name: At_Germinating_Seeds_cDNA_P Parameter: Tissue Value: Germinating Seeds
  misc_feature: MA Experiment ID: 108463 Result: Down-regulated in Transcription
  misc_feature: MA Experiment 108463 PARAMETER Experiment Name: At_Germinating_Seeds_cDNA_P Parameter: Age (day) Value: 3 vs. 0
  misc_feature: MA Experiment 108463 PARAMETER Experiment Name: At_Germinating_Seeds_cDNA_P Parameter: Tissue Value: Germinating Seeds
  misc_feature: MA Experiment ID: 108488 Result: Down-regulated in Transcription
  misc_feature: MA Experiment ID: 108572 Result: Down-regulated in Transcription
  misc_feature: MA Experiment 108572 PARAMETER Experiment Name: At_Drought_cDNA_P Parameter: Timepoint (hr) Value: 1
  misc_feature: MA Experiment 108572 PARAMETER Experiment Name: At_Drought_cDNA_P Parameter: Tissue Value: Aerial
  misc_feature: MA Experiment 108572 PARAMETER Experiment Name: At_Drought_cDNA_P Parameter: Treatment Value: Drought vs. No Drought
  misc_feature: MA Experiment ID: 108574 Result: Down-regulated in Transcription
  misc_feature: MA Experiment 108574 PARAMETER Experiment Name: At_Wounding__cDNA_P Parameter: Timepoint (hr) Value: 1
  misc_feature: MA Experiment 108574 PARAMETER Experiment Name: At_Wounding__cDNA_P Parameter: Tissue Value: Aerial
  misc_feature: MA Experiment 108574 PARAMETER Experiment Name: At_Wounding__cDNA_P Parameter: Treatment Value: Wounding vs. No Wounding
  misc_feature: MA Experiment ID: 108577 Result: Down-regulated in Transcription
  misc_feature: MA Experiment 108577 PARAMETER Experiment Name: At_42deg_Heat_cDNA_P Parameter: Temperature (deg C) Value: 42 vs. 22
  misc_feature: MA Experiment 108577 PARAMETER Experiment Name: At_42deg_Heat_cDNA_P Parameter: Timepoint (hr) Value: 6
  misc_feature: MA Experiment 108577 PARAMETER Experiment Name: At_42deg_Heat_cDNA_P Parameter: Tissue Value: Aerial
  misc_feature: MA Experiment ID: 108607 Result: Down-regulated in Transcription
  misc_feature: MA Experiment 108607 PARAMETER Experiment Name: At_100uM_ABA_cDNA_P Parameter: Timepoint (hr) Value: 4
  misc_feature: MA Experiment 108607 PARAMETER Experiment Name: At_100uM_ABA_cDNA_P Parameter: Tissue Value: Aerial
  misc_feature: MA Experiment 108607 PARAMETER Experiment Name: At_100uM_ABA_cDNA_P Parameter: Treatment Value: 100uM ABA vs. No Treatment
  misc_feature: MA Experiment ID: 20000069 Result: Up-regulated in Transcription
  misc_feature: MA Experiment 20000069 PARAMETER Experiment Name: At_100uM_ABA_Mutants_cDNA_P Parameter: Plant Line Value: CS23
  misc_feature: MA Experiment 20000069 PARAMETER Experiment Name: At_100uM_ABA_Mutants_cDNA_P Parameter: Timepoint (hr) Value: 6
  misc_feature: MA Experiment 20000069 PARAMETER Experiment Name: At_100uM_ABA_Mutants_cDNA_P Parameter: Tissue Value: Aerial
  misc_feature: MA Experiment 20000069 PARAMETER Experiment Name: At_100uM_ABA_Mutants_cDNA_P Parameter: Treatment Value: 100uM ABA vs. No Treatment
  misc_feature: MA Experiment ID: 20000070 Result: Up-regulated in Transcription
  misc_feature: MA Experiment 20000070 PARAMETER Experiment Name: At_100uM_ABA_Mutants_cDNA_P Parameter: Plant Line Value: CS24
  misc_feature: MA Experiment 20000070 PARAMETER Experiment Name: At_100uM_ABA_Mutants_cDNA_P Parameter: Timepoint (hr) Value: 6
  misc_feature: MA Experiment 20000070 PARAMETER Experiment Name: At_100uM_ABA_Mutants_cDNA_P Parameter: Tissue Value: Aerial
  misc_feature: MA Experiment 20000070 PARAMETER Experiment Name: At_100uM_ABA_Mutants_cDNA_P Parameter: Treatment Value: 100uM ABA vs. No Treatment
  misc_feature: MA Experiment ID: 20000072 Result: Up-regulated in Transcription
  misc_feature: MA Experiment 20000072 PARAMETER Experiment Name: At_100uM_ABA_Mutants_cDNA_P Parameter: Plant Line Value: CS8105
  misc_feature: MA Experiment 20000072 PARAMETER Experiment Name: At_100uM_ABA_Mutants_cDNA_P Parameter: Timepoint (hr) Value: 6
  misc_feature: MA Experiment 20000072 PARAMETER Experiment Name: At_100uM_ABA_Mutants_cDNA_P Parameter: Tissue Value: Aerial
  misc_feature: MA Experiment 20000072 PARAMETER Experiment Name: At_100uM_ABA_Mutants_cDNA_P Parameter: Treatment Value: 100uM ABA vs. No Treatment
  misc_feature: MA Experiment ID: 20000086 Result: Up-regulated in Transcription
  misc_feature: MA Experiment 20000086 PARAMETER Experiment Name: At_100uM_ABA_Mutants_cDNA_P Parameter: Plant Line Value: CS22
  misc_feature: MA Experiment 20000086 PARAMETER Experiment Name: At_100uM_ABA_Mutants_cDNA_P Parameter: Timepoint (hr) Value: 6
  misc_feature: MA Experiment 20000086 PARAMETER Experiment Name: At_100uM_ABA_Mutants_cDNA_P Parameter: Tissue Value: Aerial
  misc_feature: MA Experiment 20000086 PARAMETER Experiment Name: At_100uM_ABA_Mutants_cDNA_P Parameter: Treatment Value: 100uM ABA vs. No Treatment
  misc_feature: MA Experiment ID: 20000087 Result: Up-regulated in Transcription
  misc_feature: MA Experiment 20000087 PARAMETER Experiment Name: At_100uM_ABA_Mutants_cDNA_P Parameter: Plant Line Value: WS
  misc_feature: MA Experiment 20000087 PARAMETER Experiment Name: At_100uM_ABA_Mutants_cDNA_P Parameter: Timepoint (hr) Value: 6
  misc_feature: MA Experiment 20000087 PARAMETER Experiment Name: At_100uM_ABA_Mutants_cDNA_P Parameter: Tissue Value: Aerial
  misc_feature: MA Experiment 20000087 PARAMETER Experiment Name: At_100uM_ABA_Mutants_cDNA_P Parameter: Treatment Value: 100uM ABA vs. No Treatment
  misc_feature: MA Experiment ID: 20000088 Result: Up-regulated in Transcription
  misc_feature: MA Experiment 20000088 PARAMETER Experiment Name: At_100uM_ABA_Mutants_cDNA_P Parameter: Plant Line Value: Landsberg
  misc_feature: MA Experiment 20000088 PARAMETER Experiment Name: At_100uM_ABA_Mutants_cDNA_P Parameter: Timepoint (hr) Value: 6
  misc_feature: MA Experiment 20000088 PARAMETER Experiment Name: At_100uM_ABA_Mutants_cDNA_P Parameter: Tissue Value: Aerial
  misc_feature: MA Experiment 20000088 PARAMETER Experiment Name: At_100uM_ABA_Mutants_cDNA_P Parameter: Treatment Value: 100uM ABA vs. No Treatment
  misc_feature: MA Experiment ID: 20000089 Result: Up-regulated in Transcription
  misc_feature: MA Experiment ID: 20000090 Result: Up-regulated in Transcription
  misc_feature: MA Experiment ID: 20000117 Result: Up-regulated in Transcription
  misc_feature: MA Experiment 20000117 PARAMETER Experiment Name: At_100uM_ABA_Mutants_cDNA_P Parameter: Plant Line Value: Columbia
  misc_feature: MA Experiment 20000117 PARAMETER Experiment Name: At_100uM_ABA_Mutants_cDNA_P Parameter: Timepoint (hr) Value: 6
  misc_feature: MA Experiment 20000117 PARAMETER Experiment Name: At_100uM_ABA_Mutants_cDNA_P Parameter: Tissue Value: Aerial
  misc_feature: MA Experiment 20000117 PARAMETER Experiment Name: At_100uM_ABA_Mutants_cDNA_P Parameter: Treatment Value: 100uM ABA vs. No Treatment
  misc_feature: MA Experiment ID: 20000224 Result: Down-regulated in Transcription

SEQ ID NO: 31368 - protein, 175 aa, Arabidopsis thaliana; identical to SEQ ID NO: 27778
  peptide (1)..(175): Ceres Seq. ID no. 12580043
  misc_feature (10)..(81): Pfam Name: RNA recognition motif. (a.k.a. RRM, RBD, or RNP domain) Pfam Description: RNA recognition motif. (a.k.a. RRM, RBD, or RNP
  misc_feature (1)..(175): Homolog of NCBI NO: 10799202 NR Description: glycine-rich RNA-binding protein [Sorghum bicolor]
  misc_feature (1)..(175): Homolog of NCBI NO: 544423 NR Description: Glycine-rich RNA-binding protein 2
  misc_feature (5)..(175): Homolog of NCBI NO: 544416 NR Description: Glycine-rich RNA-binding protein 10
  misc_feature (1)..(175): Homolog of NCBI NO: 34851124 NR Description: putative glycine-rich RNA-binding protein [Prunus
  misc_feature (5)..(175): Homolog of NCBI NO: 15235002 NR Description: glycine-rich RNA-binding protein 8 (GRP8)
  misc_feature (1)..(175): Homolog of NCBI NO: 30681492 NR Description: glycine-rich RNA-binding protein (AtGRP7)
  misc_feature (1)..(175): Homolog of NCBI NO: 1346180 NR Description: Glycine-rich RNA-binding protein GRP1A
  misc_feature (1)..(175): Homolog of NCBI NO: 1346181 NR Description: Glycine-rich RNA-binding protein GRP2A
  misc_feature (1)..(175): Homolog of NCBI NO: 15226605 NR Description: glycine-rich RNA binding protein AtGRP7
  misc_feature (1)..(175): Homolog of NCBI NO: 21553354 NR Description: glycine-rich RNA binding protein 7 [Arabidopsis

SEQ ID NO: 31369 - protein, 114 aa, Arabidopsis thaliana; identical to SEQ ID NO: 27779
  peptide (1)..(114): Ceres Seq. ID no. 12580044
  misc_feature (27)..(112): Pfam Name: Herpesvirus large structural phosphoprotein UL32 Pfam Description: Herpesvirus large structural phosphoprotein UL32
  misc_feature (1)..(114): Homolog of NCBI NO: 10799202 NR Description: glycine-rich RNA-binding protein [Sorghum bicolor]
  misc_feature (1)..(114): Homolog of NCBI NO: 544423 NR Description: Glycine-rich RNA-binding protein 2
  misc_feature (1)..(114): Homolog of NCBI NO: 544416 NR Description: Glycine-rich RNA-binding protein 10
  misc_feature (1)..(114): Homolog of NCBI NO: 34851124 NR Description: putative glycine-rich RNA-binding protein [Prunus
  misc_feature (1)..(114): Homolog of NCBI NO: 15235002 NR Description: glycine-rich RNA-binding protein 8 (GRP8)
  misc_feature (1)..(114): Homolog of NCBI NO: 30681492 NR Description: glycine-rich RNA-binding protein (AtGRP7)
  misc_feature (1)..(114): Homolog of NCBI NO: 1346180 NR Description: Glycine-rich RNA-binding protein GRP1A
  misc_feature (1)..(114): Homolog of NCBI NO: 1346181 NR Description: Glycine-rich RNA-binding protein GRP2A
  misc_feature (1)..(114): Homolog of NCBI NO: 15226605 NR Description: glycine-rich RNA binding protein AtGRP7
  misc_feature (1)..(114): Homolog of NCBI NO: 21553354 NR Description: glycine-rich RNA binding protein 7 [Arabidopsis

SEQ ID NO: 31370 - protein, 107 aa, Arabidopsis thaliana; identical to SEQ ID NO: 27780
  peptide (1)..(107): Ceres Seq. ID no. 12580045
  misc_feature (20)..(105): Pfam Name: Herpesvirus large structural phosphoprotein UL32 Pfam Description: Herpesvirus large structural phosphoprotein UL32
  misc_feature (1)..(107): Homolog of NCBI NO: 10799202 NR Description: glycine-rich RNA-binding protein [Sorghum bicolor]
  misc_feature (1)..(107): Homolog of NCBI NO: 544423 NR Description: Glycine-rich RNA-binding protein 2
  misc_feature (1)..(107): Homolog of NCBI NO: 544416 NR Description: Glycine-rich RNA-binding protein 10
  misc_feature (1)..(107): Homolog of NCBI NO: 34851124 NR Description: putative glycine-rich RNA-binding protein [Prunus
  misc_feature (1)..(107): Homolog of NCBI NO: 15235002 NR Description: glycine-rich RNA-binding protein 8 (GRP8)
  misc_feature (1)..(107): Homolog of NCBI NO: 30681492 NR Description: glycine-rich RNA-binding protein (AtGRP7)
  misc_feature (1)..(107): Homolog of NCBI NO: 1346180 NR Description: Glycine-rich RNA-binding protein GRP1A
  misc_feature (1)..(107): Homolog of NCBI NO: 1346181 NR Description: Glycine-rich RNA-binding protein GRP2A
  misc_feature (1)..(107): Homolog of NCBI NO: 15226605 NR Description: glycine-rich RNA binding protein AtGRP7
  misc_feature (1)..(107): Homolog of NCBI NO: 21553354 NR Description: glycine-rich RNA binding protein 7 [Arabidopsis

SEQ ID NO: 31371 - DNA, 1374 bp, Arabidopsis thaliana; identical to SEQ ID NO: 27781
  misc_feature (1)..(1374): Ceres Seq. ID no. 12348627
  misc_feature: MA Experiment ID: 108433 Result: Down-regulated in Transcription
  misc_feature: MA Experiment 108433 PARAMETER Experiment Name: At_rhl_Mutant2_cDNA_P Parameter: Age (day) Value: 7
  misc_feature: MA Experiment 108433 PARAMETER Experiment Name: At_rhl_Mutant2_cDNA_P Parameter: Organism Value: A. thaliana
  misc_feature: MA Experiment 108433 PARAMETER Experiment Name: At_rhl_Mutant2_cDNA_P Parameter: Plant Line Value: rhl Mutant vs. wt landsburg
  misc_feature: MA Experiment 108433 PARAMETER Experiment Name: At_rhl_Mutant2_cDNA_P Parameter: Tissue Value: Roots
  misc_feature: MA Experiment ID: 108434 Result: Up-regulated in Transcription
  misc_feature: MA Experiment 108434 PARAMETER Experiment Name: At_Root_Tips_cDNA_P Parameter: Tissue Value: Root Tips
  misc_feature: MA Experiment ID: 108572 Result: Up-regulated in Transcription
  misc_feature: MA Experiment 108572 PARAMETER Experiment Name: At_Drought_cDNA_P Parameter: Timepoint (hr) Value: 1
  misc_feature: MA Experiment 108572 PARAMETER Experiment Name: At_Drought_cDNA_P Parameter: Tissue Value: Aerial
  misc_feature: MA Experiment 108572 PARAMETER Experiment Name: At_Drought_cDNA_P Parameter: Treatment Value: Drought vs. No Drought
  misc_feature: MA Experiment ID: 108573 Result: Up-regulated in Transcription
  misc_feature: MA Experiment 108573 PARAMETER Experiment Name: At_Drought_cDNA_P Parameter: Timepoint (hr) Value: 6
  misc_feature: MA Experiment 108573 PARAMETER Experiment Name: At_Drought_cDNA_P Parameter: Tissue Value: Aerial
  misc_feature: MA Experiment 108573 PARAMETER Experiment Name: At_Drought_cDNA_P Parameter: Treatment Value: Drought vs. No Drought
  misc_feature: MA Experiment ID: 108577 Result: Down-regulated in Transcription
  misc_feature: MA Experiment 108577 PARAMETER Experiment Name: At_42deg_Heat_cDNA_P Parameter: Temperature (deg C) Value: 42 vs. 22
  misc_feature: MA Experiment 108577 PARAMETER Experiment Name: At_42deg_Heat_cDNA_P Parameter: Timepoint (hr) Value: 6
  misc_feature: MA Experiment 108577 PARAMETER Experiment Name: At_42deg_Heat_cDNA_P Parameter: Tissue Value: Aerial
  misc_feature: MA Experiment ID: 108594 Result: Down-regulated in Transcription
  misc_feature: MA Experiment 108594 PARAMETER Experiment Name: At_Ler-rhl_Root_cDNA_P Parameter: Plant Line Value: null
  misc_feature: MA Experiment ID: 108605 Result: Up-regulated in Transcription
  misc_feature: MA Experiment 108605 PARAMETER Experiment Name: At_100uM_ABA_cDNA_P Parameter: Timepoint (hr) Value: 6
  misc_feature: MA Experiment 108605 PARAMETER Experiment Name: At_100uM_ABA_cDNA_P Parameter: Tissue Value: Aerial
  misc_feature: MA Experiment 108605 PARAMETER Experiment Name: At_100uM_ABA_cDNA_P Parameter: Treatment Value: 100uM ABA vs. No Treatment
  misc_feature: MA Experiment ID: 108607 Result: Up-regulated in Transcription
  misc_feature: MA Experiment 108607 PARAMETER Experiment Name: At_100uM_ABA_cDNA_P Parameter: Timepoint (hr) Value: 4
  misc_feature: MA Experiment 108607 PARAMETER Experiment Name: At_100uM_ABA_cDNA_P Parameter: Tissue Value: Aerial
  misc_feature: MA Experiment 108607 PARAMETER Experiment Name: At_100uM_ABA_cDNA_P Parameter: Treatment Value: 100uM ABA vs. No Treatment
  misc_feature: MA Experiment ID: 20000169 Result: Up-regulated in Transcription
  misc_feature: MA Experiment 20000169 PARAMETER Experiment Name: At_100uM_ABA_P Parameter: Age (day) Value: 14
  misc_feature: MA Experiment 20000169 PARAMETER Experiment Name: At_100uM_ABA_P Parameter: Organism Value: A. thaliana
  misc_feature: MA Experiment 20000169 PARAMETER Experiment Name: At_100uM_ABA_P Parameter: Plant Line Value: WS
  misc_feature: MA Experiment 20000169 PARAMETER Experiment Name: At_100uM_ABA_P Parameter: Timepoint (hr) Value: 6
  misc_feature: MA Experiment 20000169 PARAMETER Experiment Name: At_100uM_ABA_P Parameter: Tissue Value: Aerial
  misc_feature: MA Experiment 20000169 PARAMETER Experiment Name: At_100uM_ABA_P Parameter: Treatment Value: 100uM ABA vs. No Treatment
  misc_feature: MA Experiment ID: 20000184 Result: Up-regulated in Transcription
  misc_feature: MA Experiment 20000184 PARAMETER Experiment Name: At_Shoots__P Parameter: Age (day) Value: 7
  misc_feature: MA Experiment 20000184 PARAMETER Experiment Name: At_Shoots__P Parameter: Tissue Value: Shoots vs. Whole Plant
  misc_feature: MA Experiment ID: 20000185 Result: Up-regulated in Transcription
  misc_feature: MA Experiment 20000185 PARAMETER Experiment Name: At_Roots__P Parameter: Age (day) Value: 7 vs. 21
  misc_feature: MA Experiment 20000185 PARAMETER Experiment Name: At_Roots__P Parameter: Organism Value: A. thaliana
  misc_feature: MA Experiment 20000185 PARAMETER Experiment Name: At_Roots__P Parameter: Tissue Value: Roots vs. Whole Plant
  misc_feature: MA Experiment ID: 20000234 Result: Up-regulated in Transcription
  misc_feature: MA Experiment 20000234 PARAMETER Experiment Name: At_Siliques_P Parameter: Age (day) Value: 21
  misc_feature: MA Experiment 20000234 PARAMETER Experiment Name: At_Siliques_P Parameter: Organism Value: A. thaliana
  misc_feature: MA Experiment 20000234 PARAMETER Experiment Name: At_Siliques_P Parameter: Plant Line Value: WS
  misc_feature: MA Experiment 20000234 PARAMETER Experiment Name: At_Siliques_P Parameter: Tissue Value: Less Than 5mm Siliques vs. Whole Plant
  misc_feature: MA Experiment ID: 20000264 Result: Up-regulated in Transcription
  misc_feature: MA Experiment 20000264 PARAMETER Experiment Name: At_Open_Flower_P Parameter: Age (day) Value: 21
  misc_feature: MA Experiment 20000264 PARAMETER Experiment Name: At_Open_Flower_P Parameter: Plant Line Value: WS
  misc_feature: MA Experiment 20000264 PARAMETER Experiment Name: At_Open_Flower_P Parameter: Tissue Value: Open Flower vs. Whole Plant
  misc_feature: MA Experiment ID: 20000265 Result: Up-regulated in Transcription
  misc_feature: MA Experiment 20000265 PARAMETER Experiment Name: At_Open_Flower_P Parameter: Age (day) Value: 21
  misc_feature: MA Experiment 20000265 PARAMETER Experiment Name: At_Open_Flower_P Parameter: Plant Line Value: WS
  misc_feature: MA Experiment 20000265 PARAMETER Experiment Name: At_Open_Flower_P Parameter: Tissue Value: Closed Flower vs. Whole Plant
  misc_feature: MA Experiment ID: 20000438 Result: Up-regulated in Transcription
  misc_feature: MA Experiment 20000438 PARAMETER Experiment Name: At_Shoots__P Parameter: Age (day) Value: 14
  misc_feature: MA Experiment 20000438 PARAMETER Experiment Name: At_Shoots__P Parameter: Tissue Value: Shoots vs. Whole Plant
  misc_feature: MA Experiment ID: 20000439 Result: Up-regulated in Transcription
  misc_feature: MA Experiment 20000439 PARAMETER Experiment Name: At_Roots__P Parameter: Age (day) Value: 14 vs. 21
  misc_feature: MA Experiment 20000439 PARAMETER Experiment Name: At_Roots__P Parameter: Organism Value: A. thaliana
  misc_feature: MA Experiment 20000439 PARAMETER Experiment Name: At_Roots__P Parameter: Tissue Value: Roots vs. Whole Plant
  misc_feature: MA Experiment ID: 20001248 Result: Down-regulated in Transcription
  misc_feature: MA Experiment 20001248 PARAMETER Experiment Name: At_Far-red-induction_P Parameter: Age (day) Value: 7
  misc_feature: MA Experiment 20001248 PARAMETER Experiment Name: At_Far-red-induction_P Parameter: Light Value: Far-red vs. White
  misc_feature: MA Experiment 20001248 PARAMETER Experiment Name: At_Far-red-induction_P Parameter: Organism Value: A. thaliana
  misc_feature: MA Experiment 20001248 PARAMETER Experiment Name: At_Far-red-induction_P Parameter: Plant Line Value: Columbia
  misc_feature: MA Experiment 20001248 PARAMETER Experiment Name: At_Far-red-induction_P Parameter: Timepoint (hr) Value: 4
  misc_feature: MA Experiment 20001248 PARAMETER Experiment Name: At_Far-red-induction_P Parameter: Tissue Value: Whole Plant

SEQ ID NO: 31372 - protein, 318 aa, Arabidopsis thaliana; identical to SEQ ID NO: 27782
  peptide (1)..(318): Ceres Seq. ID no. 12348628
  misc_feature (9)..(317): Homolog of NCBI NO: 38345332 NR Description: OSJNBa0081L15.5 [Oryza sativa (japonica
  misc_feature (6)..(317): Homolog of NCBI NO: 7489808 NR Description: probable beta-keto acyl reductase - maize
  misc_feature (6)..(317): Homolog of NCBI NO: 7489413 NR Description: probable b-keto acyl reductase (EC 1.1.-.-) -
  misc_feature (109)..(318): Homolog of NCBI NO: 23505781 NR Description: At1g67730/F12A21_31 [Arabidopsis thaliana]
  misc_feature (109)..(318): Homolog of NCBI NO: 13605726 NR Description: At1g67730/F12A21_31 [Arabidopsis thaliana]
  misc_feature (70)..(318): Homolog of NCBI NO: 2586125 NR Description: b-keto acyl reductase [Arabidopsis thaliana]
  misc_feature (1)..(318): Homolog of NCBI NO: 28565601 NR Description: putative 3-ketoacyl-CoA reductase 2 [Brassica
  misc_feature (34)..(318): Homolog of NCBI NO: 11072027 NR Description: F12A21.14 [Arabidopsis thaliana]
  misc_feature (1)..(318): Homolog of NCBI NO: 28565597 NR Description: putative 3-ketoacyl-CoA reductase 1 [Brassica
  misc_feature (1)..(318): Homolog of NCBI NO: 18408847 NR Description: Expressed protein

SEQ ID NO: 31373 - protein, 210 aa, Arabidopsis thaliana; identical to SEQ ID NO: 27783
  peptide (1)..(210): Ceres Seq. ID no. 12348629
  misc_feature (1)..(209): Homolog of NCBI NO: 38345332 NR Description: OSJNBa0081L15.5 [Oryza sativa (japonica
  misc_feature (1)..(209): Homolog of NCBI NO: 7489808 NR Description: probable beta-keto acyl reductase - maize
  misc_feature (1)..(209): Homolog of NCBI NO: 7489413 NR Description: probable b-keto acyl reductase (EC 1.1.-.-) -
  misc_feature (1)..(210): Homolog of NCBI NO: 23505781 NR Description: At1g67730/F12A21_31 [Arabidopsis thaliana]
  misc_feature (1)..(210): Homolog of NCBI NO: 13605726 NR Description: At1g67730/F12A21_31 [Arabidopsis thaliana]
  misc_feature (1)..(210): Homolog of NCBI NO: 2586125 NR Description: b-keto acyl reductase [Arabidopsis thaliana]
  misc_feature (1)..(210): Homolog of NCBI NO: 28565601 NR Description: putative 3-ketoacyl-CoA reductase 2 [Brassica
  misc_feature (1)..(210): Homolog of NCBI NO: 11072027 NR Description: F12A21.14 [Arabidopsis thaliana]
  misc_feature (1)..(210): Homolog of NCBI NO: 28565597 NR Description: putative 3-ketoacyl-CoA reductase 1 [Brassica
  misc_feature (1)..(210): Homolog of NCBI NO: 18408847 NR Description: Expressed protein

SEQ ID NO: 31374 - protein, 179 aa, Arabidopsis thaliana; identical to SEQ ID NO: 27784
  peptide (1)..(179): Ceres Seq. ID no. 12348630
  misc_feature (1)..(178): Homolog of NCBI NO: 38345332 NR Description: OSJNBa0081L15.5 [Oryza sativa (japonica
  misc_feature (1)..(178): Homolog of NCBI NO: 7489808 NR Description: probable beta-keto acyl reductase - maize
  misc_feature (1)..(178): Homolog of NCBI NO: 7489413 NR Description: probable b-keto acyl reductase (EC 1.1.-.-) -
  misc_feature (1)..(179): Homolog of NCBI NO: 23505781 NR Description: At1g67730/F12A21_31 [Arabidopsis thaliana]
  misc_feature (1)..(179): Homolog of NCBI NO: 13605726 NR Description: At1g67730/F12A21_31 [Arabidopsis thaliana]
  misc_feature (1)..(179): Homolog of NCBI NO: 2586125 NR Description: b-keto acyl reductase [Arabidopsis thaliana]
  misc_feature (1)..(179): Homolog of NCBI NO: 28565601 NR Description: putative 3-ketoacyl-CoA reductase 2 [Brassica
  misc_feature (1)..(179): Homolog of NCBI NO: 11072027 NR Description: F12A21.14 [Arabidopsis thaliana]
  misc_feature (1)..(179): Homolog of NCBI NO: 28565597 NR Description: putative 3-ketoacyl-CoA reductase 1 [Brassica
  misc_feature (1)..(179): Homolog of NCBI NO: 18408847 NR Description: Expressed protein

SEQ ID NO: 31375 - DNA, 1264 bp, Arabidopsis thaliana; identical to SEQ ID NO: 27785
  misc_feature (1)..(1264): Ceres Seq. ID no. 12330000
  misc_feature: MA Experiment ID: 108434 Result: Up-regulated in Transcription
  misc_feature: MA Experiment 108434 PARAMETER Experiment Name: At_Root_Tips_cDNA_P Parameter: Tissue Value: Root Tips
  misc_feature: MA Experiment ID: 108461 Result: Up-regulated in Transcription
  misc_feature: MA Experiment 108461 PARAMETER Experiment Name: At_Germinating_Seeds_cDNA_P Parameter: Age (day) Value: 1 vs. 0
  misc_feature: MA Experiment 108461 PARAMETER Experiment Name: At_Germinating_Seeds_cDNA_P Parameter: Tissue Value: Germinating Seeds
  misc_feature: MA Experiment ID: 108462 Result: Up-regulated in Transcription
  misc_feature: MA Experiment 108462 PARAMETER Experiment Name: At_Germinating_Seeds_cDNA_P Parameter: Age (day) Value: 2 vs. 0
  misc_feature: MA Experiment 108462 PARAMETER Experiment Name: At_Germinating_Seeds_cDNA_P Parameter: Tissue Value: Germinating Seeds
  misc_feature: MA Experiment ID: 108463 Result: Up-regulated in Transcription
  misc_feature: MA Experiment 108463 PARAMETER Experiment Name: At_Germinating_Seeds_cDNA_P Parameter: Age (day) Value: 3 vs. 0
  misc_feature: MA Experiment 108463 PARAMETER Experiment Name: At_Germinating_Seeds_cDNA_P Parameter: Tissue Value: Germinating Seeds
  misc_feature: MA Experiment ID: 108464 Result: Up-regulated in Transcription
  misc_feature: MA Experiment 108464 PARAMETER Experiment Name: At_Germinating_Seeds_cDNA_P Parameter: Age (day) Value: 4 vs. 0
  misc_feature: MA Experiment 108464 PARAMETER Experiment Name: At_Germinating_Seeds_cDNA_P Parameter: Tissue Value: Germinating Seeds
  misc_feature: MA Experiment ID: 108577 Result: Down-regulated in Transcription
  misc_feature: MA Experiment 108577 PARAMETER Experiment Name: At_42deg_Heat_cDNA_P Parameter: Temperature (deg C) Value: 42 vs. 22
  misc_feature: MA Experiment 108577 PARAMETER Experiment Name: At_42deg_Heat_cDNA_P Parameter: Timepoint (hr) Value: 6
  misc_feature: MA Experiment 108577 PARAMETER Experiment Name: At_42deg_Heat_cDNA_P Parameter: Tissue Value: Aerial
  misc_feature: MA Experiment ID: 20000111 Result: Down-regulated in Transcription
  misc_feature: MA Experiment 20000111 PARAMETER Experiment Name: At_42deg_Heat_cDNA_P Parameter: Temperature (deg C) Value: 42 vs. 22
  misc_feature: MA Experiment 20000111 PARAMETER Experiment Name: At_42deg_Heat_cDNA_P Parameter: Timepoint (hr) Value: 6
  misc_feature: MA Experiment 20000111 PARAMETER Experiment Name: At_42deg_Heat_cDNA_P Parameter: Tissue Value: Aerial
  misc_feature: MA Experiment ID: 20000113 Result: Down-regulated in Transcription
  misc_feature: MA Experiment 20000113 PARAMETER Experiment Name: At_42deg_Heat_cDNA_P Parameter: Temperature (deg C) Value: 42 vs. 22
  misc_feature: MA Experiment 20000113 PARAMETER Experiment Name: At_42deg_Heat_cDNA_P Parameter: Timepoint (hr) Value: 8
  misc_feature: MA Experiment 20000113 PARAMETER Experiment Name: At_42deg_Heat_cDNA_P Parameter: Tissue Value: Aerial
  misc_feature: MA Experiment ID: 20000144 Result: Down-regulated in Transcription
  misc_feature: MA Experiment 20000144 PARAMETER Experiment Name: At_42deg_Heat_cDNA_P Parameter: Temperature (deg C) Value: 42 vs. 22
  misc_feature: MA Experiment 20000144 PARAMETER Experiment Name: At_42deg_Heat_cDNA_P Parameter: Timepoint (hr) Value: 1
  misc_feature: MA Experiment 20000144 PARAMETER Experiment Name: At_42deg_Heat_cDNA_P Parameter: Tissue Value: Aerial
  misc_feature: MA Experiment ID: 20000171 Result: Down-regulated in Transcription
  misc_feature: MA Experiment 20000171 PARAMETER Experiment Name: At_42deg_Heat_P Parameter: Age (day) Value: 14
  misc_feature: MA Experiment 20000171 PARAMETER Experiment Name: At_42deg_Heat_P Parameter: Organism Value: A. thaliana
  misc_feature: MA Experiment 20000171 PARAMETER Experiment Name: At_42deg_Heat_P Parameter: Plant Line Value: WS
  misc_feature: MA Experiment 20000171 PARAMETER Experiment Name: At_42deg_Heat_P Parameter: Temperature (deg C) Value: 42 vs. 22
  misc_feature: MA Experiment 20000171 PARAMETER Experiment Name: At_42deg_Heat_P Parameter: Timepoint (hr) Value: 1
  misc_feature: MA Experiment 20000171 PARAMETER Experiment Name: At_42deg_Heat_P Parameter: Tissue Value: Aerial
  misc_feature: MA Experiment ID: 20000173 Result: Down-regulated in Transcription
  misc_feature: MA Experiment 20000173 PARAMETER Experiment Name: At_42deg_Heat_P Parameter: Age (day) Value: 14
  misc_feature: MA Experiment 20000173 PARAMETER Experiment Name: At_42deg_Heat_P Parameter: Organism Value: A. thaliana
  misc_feature: MA Experiment 20000173 PARAMETER Experiment Name: At_42deg_Heat_P Parameter: Plant Line Value: WS
  misc_feature: MA Experiment 20000173 PARAMETER Experiment Name: At_42deg_Heat_P Parameter: Temperature (deg C) Value: 42 vs. 22
  misc_feature: MA Experiment 20000173 PARAMETER Experiment Name: At_42deg_Heat_P Parameter: Timepoint (hr) Value: 6
  misc_feature: MA Experiment 20000173 PARAMETER Experiment Name: At_42deg_Heat_P Parameter: Tissue Value: Aerial
  misc_feature: MA Experiment ID: 20000180 Result: Up-regulated in Transcription
  misc_feature: MA Experiment 20000180 PARAMETER Experiment Name: At_Germinating_Seeds_P Parameter: Age (hr) Value: 24 vs. 0
  misc_feature: MA Experiment 20000180 PARAMETER Experiment Name: At_Germinating_Seeds_P Parameter: Tissue Value: Germinating Seeds
  misc_feature: MA Experiment ID: 20001906 Result: Down-regulated in Transcription
  misc_feature: MA Experiment 20001906 PARAMETER Experiment Name: At_Drought_Reproduction_P Parameter: Age (day) Value: 35
  misc_feature: MA Experiment 20001906 PARAMETER Experiment Name: At_Drought_Reproduction_P Parameter: Organism Value: A. thaliana
  misc_feature: MA Experiment 20001906 PARAMETER Experiment Name: At_Drought_Reproduction_P Parameter: Plant Line Value: WS
  misc_feature: MA Experiment 20001906 PARAMETER Experiment Name: At_Drought_Reproduction_P Parameter: Timepoint (day) Value: 5
  misc_feature: MA Experiment 20001906 PARAMETER Experiment Name: At_Drought_Reproduction_P Parameter: Tissue Value: Siliques
  misc_feature: MA Experiment 20001906 PARAMETER Experiment Name: At_Drought_Reproduction_P Parameter: Treatment Value: Drought vs. No Drought

SEQ ID NO: 31376 - protein, 345 aa, Arabidopsis thaliana; identical to SEQ ID NO: 27786
  peptide (1)..(345): Ceres Seq. ID no. 12330001
  misc_feature (100)..(295): Pfam Name: Galactosyltransferase Pfam Description: Galactosyltransferase
  misc_feature (80)..(339): Homolog of NCBI NO: 15217544 NR Description: elicitor response protein, putative; protein id:
  misc_feature (72)..(336): Homolog of NCBI NO: 12323294 NR Description: putative (Avr9) elicitor response protein;
  misc_feature (56)..(329): Homolog of NCBI NO: 18395060 NR Description: Expressed protein
  misc_feature (235)..(344): Homolog of NCBI NO: 7487205 NR Description: hypothetical protein At2g26100 [imported] -
  misc_feature (2)..(230): Homolog of NCBI NO: 7487205 NR Description: hypothetical protein At2g26100 [imported] -
  misc_feature (141)..(345): Homolog of NCBI NO: 22553074 NR Description: beta 1,3-glycosyltransferase-like protein III
  misc_feature (2)..(344): Homolog of NCBI NO: 30683005 NR Description: galactosyltransferase family [Arabidopsis
  misc_feature (1)..(345): Homolog of NCBI NO: 15232447 NR Description: galactosyltransferase, putative
  misc_feature (1)..(345): Homolog of NCBI NO: 25405979 NR Description: protein F12M16.19 [imported] - Arabidopsis
  misc_feature (1)..(345): Homolog of NCBI NO: 30695469 NR Description: galactosyltransferase family [Arabidopsis

SEQ ID NO: 31377 - protein, 259 aa, Arabidopsis thaliana; identical to SEQ ID NO: 27787
  peptide (1)..(259): Ceres Seq. ID no. 12330002
  misc_feature (14)..(209): Pfam Name: Galactosyltransferase Pfam Description: Galactosyltransferase
  misc_feature (1)..(253): Homolog of NCBI NO: 15217544 NR Description: elicitor response protein, putative; protein id:
  misc_feature (1)..(250): Homolog of NCBI NO: 12323294 NR Description: putative (Avr9) elicitor response protein;
  misc_feature (1)..(243): Homolog of NCBI NO: 18395060 NR Description: Expressed protein
  misc_feature (149)..(258): Homolog of NCBI NO: 7487205 NR Description: hypothetical protein At2g26100 [imported] -
  misc_feature (1)..(144): Homolog of NCBI NO: 7487205 NR Description: hypothetical protein At2g26100 [imported] -
  misc_feature (55)..(259): Homolog of NCBI NO: 22553074 NR Description: beta 1,3-glycosyltransferase-like protein III
  misc_feature (1)..(258): Homolog of NCBI NO: 30683005 NR Description: galactosyltransferase family [Arabidopsis
  misc_feature (1)..(259): Homolog of NCBI NO: 15232447 NR Description: galactosyltransferase, putative
  misc_feature (1)..(259): Homolog of NCBI NO: 25405979 NR Description: protein F12M16.19 [imported] - Arabidopsis
  misc_feature (1)..(259): Homolog of NCBI NO: 30695469 NR Description: galactosyltransferase family [Arabidopsis

SEQ ID NO: 31378 - protein, 236 aa, Arabidopsis thaliana; identical to SEQ ID NO: 27788
  peptide (1)..(236): Ceres Seq. ID no. 12330003
  misc_feature (1)..(186): Pfam Name: Galactosyltransferase Pfam Description: Galactosyltransferase
  misc_feature (1)..(230): Homolog of NCBI NO: 15217544 NR Description: elicitor response protein, putative; protein id:
  misc_feature (1)..(227): Homolog of NCBI NO: 12323294 NR Description: putative (Avr9) elicitor response protein;
  misc_feature (1)..(220): Homolog of NCBI NO: 18395060 NR Description: Expressed protein
  misc_feature (126)..(235): Homolog of NCBI NO: 7487205 NR Description: hypothetical protein At2g26100 [imported] -
  misc_feature (1)..(121): Homolog of NCBI NO: 7487205 NR Description: hypothetical protein At2g26100 [imported] -
  misc_feature (32)..(236): Homolog of NCBI NO: 22553074 NR Description: beta 1,3-glycosyltransferase-like protein III
  misc_feature (1)..(235): Homolog of NCBI NO: 30683005 NR Description: galactosyltransferase family [Arabidopsis
  misc_feature (1)..(236): Homolog of NCBI NO: 15232447 NR Description: galactosyltransferase, putative
  misc_feature (1)..(236): Homolog of NCBI NO: 25405979 NR Description: protein F12M16.19 [imported] - Arabidopsis
  misc_feature (1)..(236): Homolog of NCBI NO: 30695469 NR Description: galactosyltransferase family [Arabidopsis

SEQ ID NO: 31379 - DNA, 958 bp, Arabidopsis thaliana; identical to SEQ ID NO: 27789
  misc_feature (1)..(958): Ceres Seq. ID no. 12738824
  misc_feature: MA Experiment ID: 108434 Result: Down-regulated in Transcription
  misc_feature: MA Experiment 108434 PARAMETER Experiment Name: At_Root_Tips_cDNA_P Parameter: Tissue Value: Root Tips
  misc_feature: MA Experiment ID: 108462 Result: Up-regulated in Transcription
  misc_feature: MA Experiment 108462 PARAMETER Experiment Name: At_Germinating_Seeds_cDNA_P Parameter: Age (day) Value: 2 vs. 0
  misc_feature: MA Experiment 108462 PARAMETER Experiment Name: At_Germinating_Seeds_cDNA_P Parameter: Tissue Value: Germinating Seeds
  misc_feature: MA Experiment ID: 108463 Result: Up-regulated in Transcription
  misc_feature: MA Experiment 108463 PARAMETER Experiment Name: At_Germinating_Seeds_cDNA_P Parameter: Age (day) Value: 3 vs. 0
  misc_feature: MA Experiment 108463 PARAMETER Experiment Name: At_Germinating_Seeds_cDNA_P Parameter: Tissue Value: Germinating Seeds
  misc_feature: MA Experiment ID: 108464 Result: Up-regulated in Transcription
  misc_feature: MA Experiment 108464 PARAMETER Experiment Name: At_Germinating_Seeds_cDNA_P Parameter: Age (day) Value: 4 vs. 0
  misc_feature: MA Experiment 108464 PARAMETER Experiment Name: At_Germinating_Seeds_cDNA_P Parameter: Tissue Value: Germinating Seeds
  misc_feature: MA Experiment ID: 108488 Result: Down-regulated in Transcription
  misc_feature: MA Experiment ID: 108668 Result: Up-regulated in Transcription
  misc_feature: MA Experiment 108668 PARAMETER Experiment Name: At_2mM_SA_cDNA_P Parameter: Plant Line Value: WS
  misc_feature: MA Experiment 108668 PARAMETER Experiment Name: At_2mM_SA_cDNA_P Parameter: Timepoint (hr) Value: 6
  misc_feature: MA Experiment 108668 PARAMETER Experiment Name: At_2mM_SA_cDNA_P Parameter: Treatment Value: 2mM SA vs. No Treatment
  misc_feature: MA Experiment ID: 20000182 Result: Up-regulated in Transcription
  misc_feature: MA Experiment 20000182 PARAMETER Experiment Name: At_2mM_SA_P Parameter: Age (day) Value: 14
  misc_feature: MA Experiment 20000182 PARAMETER Experiment Name: At_2mM_SA_P Parameter: Organism Value: A. thaliana
  misc_feature: MA Experiment 20000182 PARAMETER Experiment Name: At_2mM_SA_P Parameter: Plant Line Value: WS
  misc_feature: MA Experiment 20000182 PARAMETER Experiment Name: At_2mM_SA_P Parameter: Timepoint (hr) Value: 6
  misc_feature: MA Experiment 20000182 PARAMETER Experiment Name: At_2mM_SA_P Parameter: Tissue Value: Aerial
  misc_feature: MA Experiment 20000182 PARAMETER Experiment Name: At_2mM_SA_P Parameter: Treatment Value: 2mM SA vs. No Treatment

SEQ ID NO: 31380 - protein, 133 aa, Arabidopsis thaliana; identical to SEQ ID NO: 27790
  peptide (1)..(133): Ceres Seq. ID no. 12738825
  misc_feature (1)..(103): Pfam Name: SNF7 Pfam Description: SNF7
  misc_feature (1)..(127): Homolog of NCBI NO: 40548422 NR Description: Snf7 homologue associated with Alix 2 [Homo
  misc_feature (1)..(132): Homolog of NCBI NO: 29841209 NR Description: similar to GenBank Accession Number BC011429
  misc_feature (1)..(128): Homolog of NCBI NO: 28827795 NR Description: chromosome 20 open reading frame 178 [Homo
  misc_feature (1)..(128): Homolog of NCBI NO: 28077049 NR Description: RIKEN cDNA 2010012F05 [Mus musculus]
  misc_feature (1)..(129): Homolog of NCBI NO: 28277855 NR Description: Unknown (protein for MGC:56112) [Danio rerio]
  misc_feature (1)..(133): Homolog of NCBI NO: 19115183 NR Description: similar to yeast Snf7 protein involved in glucose
  misc_feature (1)..(133): Homolog of NCBI NO: 28850339 NR Description: similar to C56C10.3.p
  misc_feature (1)..(133): Homolog of NCBI NO: 15224854 NR Description: copia-like retroelement pol polyprotein
  misc_feature (1)..(133): Homolog of NCBI NO: 21594892 NR Description: copia-like retroelement pol polyprotein
  misc_feature (1)..(133): Homolog of NCBI NO: 15233464 NR Description: putative protein

SEQ ID NO: 31381 - protein, 131 aa, Arabidopsis thaliana; identical to SEQ ID NO: 27791
  peptide (1)..(131): Ceres Seq. ID no. 12738826
  misc_feature (1)..(101): Pfam Name: SNF7 Pfam Description: SNF7
  misc_feature (1)..(125): Homolog of NCBI NO: 40548422 NR Description: Snf7 homologue associated with Alix 2 [Homo
  misc_feature (1)..(130): Homolog of NCBI NO: 29841209 NR Description: similar to GenBank Accession Number BC011429
  misc_feature (1)..(126): Homolog of NCBI NO: 28827795 NR Description: chromosome 20 open reading frame 178 [Homo
  misc_feature (1)..(126): Homolog of NCBI NO: 28077049 NR Description: RIKEN cDNA 2010012F05 [Mus musculus]
  misc_feature (1)..(127): Homolog of NCBI NO: 28277855 NR Description: Unknown (protein for MGC:56112) [Danio rerio]
  misc_feature (1)..(131): Homolog of NCBI NO: 19115183 NR Description: similar to yeast Snf7 protein involved in glucose
  misc_feature (1)..(131): Homolog of NCBI NO: 28850339 NR Description: similar to C56C10.3.p
  misc_feature (1)..(131): Homolog of NCBI NO: 15224854 NR Description: copia-like retroelement pol polyprotein
  misc_feature (1)..(131): Homolog of NCBI NO: 21594892 NR Description: copia-like retroelement pol polyprotein
  misc_feature (1)..(131): Homolog of NCBI NO: 15233464 NR Description: putative protein

SEQ ID NO: 31382 - protein, 110 aa, Arabidopsis thaliana; identical to SEQ ID NO: 27792
  peptide (1)..(110): Ceres Seq. ID no. 12738827
  misc_feature (1)..(80): Pfam Name: SNF7 Pfam Description: SNF7
  misc_feature (1)..(104): Homolog of NCBI NO: 40548422 NR Description: Snf7 homologue associated with Alix 2 [Homo
  misc_feature (1)..(109): Homolog of NCBI NO: 29841209 NR Description: similar to GenBank Accession Number BC011429
  misc_feature (1)..(105): Homolog of NCBI NO: 28827795 NR Description: chromosome 20 open reading frame 178 [Homo
  misc_feature (1)..(105): Homolog of NCBI NO: 28077049 NR Description: RIKEN cDNA 2010012F05 [Mus musculus]
  misc_feature (1)..(106): Homolog of NCBI NO: 28277855 NR Description: Unknown (protein for MGC:56112) [Danio rerio]
  misc_feature (1)..(110): Homolog of NCBI NO: 19115183 NR Description: similar to yeast Snf7 protein involved in glucose
  misc_feature (1)..(110): Homolog of NCBI NO: 28850339 NR Description: similar to C56C10.3.p
  misc_feature (1)..(110): Homolog of NCBI NO: 15224854 NR Description: copia-like retroelement pol polyprotein
  misc_feature (1)..(110): Homolog of NCBI NO: 21594892 NR Description: copia-like retroelement pol polyprotein
  misc_feature (1)..(110): Homolog of NCBI NO: 15233464 NR Description: putative protein

SEQ ID NO: 31383 - DNA, 797 bp, Arabidopsis thaliana; identical to SEQ ID NO: 27793
  misc_feature (1)..(797): Ceres Seq. ID no. 12331684
  misc_feature: MA Experiment ID: 108434 Result: Up-regulated in Transcription
  misc_feature: MA Experiment 108434 PARAMETER Experiment Name: At_Root_Tips_cDNA_P Parameter: Tissue Value: Root Tips
  misc_feature: MA Experiment ID: 108463 Result: Down-regulated in Transcription
  misc_feature: MA Experiment 108463 PARAMETER Experiment Name: At_Germinating_Seeds_cDNA_P Parameter: Age (day) Value: 3 vs. 0
  misc_feature: MA Experiment 108463 PARAMETER Experiment Name: At_Germinating_Seeds_cDNA_P Parameter: Tissue Value: Germinating Seeds
  misc_feature: MA Experiment ID: 108668 Result: Up-regulated in Transcription
  misc_feature: MA Experiment 108668 PARAMETER Experiment Name: At_2mM_SA_cDNA_P Parameter: Plant Line Value: WS
  misc_feature: MA Experiment 108668 PARAMETER Experiment Name: At_2mM_SA_cDNA_P Parameter: Timepoint (hr) Value: 6
  misc_feature: MA Experiment 108668 PARAMETER Experiment Name: At_2mM_SA_cDNA_P Parameter: Treatment Value: 2mM SA vs. No Treatment
  misc_feature: MA Experiment ID: 20000090 Result: Up-regulated in Transcription
  misc_feature: MA Experiment ID: 20000224 Result: Down-regulated in Transcription
  misc_feature: MA Experiment ID: 20000794 Result: Down-regulated in Transcription
  misc_feature: MA Experiment 20000794 PARAMETER Experiment Name: At_Petals_P Parameter: Age (day) Value: 23-25 days
  misc_feature: MA Experiment 20000794 PARAMETER Experiment Name: At_Petals_P Parameter: Plant Line Value: WS
  misc_feature: MA Experiment 20000794 PARAMETER Experiment Name: At_Petals_P Parameter: Tissue Value: Petals vs. Whole plant

SEQ ID NO: 31384 - protein, 171 aa, Arabidopsis thaliana; identical to SEQ ID NO: 27794
  peptide (1)..(171): Ceres Seq. ID no. 12331685
  misc_feature (34)..(169): Homolog of NCBI NO: 24413970 NR Description: contains EST AU181579(C50456)~similar to Oryza
  misc_feature (33)..(169): Homolog of NCBI NO: 15235304 NR Description: putative protein
  misc_feature (39)..(169): Homolog of NCBI NO: 34904470 NR Description: OSJNBa0086P08.14 [Oryza sativa (japonica
  misc_feature (41)..(169): Homolog of NCBI NO: 18403397 NR Description: Expressed protein
  misc_feature (34)..(171): Homolog of NCBI NO: 34909622 NR Description: P0435B05.31 [Oryza sativa (japonica
  misc_feature (33)..(169): Homolog of NCBI NO: 18395285 NR Description: expressed protein
  misc_feature (33)..(171): Homolog of NCBI NO: 18391179 NR Description: expressed protein
  misc_feature (109)..(171): Homolog of NCBI NO: 6573753 NR Description: F20B24.1 [Arabidopsis thaliana]
  misc_feature (28)..(108): Homolog of NCBI NO: 6573753 NR Description: F20B24.1 [Arabidopsis thaliana]
  misc_feature (28)..(171): Homolog of NCBI NO: 30681801 NR Description: expressed protein [Arabidopsis thaliana]

SEQ ID NO: 31385 - protein, 139 aa, Arabidopsis thaliana; identical to SEQ ID NO: 27795
  peptide (1)..(139): Ceres Seq. ID no. 12331686
  misc_feature (2)..(137): Homolog of NCBI NO: 24413970 NR Description: contains EST AU181579(C50456)~similar to Oryza
  misc_feature (1)..(137): Homolog of NCBI NO: 15235304 NR Description: putative protein
  misc_feature (7)..(137): Homolog of NCBI NO: 34904470 NR Description: OSJNBa0086P08.14 [Oryza sativa (japonica
  misc_feature (9)..(137): Homolog of NCBI NO: 18403397 NR Description: Expressed protein
  misc_feature (2)..(139): Homolog of NCBI NO: 34909622 NR Description: P0435B05.31 [Oryza sativa (japonica
  misc_feature (1)..(137): Homolog of NCBI NO: 18395285 NR Description: expressed protein
  misc_feature (1)..(139): Homolog of NCBI NO: 18391179 NR Description: expressed protein
  misc_feature (77)..(139): Homolog of NCBI NO: 6573753 NR Description: F20B24.1 [Arabidopsis thaliana]
  misc_feature (1)..(76): Homolog of NCBI NO: 6573753 NR Description: F20B24.1 [Arabidopsis thaliana]
  misc_feature (1)..(139): Homolog of NCBI NO: 30681801 NR Description: expressed protein [Arabidopsis thaliana]

SEQ ID NO: 31386 - protein, 103 aa, Arabidopsis thaliana; identical to SEQ ID NO: 27796
  peptide (1)..(103): Ceres Seq. ID no. 12331687
  misc_feature (1)..(101): Homolog of NCBI NO: 24413970 NR Description: contains EST AU181579(C50456)~similar to Oryza
  misc_feature (1)..(101): Homolog of NCBI NO: 15235304 NR Description: putative protein
  misc_feature (1)..(101): Homolog of NCBI NO: 34904470 NR Description: OSJNBa0086P08.14 [Oryza sativa (japonica
  misc_feature (1)..(101): Homolog of NCBI NO: 18403397 NR Description: Expressed protein
  misc_feature (1)..(103): Homolog of NCBI NO: 34909622 NR Description: P0435B05.31 [Oryza sativa (japonica
  misc_feature (1)..(101): Homolog of NCBI NO: 18395285 NR Description: expressed protein
  misc_feature (1)..(103): Homolog of NCBI NO: 18391179 NR Description: expressed protein
  misc_feature (41)..(103): Homolog of NCBI NO: 6573753 NR Description: F20B24.1 [Arabidopsis thaliana]
  misc_feature (1)..(40): Homolog of NCBI NO: 6573753 NR Description: F20B24.1 [Arabidopsis thaliana]
  misc_feature (1)..(103): Homolog of NCBI NO: 30681801 NR Description: expressed protein [Arabidopsis thaliana]

SEQ ID NO: 31387 - DNA, 1169 bp, Arabidopsis thaliana; identical to SEQ ID NO: 27797
  misc_feature (1)..(1169): Ceres Seq. ID no. 12579866
  misc_feature: MA Experiment ID: 108434 Result: Down-regulated in Transcription
  misc_feature: MA Experiment 108434 PARAMETER Experiment Name: At_Root_Tips_cDNA_P Parameter: Tissue Value: Root Tips
  misc_feature: MA Experiment ID: 108469 Result: Up-regulated in Transcription
  misc_feature: MA Experiment ID: 20000030 Result: Down-regulated in Transcription
  misc_feature: MA Experiment 20000030 PARAMETER Experiment Name: At_CS6630_Roots_cDNA_P Parameter: Plant Line Value: CS6630 vs. WS
  misc_feature: MA Experiment 20000030 PARAMETER Experiment Name: At_CS6630_Roots_cDNA_P Parameter: Tissue Value: Roots
  misc_feature: MA Experiment ID: 20000069 Result: Up-regulated in Transcription
  misc_feature: MA Experiment 20000069 PARAMETER Experiment Name: At_100uM_ABA_Mutants_cDNA_P Parameter: Plant Line Value: CS23
  misc_feature: MA Experiment 20000069 PARAMETER Experiment Name: At_100uM_ABA_Mutants_cDNA_P Parameter: Timepoint (hr) Value: 6
  misc_feature: MA Experiment 20000069 PARAMETER Experiment Name: At_100uM_ABA_Mutants_cDNA_P Parameter: Tissue Value: Aerial
  misc_feature: MA Experiment 20000069 PARAMETER Experiment Name: At_100uM_ABA_Mutants_cDNA_P Parameter: Treatment Value: 100uM ABA vs. No Treatment
  misc_feature: MA Experiment ID: 20000090 Result: Up-regulated in Transcription
  misc_feature: MA Experiment ID: 20000224 Result: Down-regulated in Transcription
  misc_feature: MA Experiment ID: 20000314 Result: Down-regulated in Transcription
  misc_feature: MA Experiment 20000314 PARAMETER Experiment Name: At_14day_Shoots-Roots_Sub_P Parameter: Age (day) Value: 14
  misc_feature: MA Experiment 20000314 PARAMETER Experiment Name: At_14day_Shoots-Roots_Sub_P Parameter: Organism Value: A. thaliana
  misc_feature: MA Experiment 20000314 PARAMETER Experiment Name: At_14day_Shoots-Roots_Sub_P Parameter: Plant Line Value: WS
  misc_feature: MA Experiment 20000314 PARAMETER Experiment Name: At_14day_Shoots-Roots_Sub_P Parameter: Tissue Value: Roots vs. Whole Plant
  misc_feature: MA Experiment ID: 20000315 Result: Down-regulated in Transcription
  misc_feature: MA Experiment 20000315 PARAMETER Experiment Name: At_14day_Shoots-Roots_Sub_P Parameter: Age (day) Value: 14
  misc_feature: MA Experiment 20000315 PARAMETER Experiment Name: At_14day_Shoots-Roots_Sub_P Parameter: Organism Value: A. thaliana
  misc_feature: MA Experiment 20000315 PARAMETER Experiment Name: At_14day_Shoots-Roots_Sub_P Parameter: Plant Line Value: WS
  misc_feature: MA Experiment 20000315 PARAMETER Experiment Name: At_14day_Shoots-Roots_Sub_P Parameter: Tissue Value: Shoots vs. Whole Plant
  misc_feature: MA Experiment ID: 20000347 Result: Up-regulated in Transcription
  misc_feature: MA Experiment 20000347 PARAMETER Experiment Name: At_2mM_SA_Sub_P Parameter: Age (day) Value: 14
  misc_feature: MA Experiment 20000347 PARAMETER Experiment Name: At_2mM_SA_Sub_P Parameter: Organism Value: A. thaliana
  misc_feature: MA Experiment 20000347 PARAMETER Experiment Name: At_2mM_SA_Sub_P Parameter: Plant Line Value: WS
  misc_feature: MA Experiment 20000347 PARAMETER Experiment Name: At_2mM_SA_Sub_P Parameter: Timepoint (hr) Value: 6
  misc_feature: MA Experiment 20000347 PARAMETER Experiment Name: At_2mM_SA_Sub_P Parameter: Tissue Value: Aerial
  misc_feature: MA Experiment 20000347 PARAMETER Experiment Name: At_2mM_SA_Sub_P Parameter: Treatment Value: 2mM SA vs. No Treatment
  misc_feature: MA Experiment ID: 20000355 Result: Down-regulated in Transcription
  misc_feature: MA Experiment 20000355 PARAMETER Experiment Name: At_Siliques_Sub_P Parameter: Age (day) Value: 21
  misc_feature: MA Experiment 20000355 PARAMETER Experiment Name: At_Siliques_Sub_P Parameter: Organism Value: A. thaliana
  misc_feature: MA Experiment 20000355 PARAMETER Experiment Name: At_Siliques_Sub_P Parameter: Plant Line Value: WS
  misc_feature: MA Experiment 20000355 PARAMETER Experiment Name: At_Siliques_Sub_P Parameter: Tissue Value: Less Than 5mm Siliques vs. Whole Plant
  misc_feature: MA Experiment ID: 20000440 Result: Down-regulated in Transcription
  misc_feature: MA Experiment 20000440 PARAMETER Experiment Name: At_Closed-Flower__Sub_P Parameter: Tissue Value: Closed Flower vs. Whole Plant

SEQ ID NO: 31388 - protein, 298 aa, Arabidopsis thaliana; identical to SEQ ID NO: 27798
  peptide (1)..(298): Ceres Seq. ID no. 12579867
  misc_feature (13)..(294): Homolog of NCBI NO: 13194676 NR Description: hypersensitivity-induced response-like protein
  misc_feature (13)..(294): Homolog of NCBI NO: 7716468 NR Description: hypersensitive-induced response protein [Zea mays]
  misc_feature (13)..(294): Homolog of NCBI NO: 9998903 NR Description: putative membrane protein [Zea mays]
  misc_feature (13)..(295): Homolog of NCBI NO: 28476864 NR Description: hypersensitive-induced reaction protein 2
  misc_feature (13)..(292): Homolog of NCBI NO: 14150732 NR Description: hypersensitive-induced response protein [Oryza
  misc_feature (13)..(293): Homolog of NCBI NO: 23345042 NR Description: hypersensitive-induced reaction protein 1
  misc_feature (13)..(296): Homolog of NCBI NO: 15241939 NR Description: putative protein
  misc_feature (13)..(294): Homolog of NCBI NO: 7716466 NR Description: hypersensitive-induced response protein [Zea mays]
  misc_feature (13)..(296): Homolog of NCBI NO: 3928150 NR Description: hypothetical protein [Cicer arietinum]
  misc_feature (13)..(298): Homolog of NCBI NO: 15222481 NR Description: unknown protein

SEQ ID NO: 31389 - protein, 286 aa, Arabidopsis thaliana; identical to SEQ ID NO: 23094
  peptide (1)..(286): Ceres Seq. ID no. 12579868
  misc_feature (1)..(282): Homolog of NCBI NO: 13194676 NR Description: hypersensitivity-induced response-like protein
  misc_feature (1)..(282): Homolog of NCBI NO: 7716468 NR Description: hypersensitive-induced response protein [Zea mays]
  misc_feature (1)..(282): Homolog of NCBI NO: 9998903 NR Description: putative membrane protein [Zea mays]
  misc_feature (1)..(283): Homolog of NCBI NO: 28476864 NR Description: hypersensitive-induced reaction protein 2
  misc_feature (1)..(280): Homolog of NCBI NO: 14150732 NR Description: hypersensitive-induced response protein [Oryza
  misc_feature (1)..(281): Homolog of NCBI NO: 23345042 NR Description: hypersensitive-induced reaction protein 1
  misc_feature (1)..(284): Homolog of NCBI NO: 15241939 NR Description: putative protein
  misc_feature (1)..(282): Homolog of NCBI NO: 7716466 NR Description: hypersensitive-induced response protein [Zea mays]
  misc_feature (1)..(284): Homolog of NCBI NO: 3928150 NR Description: hypothetical protein [Cicer arietinum]
  misc_feature (1)..(286): Homolog of NCBI NO: 15222481 NR Description: unknown protein

SEQ ID NO: 31390 - protein, 151 aa, Arabidopsis thaliana; identical to SEQ ID NO: 23095
  peptide (1)..(151): Ceres Seq. ID no. 12579869
  misc_feature (1)..(147): Homolog of NCBI NO: 13194676 NR Description: hypersensitivity-induced response-like protein
  misc_feature (1)..(147): Homolog of NCBI NO: 7716468 NR Description: hypersensitive-induced response protein [Zea mays]
  misc_feature (1)..(147): Homolog of NCBI NO: 9998903 NR Description: putative membrane protein [Zea mays]
  misc_feature (1)..(148): Homolog of NCBI NO: 28476864 NR Description: hypersensitive-induced reaction protein 2
  misc_feature (1)..(145): Homolog of NCBI NO: 14150732 NR Description: hypersensitive-induced response protein [Oryza
  misc_feature (1)..(146): Homolog of NCBI NO: 23345042 NR Description: hypersensitive-induced reaction protein 1
  misc_feature (1)..(149): Homolog of NCBI NO: 15241939 NR Description: putative protein
  misc_feature (1)..(147): Homolog of NCBI NO: 7716466 NR Description: hypersensitive-induced response protein [Zea mays]
  misc_feature (1)..(149): Homolog of NCBI NO: 3928150 NR Description: hypothetical protein [Cicer arietinum]
  misc_feature (1)..(151): Homolog of NCBI NO: 15222481 NR Description: unknown protein

SEQ ID NO: 31391 - DNA, 802 bp, Arabidopsis thaliana; identical to SEQ ID NO: 27801
  misc_feature (1)..(802): Ceres Seq. ID no. 12675009
  misc_feature: MA Experiment ID: 108595 Result: Down-regulated in Transcription
  misc_feature: MA Experiment 108595 PARAMETER Experiment Name: At_Ler-pi_Ovule_cDNA_P Parameter: Plant Line Value: null
  misc_feature: MA Experiment ID: 20000224 Result: Down-regulated in Transcription
  misc_feature: MA Experiment ID: 20000227 Result: Down-regulated in Transcription
  misc_feature: MA Experiment 20000227 PARAMETER Experiment Name: At_Root-Tips-vs-Tops_P Parameter: Tissue Value: Root Tips vs. Root Tops

SEQ ID NO: 31392 - protein, 140 aa, Arabidopsis thaliana; identical to SEQ ID NO: 27802
  peptide (1)..(140): Ceres Seq. ID no. 12675010
  misc_feature (27)..(136): Homolog of NCBI NO: 13386094 NR Description: RIKEN cDNA 1520402O14 [Mus musculus]
  misc_feature (13)..(124): Homolog of NCBI NO: 19113819 NR Description: Protein with similarity to Drosophila yakuba NADH
  misc_feature (16)..(105): Homolog of NCBI NO: 6322504 NR Description: Vacuolar Protein Sorting; Vps55p [Saccharomyces
  misc_feature (55)..(124): Homolog of NCBI NO: 34905898 NR Description: P0458E05.25 [Oryza sativa (japonica
  misc_feature (23)..(124): Homolog of NCBI NO: 18399269 NR Description: expressed protein
  misc_feature (17)..(124): Homolog of NCBI NO: 16648828 NR Description: AT3g11530/F24K9_21 [Arabidopsis thaliana]
  misc_feature (17)..(124): Homolog of NCBI NO: 12322900 NR Description: unknown protein; 72859-71336 [Arabidopsis
  misc_feature (1)..(139): Homolog of NCBI NO: 25518386 NR Description: hypothetical protein F5D14.18 - Arabidopsis
  misc_feature (1)..(140): Homolog of NCBI NO: 21554354 NR Description: unknown [Arabidopsis thaliana]
  misc_feature (1)..(140): Homolog of NCBI NO: 18398420 NR Description: Expressed protein

SEQ ID NO: 31393 - protein, 127 aa, Arabidopsis thaliana; identical to SEQ ID NO: 27803
  peptide (1)..(127): Ceres Seq. ID no. 12675011
  misc_feature (14)..(123): Homolog of NCBI NO: 13386094 NR Description: RIKEN cDNA 1520402O14 [Mus musculus]
  misc_feature (1)..(111): Homolog of NCBI NO: 19113819 NR Description: Protein with similarity to Drosophila yakuba NADH
  misc_feature (3)..(92): Homolog of NCBI NO: 6322504 NR Description: Vacuolar Protein Sorting; Vps55p [Saccharomyces
  misc_feature (42)..(111): Homolog of NCBI NO: 34905898 NR Description: P0458E05.25 [Oryza sativa (japonica
  misc_feature (10)..(111): Homolog of NCBI NO: 18399269 NR Description: expressed protein
  misc_feature (4)..(111): Homolog of NCBI NO: 16648828 NR Description: AT3g11530/F24K9_21 [Arabidopsis thaliana]
  misc_feature (4)..(111): Homolog of NCBI NO: 12322900 NR Description: unknown protein; 72859-71336 [Arabidopsis
  misc_feature (1)..(126): Homolog of NCBI NO: 25518386 NR Description: hypothetical protein F5D14.18 - Arabidopsis
  misc_feature (1)..(127): Homolog of NCBI NO: 21554354 NR Description: unknown [Arabidopsis thaliana]
  misc_feature (1)..(127): Homolog of NCBI NO: 18398420 NR Description: Expressed protein

SEQ ID NO: 31394 - protein, 97 aa, Arabidopsis thaliana; identical to SEQ ID NO: 27804
  peptide (1)..(97): Ceres Seq. ID no. 12675012
  misc_feature (1)..(93): Homolog of NCBI NO: 13386094 NR Description: RIKEN cDNA 1520402O14 [Mus musculus]
  misc_feature (1)..(81): Homolog of NCBI NO: 19113819 NR Description: Protein with similarity to Drosophila yakuba NADH
  misc_feature (1)..(62): Homolog of NCBI NO: 6322504 NR Description: Vacuolar Protein Sorting; Vps55p [Saccharomyces
  misc_feature (12)..(81): Homolog of NCBI NO: 34905898 NR Description: P0458E05.25 [Oryza sativa (japonica
  misc_feature (1)..(81): Homolog of NCBI NO: 18399269 NR Description: expressed protein
  misc_feature (1)..(81): Homolog of NCBI NO: 16648828 NR Description: AT3g11530/F24K9_21 [Arabidopsis thaliana]
  misc_feature (1)..(81): Homolog of NCBI NO: 12322900 NR Description: unknown protein; 72859-71336 [Arabidopsis
  misc_feature (1)..(96): Homolog of NCBI NO: 25518386 NR Description: hypothetical protein F5D14.18 - Arabidopsis
  misc_feature (1)..(97): Homolog of NCBI NO: 21554354 NR Description: unknown [Arabidopsis thaliana]
  misc_feature (1)..(97): Homolog of NCBI NO: 18398420 NR Description: Expressed protein

SEQ ID NO: 31395 - DNA, 1514 bp, Arabidopsis thaliana; identical to SEQ ID NO: 27805
  misc_feature (1)..(1514): Ceres Seq. ID no. 12580052
  misc_feature: MA Experiment ID: 108434 Result: Down-regulated in Transcription
  misc_feature: MA Experiment 108434 PARAMETER Experiment Name: At_Root_Tips_cDNA_P Parameter: Tissue Value: Root Tips
  misc_feature: MA Experiment ID: 108461 Result: Down-regulated in Transcription
  misc_feature: MA Experiment 108461 PARAMETER Experiment Name: At_Germinating_Seeds_cDNA_P Parameter: Age (day) Value: 1 vs. 0
  misc_feature: MA Experiment 108461 PARAMETER Experiment Name: At_Germinating_Seeds_cDNA_P Parameter: Tissue Value: Germinating Seeds
  misc_feature: MA Experiment ID: 108488 Result: Down-regulated in Transcription
  misc_feature: MA Experiment ID: 108501 Result: Down-regulated in Transcription
  misc_feature: MA Experiment 108501 PARAMETER Experiment Name: At_ap2_floral_buds_cDNA_P Parameter: Plant Line Value: ap2 (Ler.)
  misc_feature: MA Experiment 108501 PARAMETER Experiment Name: At_ap2_floral_buds_cDNA_P Parameter: Tissue Value: Closed Flower
  misc_feature: MA Experiment ID: 108572 Result: Up-regulated in Transcription
  misc_feature: MA Experiment 108572 PARAMETER Experiment Name: At_Drought_cDNA_P Parameter: Timepoint (hr) Value: 1
  misc_feature: MA Experiment 108572 PARAMETER Experiment Name: At_Drought_cDNA_P Parameter: Tissue Value: Aerial
  misc_feature: MA Experiment 108572 PARAMETER Experiment Name: At_Drought_cDNA_P Parameter: Treatment Value: Drought vs. No Drought
  misc_feature: MA Experiment ID: 108573 Result: Up-regulated in Transcription
  misc_feature: MA Experiment 108573 PARAMETER Experiment Name: At_Drought_cDNA_P Parameter: Timepoint (hr) Value: 6
  misc_feature: MA Experiment 108573 PARAMETER Experiment Name: At_Drought_cDNA_P Parameter: Tissue Value: Aerial
  misc_feature: MA Experiment 108573 PARAMETER Experiment Name: At_Drought_cDNA_P Parameter: Treatment Value: Drought vs. No Drought
  misc_feature: MA Experiment ID: 108579 Result: Down-regulated in Transcription
  misc_feature: MA Experiment 108579 PARAMETER Experiment Name: At_4deg_Cold_cDNA_P Parameter: Temperature (deg C) Value: 4 vs. 22
  misc_feature: MA Experiment 108579 PARAMETER Experiment Name: At_4deg_Cold_cDNA_P Parameter: Timepoint (hr) Value: 6
  misc_feature: MA Experiment 108579 PARAMETER Experiment Name: At_4deg_Cold_cDNA_P Parameter: Tissue Value: Aerial
  misc_feature: MA Experiment ID: 108585 Result: Up-regulated in Transcription
  misc_feature: MA Experiment 108585 PARAMETER Experiment Name: At_5mM_NaNP_cDNA_P Parameter: Timepoint (hr) Value: 6
  misc_feature: MA Experiment 108585 PARAMETER Experiment Name: At_5mM_NaNP_cDNA_P Parameter: Tissue Value: Aerial
  misc_feature: MA Experiment 108585 PARAMETER Experiment Name: At_5mM_NaNP_cDNA_P Parameter: Treatment Value: null
  misc_feature: MA Experiment ID: 108605 Result: Up-regulated in Transcription
  misc_feature: MA Experiment 108605 PARAMETER Experiment Name: At_100uM_ABA_cDNA_P Parameter: Timepoint (hr) Value: 6
  misc_feature: MA Experiment 108605 PARAMETER Experiment Name: At_100uM_ABA_cDNA_P Parameter: Tissue Value: Aerial
  misc_feature: MA Experiment 108605 PARAMETER Experiment Name: At_100uM_ABA_cDNA_P Parameter: Treatment Value: 100uM ABA vs. No Treatment
  misc_feature: MA Experiment ID: 108607 Result: Up-regulated in Transcription
  misc_feature: MA Experiment 108607 PARAMETER Experiment Name: At_100uM_ABA_cDNA_P Parameter: Timepoint (hr) Value: 4
  misc_feature: MA Experiment 108607 PARAMETER Experiment Name: At_100uM_ABA_cDNA_P Parameter: Tissue Value: Aerial
  misc_feature: MA Experiment 108607 PARAMETER Experiment Name: At_100uM_ABA_cDNA_P Parameter: Treatment Value: 100uM ABA vs. No Treatment
  misc_feature: MA Experiment ID: 108608 Result: Up-regulated in Transcription
  misc_feature: MA Experiment 108608 PARAMETER Experiment Name: At_100uM_ABA_cDNA_P Parameter: Timepoint (hr) Value: 1
  misc_feature: MA Experiment 108608 PARAMETER Experiment Name: At_100uM_ABA_cDNA_P Parameter: Tissue Value: Aerial
  misc_feature: MA Experiment 108608 PARAMETER Experiment Name: At_100uM_ABA_cDNA_P Parameter: Treatment Value: 100uM ABA vs. No Treatment
  misc_feature: MA Experiment ID: 108609 Result: Up-regulated in Transcription
  misc_feature: MA Experiment 108609 PARAMETER Experiment Name: At_100uM_ABA_cDNA_P Parameter: Timepoint (hr) Value: 24
  misc_feature: MA Experiment 108609 PARAMETER Experiment Name: At_100uM_ABA_cDNA_P Parameter: Tissue Value: Aerial
  misc_feature: MA Experiment 108609 PARAMETER Experiment Name: At_100uM_ABA_cDNA_P Parameter: Treatment Value: 100uM ABA vs. No Treatment
  misc_feature: MA Experiment ID: 20000069 Result: Up-regulated in Transcription
  misc_feature: MA Experiment 20000069 PARAMETER Experiment Name: At_100uM_ABA_Mutants_cDNA_P Parameter: Plant Line Value: CS23
  misc_feature: MA Experiment 20000069 PARAMETER Experiment Name: At_100uM_ABA_Mutants_cDNA_P Parameter: Timepoint (hr) Value: 6
  misc_feature: MA Experiment 20000069 PARAMETER Experiment Name: At_100uM_ABA_Mutants_cDNA_P Parameter: Tissue Value: Aerial
  misc_feature: MA Experiment 20000069 PARAMETER Experiment Name: At_100uM_ABA_Mutants_cDNA_P Parameter: Treatment Value: 100uM ABA vs. No Treatment
  misc_feature: MA Experiment ID: 20000070 Result: Up-regulated in Transcription
  misc_feature: MA Experiment 20000070 PARAMETER Experiment Name: At_100uM_ABA_Mutants_cDNA_P Parameter: Plant Line Value: CS24
  misc_feature: MA Experiment 20000070 PARAMETER Experiment Name: At_100uM_ABA_Mutants_cDNA_P Parameter: Timepoint (hr) Value: 6
  misc_feature: MA Experiment 20000070 PARAMETER Experiment Name: At_100uM_ABA_Mutants_cDNA_P Parameter: Tissue Value: Aerial
  misc_feature: MA Experiment 20000070 PARAMETER Experiment Name: At_100uM_ABA_Mutants_cDNA_P Parameter: Treatment Value: 100uM ABA vs. No Treatment
  misc_feature: MA Experiment ID: 20000071 Result: Up-regulated in Transcription
  misc_feature: MA Experiment 20000071 PARAMETER Experiment Name: At_100uM_ABA_Mutants_cDNA_P Parameter: Plant Line Value: CS8104
  misc_feature: MA Experiment 20000071 PARAMETER Experiment Name: At_100uM_ABA_Mutants_cDNA_P Parameter: Timepoint (hr) Value: 6
  misc_feature: MA Experiment 20000071 PARAMETER Experiment Name: At_100uM_ABA_Mutants_cDNA_P Parameter: Tissue Value: Aerial
  misc_feature: MA Experiment 20000071 PARAMETER Experiment Name: At_100uM_ABA_Mutants_cDNA_P Parameter: Treatment Value: 100uM ABA vs. No Treatment
  misc_feature: MA Experiment ID: 20000072 Result: Up-regulated in Transcription
  misc_feature: MA Experiment 20000072 PARAMETER Experiment Name: At_100uM_ABA_Mutants_cDNA_P Parameter: Plant Line Value: CS8105
  misc_feature: MA Experiment 20000072 PARAMETER Experiment Name: At_100uM_ABA_Mutants_cDNA_P Parameter: Timepoint (hr) Value: 6
  misc_feature: MA Experiment 20000072 PARAMETER Experiment Name: At_100uM_ABA_Mutants_cDNA_P Parameter: Tissue Value: Aerial
  misc_feature: MA Experiment 20000072 PARAMETER Experiment Name: At_100uM_ABA_Mutants_cDNA_P Parameter: Treatment Value: 100uM ABA vs. No Treatment
  misc_feature: MA Experiment ID: 20000086 Result: Up-regulated in Transcription
  misc_feature: MA Experiment 20000086 PARAMETER Experiment Name: At_100uM_ABA_Mutants_cDNA_P Parameter: Plant Line Value: CS22
  misc_feature: MA Experiment 20000086 PARAMETER Experiment Name: At_100uM_ABA_Mutants_cDNA_P Parameter: Timepoint (hr) Value: 6
  misc_feature: MA Experiment 20000086 PARAMETER Experiment Name: At_100uM_ABA_Mutants_cDNA_P Parameter: Tissue Value: Aerial
  misc_feature: MA Experiment 20000086 PARAMETER Experiment Name: At_100uM_ABA_Mutants_cDNA_P Parameter: Treatment Value: 100uM ABA vs. No Treatment
  misc_feature: MA Experiment ID: 20000087 Result: Up-regulated in Transcription
  misc_feature: MA Experiment 20000087 PARAMETER Experiment Name: At_100uM_ABA_Mutants_cDNA_P Parameter: Plant Line Value: WS
  misc_feature: MA Experiment 20000087 PARAMETER Experiment Name: At_100uM_ABA_Mutants_cDNA_P Parameter: Timepoint (hr) Value: 6
  misc_feature: MA Experiment 20000087 PARAMETER Experiment Name: At_100uM_ABA_Mutants_cDNA_P Parameter: Tissue Value: Aerial
  misc_feature: MA Experiment 20000087 PARAMETER Experiment Name: At_100uM_ABA_Mutants_cDNA_P Parameter: Treatment Value: 100uM ABA vs. No Treatment
  misc_feature: MA Experiment ID: 20000088 Result: Up-regulated in Transcription
  misc_feature: MA Experiment 20000088 PARAMETER Experiment Name: At_100uM_ABA_Mutants_cDNA_P Parameter: Plant Line Value: Landsberg
  misc_feature: MA Experiment 20000088 PARAMETER Experiment Name: At_100uM_ABA_Mutants_cDNA_P Parameter: Timepoint (hr) Value: 6
  misc_feature: MA Experiment 20000088 PARAMETER Experiment Name: At_100uM_ABA_Mutants_cDNA_P Parameter: Tissue Value: Aerial
  misc_feature: MA Experiment 20000088 PARAMETER Experiment Name: At_100uM_ABA_Mutants_cDNA_P Parameter: Treatment Value: 100uM ABA vs. No Treatment
  misc_feature: MA Experiment ID: 20000089 Result: Up-regulated in Transcription
  misc_feature: MA Experiment ID: 20000111 Result: Down-regulated in Transcription
  misc_feature: MA Experiment 20000111 PARAMETER Experiment Name: At_42deg_Heat_cDNA_P Parameter: Temperature (deg C) Value: 42 vs. 22
  misc_feature: MA Experiment 20000111 PARAMETER Experiment Name: At_42deg_Heat_cDNA_P Parameter: Timepoint (hr) Value: 6
  misc_feature: MA Experiment 20000111 PARAMETER Experiment Name: At_42deg_Heat_cDNA_P Parameter: Tissue Value: Aerial
  misc_feature: MA Experiment ID: 20000113 Result: Down-regulated in Transcription
  misc_feature: MA Experiment 20000113 PARAMETER Experiment Name: At_42deg_Heat_cDNA_P Parameter: Temperature (deg C) Value: 42 vs. 22
  misc_feature: MA Experiment 20000113 PARAMETER Experiment Name: At_42deg_Heat_cDNA_P Parameter: Timepoint (hr) Value: 8
  misc_feature: MA Experiment 20000113 PARAMETER Experiment Name: At_42deg_Heat_cDNA_P Parameter: Tissue Value: Aerial
  misc_feature: MA Experiment ID: 20000117 Result: Up-regulated in Transcription
  misc_feature: MA Experiment 20000117 PARAMETER Experiment Name: At_100uM_ABA_Mutants_cDNA_P Parameter: Plant Line Value: Columbia
  misc_feature: MA Experiment 20000117 PARAMETER Experiment Name: At_100uM_ABA_Mutants_cDNA_P Parameter: Timepoint (hr) Value: 6
  misc_feature: MA Experiment 20000117 PARAMETER Experiment Name: At_100uM_ABA_Mutants_cDNA_P Parameter: Tissue Value: Aerial
  misc_feature: MA Experiment 20000117 PARAMETER Experiment Name: At_100uM_ABA_Mutants_cDNA_P Parameter: Treatment Value: 100uM ABA vs. No Treatment
  misc_feature: MA Experiment ID: 20000166 Result: Up-regulated in Transcription
  misc_feature: MA Experiment 20000166 PARAMETER Experiment Name: At_100uM_ABA_P Parameter: Age (day) Value: 14
  misc_feature: MA Experiment 20000166 PARAMETER Experiment Name: At_100uM_ABA_P Parameter: Organism Value: A. thaliana
  misc_feature: MA Experiment 20000166 PARAMETER Experiment Name: At_100uM_ABA_P Parameter: Plant Line Value: WS
  misc_feature: MA Experiment 20000166 PARAMETER Experiment Name: At_100uM_ABA_P Parameter: Timepoint (hr) Value: 1
  misc_feature: MA Experiment 20000166 PARAMETER Experiment Name: At_100uM_ABA_P Parameter: Tissue Value: Aerial
  misc_feature: MA Experiment 20000166 PARAMETER Experiment Name: At_100uM_ABA_P Parameter: Treatment Value: 100uM ABA vs. No Treatment
  misc_feature: MA Experiment ID: 20000169 Result: Up-regulated in Transcription
  misc_feature: MA Experiment 20000169 PARAMETER Experiment Name: At_100uM_ABA_P Parameter: Age (day) Value: 14
  misc_feature: MA Experiment 20000169 PARAMETER Experiment Name: At_100uM_ABA_P Parameter: Organism Value: A. thaliana
  misc_feature: MA Experiment 20000169 PARAMETER Experiment Name: At_100uM_ABA_P Parameter: Plant Line Value: WS
  misc_feature: MA Experiment 20000169 PARAMETER Experiment Name: At_100uM_ABA_P Parameter: Timepoint (hr) Value: 6
  misc_feature: MA Experiment 20000169 PARAMETER Experiment Name: At_100uM_ABA_P Parameter: Tissue Value: Aerial
  misc_feature: MA Experiment 20000169 PARAMETER Experiment Name: At_100uM_ABA_P Parameter: Treatment Value: 100uM ABA vs. No Treatment
  misc_feature: MA Experiment ID: 20000171 Result: Down-regulated in Transcription
  misc_feature: MA Experiment 20000171 PARAMETER Experiment Name: At_42deg_Heat_P Parameter: Age (day) Value: 14
  misc_feature: MA Experiment 20000171 PARAMETER Experiment Name: At_42deg_Heat_P Parameter: Organism Value: A. thaliana
  misc_feature: MA Experiment 20000171 PARAMETER Experiment Name: At_42deg_Heat_P Parameter: Plant Line Value: WS
  misc_feature: MA Experiment 20000171 PARAMETER Experiment Name: At_42deg_Heat_P Parameter: Temperature (deg C) Value: 42 vs. 22
  misc_feature: MA Experiment 20000171 PARAMETER Experiment Name: At_42deg_Heat_P Parameter: Timepoint (hr) Value: 1
  misc_feature: MA Experiment 20000171 PARAMETER Experiment Name: At_42deg_Heat_P Parameter: Tissue Value: Aerial
  misc_feature: MA Experiment ID: 20000173 Result: Down-regulated in Transcription
  misc_feature: MA Experiment 20000173 PARAMETER Experiment Name: At_42deg_Heat_P Parameter: Age (day) Value: 14
  misc_feature: MA Experiment 20000173 PARAMETER Experiment Name: At_42deg_Heat_P Parameter: Organism Value: A. thaliana
  misc_feature: MA Experiment 20000173 PARAMETER Experiment Name: At_42deg_Heat_P Parameter: Plant Line Value: WS
  misc_feature: MA Experiment 20000173 PARAMETER Experiment Name: At_42deg_Heat_P Parameter: Temperature (deg C) Value: 42 vs. 22
  misc_feature: MA Experiment 20000173 PARAMETER Experiment Name: At_42deg_Heat_P Parameter: Timepoint (hr) Value: 6
  misc_feature: MA Experiment 20000173 PARAMETER Experiment Name: At_42deg_Heat_P Parameter: Tissue Value: Aerial
  misc_feature: MA Experiment ID: 20000179 Result: Down-regulated in Transcription
  misc_feature: MA Experiment 20000179 PARAMETER Experiment Name: At_Germinating_Seeds_P Parameter: Age (hr) Value: 6 vs. 0
  misc_feature: MA Experiment 20000179 PARAMETER Experiment Name: At_Germinating_Seeds_P Parameter: Tissue Value: Germinating Seeds
  misc_feature: MA Experiment ID: 20000180 Result: Down-regulated in Transcription
  misc_feature: MA Experiment 20000180 PARAMETER Experiment Name: At_Germinating_Seeds_P Parameter: Age (hr) Value: 24 vs. 0
  misc_feature: MA Experiment 20000180 PARAMETER Experiment Name: At_Germinating_Seeds_P Parameter: Tissue Value: Germinating Seeds
  misc_feature: MA Experiment ID: 20000182 Result: Up-regulated in Transcription
  misc_feature: MA Experiment 20000182 PARAMETER Experiment Name: At_2mM_SA_P Parameter: Age (day) Value: 14
  misc_feature: MA Experiment 20000182 PARAMETER Experiment Name: At_2mM_SA_P Parameter: Organism Value: A. thaliana
  misc_feature: MA Experiment 20000182 PARAMETER Experiment Name: At_2mM_SA_P Parameter: Plant Line Value: WS
  misc_feature: MA Experiment 20000182 PARAMETER Experiment Name: At_2mM_SA_P Parameter: Timepoint (hr) Value: 6
  misc_feature: MA Experiment 20000182 PARAMETER Experiment Name: At_2mM_SA_P Parameter: Tissue Value: Aerial
  misc_feature: MA Experiment 20000182 PARAMETER Experiment Name: At_2mM_SA_P Parameter: Treatment Value: 2mM SA vs. No Treatment
  misc_feature: MA Experiment ID: 20000185 Result: Down-regulated in Transcription
  misc_feature: MA Experiment 20000185 PARAMETER Experiment Name: At_Roots__P Parameter: Age (day) Value: 7 vs. 21
  misc_feature: MA Experiment 20000185 PARAMETER Experiment Name: At_Roots__P Parameter: Organism Value: A. thaliana
  misc_feature: MA Experiment 20000185 PARAMETER Experiment Name: At_Roots__P Parameter: Tissue Value: Roots vs. Whole Plant
  misc_feature: MA Experiment ID: 20000234 Result: Down-regulated in Transcription
  misc_feature: MA Experiment 20000234 PARAMETER Experiment Name: At_Siliques_P Parameter: Age (day) Value: 21
  misc_feature: MA Experiment 20000234 PARAMETER Experiment Name: At_Siliques_P Parameter: Organism Value: A. thaliana
  misc_feature: MA Experiment 20000234 PARAMETER Experiment Name: At_Siliques_P Parameter: Plant Line Value: WS
  misc_feature: MA Experiment 20000234 PARAMETER Experiment Name: At_Siliques_P Parameter: Tissue Value: Less Than 5mm Siliques vs. Whole Plant
  misc_feature: MA Experiment ID: 20000235 Result: Down-regulated in Transcription
  misc_feature: MA Experiment 20000235 PARAMETER Experiment Name: At_Siliques_P Parameter: Age (day) Value: 21
  misc_feature: MA Experiment 20000235 PARAMETER Experiment Name: At_Siliques_P Parameter: Organism Value: A. thaliana
  misc_feature: MA Experiment 20000235 PARAMETER Experiment Name: At_Siliques_P Parameter: Plant Line Value: WS
  misc_feature: MA Experiment 20000235 PARAMETER Experiment Name: At_Siliques_P Parameter: Tissue Value: 5-10mm Siliques vs. Whole Plant
  misc_feature: MA Experiment ID: 20000265 Result: Down-regulated in Transcription
  misc_feature: MA Experiment 20000265 PARAMETER Experiment Name: At_Open_Flower_P Parameter: Age (day) Value: 21
  misc_feature: MA Experiment 20000265 PARAMETER Experiment Name: At_Open_Flower_P Parameter: Plant Line Value: WS
  misc_feature: MA Experiment 20000265 PARAMETER Experiment Name: At_Open_Flower_P Parameter: Tissue Value: Closed Flower vs. Whole Plant
  misc_feature: MA Experiment ID: 20000439 Result: Down-regulated in Transcription
  misc_feature: MA Experiment 20000439 PARAMETER Experiment Name: At_Roots__P Parameter: Age (day) Value: 14 vs. 21
  misc_feature: MA Experiment 20000439 PARAMETER Experiment Name: At_Roots__P Parameter: Organism Value: A. thaliana
  misc_feature: MA Experiment 20000439 PARAMETER Experiment Name: At_Roots__P Parameter: Tissue Value: Roots vs. Whole Plant
  misc_feature: MA Experiment ID: 20000445 Result: Up-regulated in Transcription
  misc_feature: MA Experiment 20000445 PARAMETER Experiment Name: At_100uM_NAA__P Parameter: Age (day) Value: 14
  misc_feature: MA Experiment 20000445 PARAMETER Experiment Name: At_100uM_NAA__P Parameter: Organism Value: A. thaliana
  misc_feature: MA Experiment 20000445 PARAMETER Experiment Name: At_100uM_NAA__P Parameter: Plant Line Value: WS
  misc_feature: MA Experiment 20000445 PARAMETER Experiment Name: At_100uM_NAA__P Parameter: Timepoint (hr) Value: 6
  misc_feature: MA Experiment 20000445 PARAMETER Experiment Name: At_100uM_NAA__P Parameter: Tissue Value: Aerial
  misc_feature: MA Experiment 20000445 PARAMETER Experiment Name: At_100uM_NAA__P Parameter: Treatment Value: 100uM NAA vs. No Treatment
  misc_feature: MA Experiment ID: 20000453 Result: Up-regulated in Transcription
  misc_feature: MA Experiment 20000453 PARAMETER Experiment Name: At_100uM_ABA_P Parameter: Age (day) Value: 15
  misc_feature: MA Experiment 20000453 PARAMETER Experiment Name: At_100uM_ABA_P Parameter: Organism Value: A. thaliana
  misc_feature: MA Experiment 20000453 PARAMETER Experiment Name: At_100uM_ABA_P Parameter: Plant Line Value: WS
  misc_feature: MA Experiment 20000453 PARAMETER Experiment Name: At_100uM_ABA_P Parameter: Timepoint (hr) Value: 24
  misc_feature: MA Experiment 20000453 PARAMETER Experiment Name: At_100uM_ABA_P Parameter: Tissue Value: Aerial
  misc_feature: MA Experiment 20000453 PARAMETER Experiment Name: At_100uM_ABA_P Parameter: Treatment Value: 100uM ABA vs. No Treatment
  misc_feature: MA Experiment ID: 20000455 Result: Up-regulated in Transcription
  misc_feature: MA Experiment 20000455 PARAMETER Experiment Name: At_100uM_ABA_P Parameter: Age (day) Value: 16
  misc_feature: MA Experiment 20000455 PARAMETER Experiment Name: At_100uM_ABA_P Parameter: Organism Value: A. thaliana
  misc_feature: MA Experiment 20000455 PARAMETER Experiment Name: At_100uM_ABA_P Parameter: Plant Line Value: WS
  misc_feature: MA Experiment 20000455 PARAMETER Experiment Name: At_100uM_ABA_P Parameter: Timepoint (hr) Value: 48
  misc_feature: MA Experiment 20000455 PARAMETER Experiment Name: At_100uM_ABA_P Parameter: Tissue Value: Aerial
  misc_feature: MA Experiment 20000455 PARAMETER Experiment Name: At_100uM_ABA_P Parameter: Treatment Value: 100uM ABA vs. No Treatment
  misc_feature: MA Experiment ID: 20000456 Result: Down-regulated in Transcription
  misc_feature: MA Experiment 20000456 PARAMETER Experiment Name: At_100uM_BA_P Parameter: Age (day) Value: 14
  misc_feature: MA Experiment 20000456 PARAMETER Experiment Name: At_100uM_BA_P Parameter: Organism Value: A. thaliana
  misc_feature: MA Experiment 20000456 PARAMETER Experiment Name: At_100uM_BA_P Parameter: Plant Line Value: WS
  misc_feature: MA Experiment 20000456 PARAMETER Experiment Name: At_100uM_BA_P Parameter: Timepoint (hr) Value: 6
  misc_feature: MA Experiment 20000456 PARAMETER Experiment Name: At_100uM_BA_P Parameter: Tissue Value: Aerial
  misc_feature: MA Experiment 20000456 PARAMETER Experiment Name: At_100uM_BA_P Parameter: Treatment Value: 100uM BA vs. No Treatment
  misc_feature: MA Experiment ID: 20000573 Result: Up-regulated in Transcription
  misc_feature: MA Experiment 20000573 PARAMETER Experiment Name: At_100uM_ABA_Mutants__P Parameter: Organism Value: A. thaliana
  misc_feature: MA Experiment 20000573 PARAMETER Experiment Name: At_100uM_ABA_Mutants__P Parameter: Plant Line Value: CS22 vs. Ler wt
  misc_feature: MA Experiment 20000573 PARAMETER Experiment Name: At_100uM_ABA_Mutants__P Parameter: Timepoint (hr) Value: N/A
  misc_feature: MA Experiment 20000573 PARAMETER Experiment Name: At_100uM_ABA_Mutants__P Parameter: Tissue Value: Whole Plant
  misc_feature: MA Experiment 20000573 PARAMETER Experiment Name: At_100uM_ABA_Mutants__P Parameter: Treatment Value: None
  misc_feature: MA Experiment ID: 20000574 Result: Up-regulated in Transcription
  misc_feature: MA Experiment 20000574 PARAMETER Experiment Name: At_100uM_ABA_Mutants__P Parameter: Organism Value: A. thaliana
  misc_feature: MA Experiment 20000574 PARAMETER Experiment Name: At_100uM_ABA_Mutants__P Parameter: Plant Line Value: CS23 vs. Ler wt
  misc_feature: MA Experiment 20000574 PARAMETER Experiment Name: At_100uM_ABA_Mutants__P Parameter: Timepoint (hr) Value: N/A
  misc_feature: MA Experiment 20000574 PARAMETER Experiment Name: At_100uM_ABA_Mutants__P Parameter: Tissue Value: Whole Plant
  misc_feature: MA Experiment 20000574 PARAMETER Experiment Name: At_100uM_ABA_Mutants__P Parameter: Treatment Value: None
  misc_feature: MA Experiment ID: 20000794 Result: Up-regulated in Transcription
  misc_feature: MA Experiment 20000794 PARAMETER Experiment Name: At_Petals_P Parameter: Age (day) Value: 23-25 days
  misc_feature: MA Experiment 20000794 PARAMETER Experiment Name: At_Petals_P Parameter: Plant Line Value: WS
  misc_feature: MA Experiment 20000794 PARAMETER Experiment Name: At_Petals_P Parameter: Tissue Value: Petals vs. Whole plant
  misc_feature: MA Experiment ID: 20001248 Result: Up-regulated in Transcription
  misc_feature: MA Experiment 20001248 PARAMETER Experiment Name: At_Far-red-induction_P Parameter: Age (day) Value: 7
  misc_feature: MA Experiment 20001248 PARAMETER Experiment Name: At_Far-red-induction_P Parameter: Light Value: Far-red vs. White
  misc_feature: MA Experiment 20001248 PARAMETER Experiment Name: At_Far-red-induction_P Parameter: Organism Value: A. thaliana
  misc_feature: MA Experiment 20001248 PARAMETER Experiment Name: At_Far-red-induction_P Parameter: Plant Line Value: Columbia
  misc_feature: MA Experiment 20001248 PARAMETER Experiment Name: At_Far-red-induction_P Parameter: Timepoint (hr) Value: 4
  misc_feature: MA Experiment 20001248 PARAMETER Experiment Name: At_Far-red-induction_P Parameter: Tissue Value: Whole Plant
  misc_feature: MA Experiment ID: 20001450 Result: Up-regulated in Transcription
  misc_feature: MA Experiment 20001450 PARAMETER Experiment Name: At_Far-red-induction_P Parameter: Age (day) Value: 7
  misc_feature: MA Experiment 20001450 PARAMETER Experiment Name: At_Far-red-induction_P Parameter: Light Value: Far-red vs. White
  misc_feature: MA Experiment 20001450 PARAMETER Experiment Name: At_Far-red-induction_P Parameter: Organism Value: A. thaliana
  misc_feature: MA Experiment 20001450 PARAMETER Experiment Name: At_Far-red-induction_P Parameter: Plant Line Value: Columbia
  misc_feature: MA Experiment 20001450 PARAMETER Experiment Name: At_Far-red-induction_P Parameter: Timepoint (hr) Value: 8
  misc_feature: MA Experiment 20001450 PARAMETER Experiment Name: At_Far-red-induction_P Parameter: Tissue Value: Whole Plant
  misc_feature: MA Experiment ID: 20001906 Result: Up-regulated in Transcription
  misc_feature: MA Experiment 20001906 PARAMETER Experiment Name: At_Drought_Reproduction_P Parameter: Age (day) Value: 35
  misc_feature: MA Experiment 20001906 PARAMETER Experiment Name: At_Drought_Reproduction_P Parameter: Organism Value: A. thaliana
  misc_feature: MA Experiment 20001906 PARAMETER Experiment Name: At_Drought_Reproduction_P Parameter: Plant Line Value: WS
  misc_feature: MA Experiment 20001906 PARAMETER Experiment Name: At_Drought_Reproduction_P Parameter: Timepoint (day) Value: 5
  misc_feature: MA Experiment 20001906 PARAMETER Experiment Name: At_Drought_Reproduction_P Parameter: Tissue Value: Siliques
  misc_feature: MA Experiment 20001906 PARAMETER Experiment Name: At_Drought_Reproduction_P Parameter: Treatment Value: Drought vs. No Drought
  misc_feature: MA Experiment ID: 20001908 Result: Up-regulated in Transcription
  misc_feature: MA Experiment 20001908 PARAMETER Experiment Name: At_Drought_Reproduction_P Parameter: Age (day) Value: 40
  misc_feature: MA Experiment 20001908 PARAMETER Experiment Name: At_Drought_Reproduction_P Parameter: Organism Value: A. thaliana
  misc_feature: MA Experiment 20001908 PARAMETER Experiment Name: At_Drought_Reproduction_P Parameter: Plant Line Value: WS
  misc_feature: MA Experiment 20001908 PARAMETER Experiment Name: At_Drought_Reproduction_P Parameter: Timepoint (day) Value: 10
  misc_feature: MA Experiment 20001908 PARAMETER Experiment Name: At_Drought_Reproduction_P Parameter: Tissue Value: Siliques
  misc_feature: MA Experiment 20001908 PARAMETER Experiment Name: At_Drought_Reproduction_P Parameter: Treatment Value: Drought vs. No Drought
  misc_feature: MA Experiment ID: 20001911 Result: Up-regulated in Transcription
  misc_feature: MA Experiment 20001911 PARAMETER Experiment Name: At_Drought_Reproduction_P Parameter: Age (day) Value: 40
  misc_feature: MA Experiment 20001911 PARAMETER Experiment Name: At_Drought_Reproduction_P Parameter: Organism Value: A. thaliana
  misc_feature: MA Experiment 20001911 PARAMETER Experiment Name: At_Drought_Reproduction_P Parameter: Plant Line Value: WS
  misc_feature: MA Experiment 20001911 PARAMETER Experiment Name: At_Drought_Reproduction_P Parameter: Timepoint (day) Value: 10
  misc_feature: MA Experiment 20001911 PARAMETER Experiment Name: At_Drought_Reproduction_P Parameter: Tissue Value: Flowers
  misc_feature: MA Experiment 20001911 PARAMETER Experiment Name: At_Drought_Reproduction_P Parameter: Treatment Value: Drought vs. No Drought

SEQ ID NO: 31396 - protein, 340 aa, Arabidopsis thaliana; identical to SEQ ID NO: 27806
  peptide (1)..(340): Ceres Seq. ID no. 12580053
  misc_feature (72)..(169): Pfam Name: D-isomer specific 2-hydroxyacid dehydrogenase, Pfam Description: D-isomer specific 2-hydroxyacid dehydrogenase,
  misc_feature (56)..(300): Homolog of NCBI NO: 32405002 NR Description: FORMATE DEHYDROGENASE (NAD-DEPENDENT FORMATE
  misc_feature (60)..(299): Homolog of NCBI NO: 416574 NR Description: PROBABLE FORMATE DEHYDROGENASE (NAD-DEPENDENT
  misc_feature (60)..(299): Homolog of NCBI NO: 40738675 NR Description: FDH_EMENI Probable formate dehydrogenase
  misc_feature (18)..(300): Homolog of NCBI NO: 4572458 NR Description: NAD-dependent formate dehydrogenase
  misc_feature (45)..(309): Homolog of NCBI NO: 21263611 NR Description: Formate dehydrogenase, mitochondrial precursor
  misc_feature (45)..(309): Homolog of NCBI NO: 21263612 NR Description: Formate dehydrogenase, mitochondrial precursor
  misc_feature (45)..(309): Homolog of NCBI NO: 38636526 NR Description: formate dehydrogenase [Quercus robur]
  misc_feature (22)..(309): Homolog of NCBI NO: 542089 NR Description: formate dehydrogenase (EC 1.2.1.2) precursor,
  misc_feature (20)..(309): Homolog of NCBI NO: 26454627 NR Description: Formate dehydrogenase, mitochondrial precursor
  misc_feature (20)..(309): Homolog of NCBI NO: 15241492 NR Description: formate dehydrogenase (FDH)

SEQ ID NO: 31397 - protein, 321 aa, Arabidopsis thaliana; identical to SEQ ID NO: 27807
  peptide (1)..(321): Ceres Seq. ID no. 12580054
  misc_feature (53)..(150): Pfam Name: D-isomer specific 2-hydroxyacid dehydrogenase, Pfam Description: D-isomer specific 2-hydroxyacid dehydrogenase,
  misc_feature (37)..(281): Homolog of NCBI NO: 32405002 NR Description: FORMATE DEHYDROGENASE (NAD-DEPENDENT FORMATE
  misc_feature (41)..(280): Homolog of NCBI NO: 416574 NR Description: PROBABLE FORMATE DEHYDROGENASE (NAD-DEPENDENT
  misc_feature (41)..(280): Homolog of NCBI NO: 40738675 NR Description: FDH_EMENI Probable formate dehydrogenase
  misc_feature (1)..(281): Homolog of NCBI NO: 4572458 NR Description: NAD-dependent formate dehydrogenase
  misc_feature (26)..(290): Homolog of NCBI NO: 21263611 NR Description: Formate dehydrogenase, mitochondrial precursor
  misc_feature (26)..(290): Homolog of NCBI NO: 21263612 NR Description: Formate dehydrogenase, mitochondrial precursor
  misc_feature (26)..(290): Homolog of NCBI NO: 38636526 NR Description: formate dehydrogenase [Quercus robur]
  misc_feature (3)..(290): Homolog of NCBI NO: 542089 NR Description: formate dehydrogenase (EC 1.2.1.2) precursor,
  misc_feature (1)..(290): Homolog of NCBI NO: 26454627 NR Description: Formate dehydrogenase, mitochondrial precursor
  misc_feature (1)..(290): Homolog of NCBI NO: 15241492 NR Description: formate dehydrogenase (FDH)

SEQ ID NO: 31398 - protein, 319 aa, Arabidopsis thaliana; identical to SEQ ID NO: 27808
  peptide (1)..(319): Ceres Seq. ID no. 12580055
  misc_feature (51)..(148): Pfam Name: D-isomer specific 2-hydroxyacid dehydrogenase, Pfam Description: D-isomer specific 2-hydroxyacid dehydrogenase,
  misc_feature (35)..(279): Homolog of NCBI NO: 32405002 NR Description: FORMATE DEHYDROGENASE (NAD-DEPENDENT FORMATE
  misc_feature (39)..(278): Homolog of NCBI NO: 416574 NR Description: PROBABLE FORMATE DEHYDROGENASE (NAD-DEPENDENT
  misc_feature (39)..(278): Homolog of NCBI NO: 40738675 NR Description: FDH_EMENI Probable formate dehydrogenase
  misc_feature (1)..(279): Homolog of NCBI NO: 4572458 NR Description: NAD-dependent formate dehydrogenase
  misc_feature (24)..(288): Homolog of NCBI NO: 21263611 NR Description: Formate dehydrogenase, mitochondrial precursor
  misc_feature (24)..(288): Homolog of NCBI NO: 21263612 NR Description: Formate dehydrogenase, mitochondrial precursor
  misc_feature (24)..(288): Homolog of NCBI NO: 38636526 NR Description: formate dehydrogenase [Quercus robur]
  misc_feature (1)..(288): Homolog of NCBI NO: 542089 NR Description: formate dehydrogenase (EC 1.2.1.2) precursor,
  misc_feature (1)..(288): Homolog of NCBI NO: 26454627 NR Description: Formate dehydrogenase, mitochondrial precursor
  misc_feature (1)..(288): Homolog of NCBI NO: 15241492 NR Description: formate dehydrogenase (FDH)

SEQ ID NO: 31399 - DNA, 1159 bp, Arabidopsis thaliana; identical to SEQ ID NO: 27809
  misc_feature (1)..(1159): Ceres Seq. ID no. 13490301
  misc_feature: MA Experiment ID: 108434 Result: Up-regulated in Transcription
  misc_feature: MA Experiment 108434 PARAMETER Experiment Name: At_Root_Tips_cDNA_P Parameter: Tissue Value: Root Tips
  misc_feature: MA Experiment ID: 108464 Result: Down-regulated in Transcription
  misc_feature: MA Experiment 108464 PARAMETER Experiment Name: At_Germinating_Seeds_cDNA_P Parameter: Age (day) Value: 4 vs. 0
  misc_feature: MA Experiment 108464 PARAMETER Experiment Name: At_Germinating_Seeds_cDNA_P Parameter: Tissue Value: Germinating Seeds
  misc_feature: MA Experiment ID: 20000180 Result: Up-regulated in Transcription
  misc_feature: MA Experiment 20000180 PARAMETER Experiment Name: At_Germinating_Seeds_P Parameter: Age (hr) Value: 24 vs. 0
  misc_feature: MA Experiment 20000180 PARAMETER Experiment Name: At_Germinating_Seeds_P Parameter: Tissue Value: Germinating Seeds
  misc_feature: MA Experiment ID: 20000185 Result: Up-regulated in Transcription
  misc_feature: MA Experiment 20000185 PARAMETER Experiment Name: At_Roots__P Parameter: Age (day) Value: 7 vs. 21
  misc_feature: MA Experiment 20000185 PARAMETER Experiment Name: At_Roots__P Parameter: Organism Value: A. thaliana
  misc_feature: MA Experiment 20000185 PARAMETER Experiment Name: At_Roots__P Parameter: Tissue Value: Roots vs. Whole Plant
  misc_feature: MA Experiment ID: 20000234 Result: Up-regulated in Transcription
  misc_feature: MA Experiment 20000234 PARAMETER Experiment Name: At_Siliques_P Parameter: Age (day) Value: 21
  misc_feature: MA Experiment 20000234 PARAMETER Experiment Name: At_Siliques_P Parameter: Organism Value: A. thaliana
  misc_feature: MA Experiment 20000234 PARAMETER Experiment Name: At_Siliques_P Parameter: Plant Line Value: WS
  misc_feature: MA Experiment 20000234 PARAMETER Experiment Name: At_Siliques_P Parameter: Tissue Value: Less Than 5mm Siliques vs. Whole Plant
  misc_feature: MA Experiment ID: 20000235 Result: Up-regulated in Transcription
  misc_feature: MA Experiment 20000235 PARAMETER Experiment Name: At_Siliques_P Parameter: Age (day) Value: 21
  misc_feature: MA Experiment 20000235 PARAMETER Experiment Name: At_Siliques_P Parameter: Organism Value: A. thaliana
  misc_feature: MA Experiment 20000235 PARAMETER Experiment Name: At_Siliques_P Parameter: Plant Line Value: WS
  misc_feature: MA Experiment 20000235 PARAMETER Experiment Name: At_Siliques_P Parameter: Tissue Value: 5-10mm Siliques vs. Whole Plant
  misc_feature: MA Experiment ID: 20000264 Result: Up-regulated in Transcription
  misc_feature: MA Experiment 20000264 PARAMETER Experiment Name: At_Open_Flower_P Parameter: Age (day) Value: 21
  misc_feature: MA Experiment 20000264 PARAMETER Experiment Name: At_Open_Flower_P Parameter: Plant Line Value: WS
  misc_feature: MA Experiment 20000264 PARAMETER Experiment Name: At_Open_Flower_P Parameter: Tissue Value: Open Flower vs. Whole Plant
  misc_feature: MA Experiment ID: 20000265 Result: Up-regulated in Transcription
  misc_feature: MA Experiment 20000265 PARAMETER Experiment Name: At_Open_Flower_P Parameter: Age (day) Value: 21
  misc_feature: MA Experiment 20000265 PARAMETER Experiment Name: At_Open_Flower_P Parameter: Plant Line Value: WS
  misc_feature: MA Experiment 20000265 PARAMETER Experiment Name: At_Open_Flower_P Parameter: Tissue Value: Closed Flower vs. Whole Plant
  misc_feature: MA Experiment ID: 20000286 Result: Up-regulated in Transcription
  misc_feature: MA Experiment 20000286 PARAMETER Experiment Name: At_Open_Flower_P Parameter: Age (day) Value: 21
  misc_feature: MA Experiment 20000286 PARAMETER Experiment Name: At_Open_Flower_P Parameter: Plant Line Value: WS
  misc_feature: MA Experiment 20000286 PARAMETER Experiment Name: At_Open_Flower_P Parameter: Tissue Value: Half Open vs. Whole Plant
  misc_feature: MA Experiment ID: 20000438 Result: Up-regulated in Transcription
  misc_feature: MA Experiment 20000438 PARAMETER Experiment Name: At_Shoots__P Parameter: Age (day) Value: 14
  misc_feature: MA Experiment 20000438 PARAMETER Experiment Name: At_Shoots__P Parameter: Tissue Value: Shoots vs. Whole Plant
  misc_feature: MA Experiment ID: 20001247 Result: Down-regulated in Transcription
  misc_feature: MA Experiment 20001247 PARAMETER Experiment Name: At_Far-red-induction_P Parameter: Age (day) Value: 7
  misc_feature: MA Experiment 20001247 PARAMETER Experiment Name: At_Far-red-induction_P Parameter: Light Value: Far-red vs. White
  misc_feature: MA Experiment 20001247 PARAMETER Experiment Name: At_Far-red-induction_P Parameter: Organism Value: A. thaliana
  misc_feature: MA Experiment 20001247 PARAMETER Experiment Name: At_Far-red-induction_P Parameter: Plant Line Value: Columbia
  misc_feature: MA Experiment 20001247 PARAMETER Experiment Name: At_Far-red-induction_P Parameter: Timepoint (hr) Value: 1
  misc_feature: MA Experiment 20001247 PARAMETER Experiment Name: At_Far-red-induction_P Parameter: Tissue Value: Whole Plant
  misc_feature: MA Experiment ID: 20001248 Result: Down-regulated in Transcription
  misc_feature: MA Experiment 20001248 PARAMETER Experiment Name: At_Far-red-induction_P Parameter: Age (day) Value: 7
  misc_feature: MA Experiment 20001248 PARAMETER Experiment Name: At_Far-red-induction_P Parameter: Light Value: Far-red vs. White
  misc_feature: MA Experiment 20001248 PARAMETER Experiment Name: At_Far-red-induction_P Parameter: Organism Value: A. thaliana
  misc_feature: MA Experiment 20001248 PARAMETER Experiment Name: At_Far-red-induction_P Parameter: Plant Line Value: Columbia
  misc_feature: MA Experiment 20001248 PARAMETER Experiment Name: At_Far-red-induction_P Parameter: Timepoint (hr) Value: 4
  misc_feature: MA Experiment 20001248 PARAMETER Experiment Name: At_Far-red-induction_P Parameter: Tissue Value: Whole Plant
  misc_feature: MA Experiment ID: 20001451 Result: Down-regulated in Transcription
  misc_feature: MA Experiment 20001451 PARAMETER Experiment Name: At_Far-red-induction_P Parameter: Age (day) Value: 7
  misc_feature: MA Experiment 20001451 PARAMETER Experiment Name: At_Far-red-induction_P Parameter: Light Value: Far-red vs. White
  misc_feature: MA Experiment 20001451 PARAMETER Experiment Name: At_Far-red-induction_P Parameter: Organism Value: A. thaliana
  misc_feature: MA Experiment 20001451 PARAMETER Experiment Name: At_Far-red-induction_P Parameter: Plant Line Value: Columbia
  misc_feature: MA Experiment 20001451 PARAMETER Experiment Name: At_Far-red-induction_P Parameter: Timepoint (hr) Value: 24
  misc_feature: MA Experiment 20001451 PARAMETER Experiment Name: At_Far-red-induction_P Parameter: Tissue Value: Whole Plant
  misc_feature: MA Experiment ID: 20001555 Result: Down-regulated in Transcription
  misc_feature: MA Experiment 20001555 PARAMETER Experiment Name: At_Drought_Soil_Dry_P Parameter: Age (day) Value: 24
  misc_feature: MA Experiment 20001555 PARAMETER Experiment Name: At_Drought_Soil_Dry_P Parameter: Organism Value: A. thaliana
  misc_feature: MA Experiment 20001555 PARAMETER Experiment Name: At_Drought_Soil_Dry_P Parameter: Plant Line Value: WS
  misc_feature: MA Experiment 20001555 PARAMETER Experiment Name: At_Drought_Soil_Dry_P Parameter: Post Timepoint (hr) Value: None
  misc_feature: MA Experiment 20001555 PARAMETER Experiment Name: At_Drought_Soil_Dry_P Parameter: Post-Treatment Value: None
  misc_feature: MA Experiment 20001555 PARAMETER Experiment Name: At_Drought_Soil_Dry_P Parameter: Timepoint (day) Value: 10
  misc_feature: MA Experiment 20001555 PARAMETER Experiment Name: At_Drought_Soil_Dry_P Parameter: Treatment Value: Drought vs. No Drought
  misc_feature: MA Experiment ID: 20001560 Result: Up-regulated in Transcription
  misc_feature: MA Experiment 20001560 PARAMETER Experiment Name: At_Drought_Soil_Dry_P Parameter: Age (day) Value: 28
  misc_feature: MA Experiment 20001560 PARAMETER Experiment Name: At_Drought_Soil_Dry_P Parameter: Organism Value: A. thaliana
  misc_feature: MA Experiment 20001560 PARAMETER Experiment Name: At_Drought_Soil_Dry_P Parameter: Plant Line Value: WS
  misc_feature: MA Experiment 20001560 PARAMETER Experiment Name: At_Drought_Soil_Dry_P Parameter: Post Timepoint (hr) Value: None
  misc_feature: MA Experiment 20001560 PARAMETER Experiment Name: At_Drought_Soil_Dry_P Parameter: Post-Treatment Value: None
  misc_feature: MA Experiment 20001560 PARAMETER Experiment Name: At_Drought_Soil_Dry_P Parameter: Timepoint (day) Value: 14
  misc_feature: MA Experiment 20001560 PARAMETER Experiment Name: At_Drought_Soil_Dry_P Parameter: Treatment Value: Drought vs. No Drought
  misc_feature: MA Experiment ID: 20001905 Result: Up-regulated in Transcription
  misc_feature: MA Experiment 20001905 PARAMETER Experiment Name: At_Drought_Reproduction_P Parameter: Age (day) Value: 40
  misc_feature: MA Experiment 20001905 PARAMETER Experiment Name: At_Drought_Reproduction_P Parameter: Organism Value: A. thaliana
  misc_feature: MA Experiment 20001905 PARAMETER Experiment Name: At_Drought_Reproduction_P Parameter: Plant Line Value: WS
  misc_feature: MA Experiment 20001905 PARAMETER Experiment Name: At_Drought_Reproduction_P Parameter: Timepoint (day) Value: 10
  misc_feature: MA Experiment 20001905 PARAMETER Experiment Name: At_Drought_Reproduction_P Parameter: Tissue Value: Rosettes
  misc_feature: MA Experiment 20001905 PARAMETER Experiment Name: At_Drought_Reproduction_P Parameter: Treatment Value: Drought vs. No Drought
  misc_feature: MA Experiment ID: 20001911 Result: Down-regulated in Transcription
  misc_feature: MA Experiment 20001911 PARAMETER Experiment Name: At_Drought_Reproduction_P Parameter: Age (day) Value: 40
  misc_feature: MA Experiment 20001911 PARAMETER Experiment Name: At_Drought_Reproduction_P Parameter: Organism Value: A. thaliana
  misc_feature: MA Experiment 20001911 PARAMETER Experiment Name: At_Drought_Reproduction_P Parameter: Plant Line Value: WS
  misc_feature: MA Experiment 20001911 PARAMETER Experiment Name: At_Drought_Reproduction_P Parameter: Timepoint (day) Value: 10
  misc_feature: MA Experiment 20001911 PARAMETER Experiment Name: At_Drought_Reproduction_P Parameter: Tissue Value: Flowers
  misc_feature: MA Experiment 20001911 PARAMETER Experiment Name: At_Drought_Reproduction_P Parameter: Treatment Value: Drought vs. No Drought

SEQ ID NO: 31400 - protein, 303 aa, Arabidopsis thaliana; identical to SEQ ID NO: 27810
  peptide (1)..(303): Ceres Seq. ID no. 13490302
  misc_feature (97)..(172): Pfam Name: OB-fold nucleic acid binding domain Pfam Description: OB-fold nucleic acid binding domain
  misc_feature (26)..(302): Homolog of NCBI NO: 34871794 NR Description: p32-subunit of replication protein A [Rattus
  misc_feature (26)..(302): Homolog of NCBI NO: 2498847 NR Description: REPLICATION PROTEIN A 32 KD SUBUNIT (RP-A) (RF-A)
  misc_feature (25)..(299): Homolog of NCBI NO: 13516746 NR Description: replication protein A 30kDa
  misc_feature (25)..(299): Homolog of NCBI NO: 9801268 NR Description: replication protein A2 [Oryza sativa]
  misc_feature (31)..(299): Homolog of NCBI NO: 6728969 NR Description: putative replication factor A [Arabidopsis
  misc_feature (31)..(299): Homolog of NCBI NO: 18396383 NR Description: replication factor - related [Arabidopsis
  misc_feature (25)..(299): Homolog of NCBI NO: 31790111 NR Description: RPA 32kDa [Pisum sativum]
  misc_feature (226)..(303): Homolog of NCBI NO: 25347925 NR Description: probable replication protein A1 [imported] -
  misc_feature (25)..(222): Homolog of NCBI NO: 25347925 NR Description: probable replication protein A1 [imported] -
  misc_feature (25)..(303): Homolog of NCBI NO: 18400560 NR Description: replication protein, putative [Arabidopsis

SEQ ID NO: 31401 - protein, 279 aa, Arabidopsis thaliana; identical to SEQ ID NO: 27811
  peptide (1)..(279): Ceres Seq. ID no. 13490303
  misc_feature (73)..(148): Pfam Name: OB-fold nucleic acid binding domain Pfam Description: OB-fold nucleic acid binding domain
  misc_feature (2)..(278): Homolog of NCBI NO: 34871794 NR Description: p32-subunit of replication protein A [Rattus
  misc_feature (2)..(278): Homolog of NCBI NO: 2498847 NR Description: REPLICATION PROTEIN A 32 KD SUBUNIT (RP-A) (RF-A)
  misc_feature (1)..(275): Homolog of NCBI NO: 13516746 NR Description: replication protein A 30kDa
  misc_feature (1)..(275): Homolog of NCBI NO: 9801268 NR Description: replication protein A2 [Oryza sativa]
  misc_feature (7)..(275): Homolog of NCBI NO: 6728969 NR Description: putative replication factor A [Arabidopsis
  misc_feature (7)..(275): Homolog of NCBI NO: 18396383 NR Description: replication factor - related [Arabidopsis
  misc_feature (1)..(275): Homolog of NCBI NO: 31790111 NR Description: RPA 32kDa [Pisum sativum]
  misc_feature (202)..(279): Homolog of NCBI NO: 25347925 NR Description: probable replication protein A1 [imported] -
  misc_feature (1)..(198): Homolog of NCBI NO: 25347925 NR Description: probable replication protein A1 [imported] -
  misc_feature (1)..(279): Homolog of NCBI NO: 18400560 NR Description: replication protein, putative [Arabidopsis

SEQ ID NO: 31402 - protein, 261 aa, Arabidopsis thaliana; identical to SEQ ID NO: 27812
  peptide (1)..(261): Ceres Seq. ID no. 13490304
  misc_feature (55)..(130): Pfam Name: OB-fold nucleic acid binding domain Pfam Description: OB-fold nucleic acid binding domain
  misc_feature (1)..(260): Homolog of NCBI NO: 34871794 NR Description: p32-subunit of replication protein A [Rattus
  misc_feature (1)..(260): Homolog of NCBI NO: 2498847 NR Description: REPLICATION PROTEIN A 32 KD SUBUNIT (RP-A) (RF-A)
  misc_feature (1)..(257): Homolog of NCBI NO: 13516746 NR Description: replication protein A 30kDa
  misc_feature (1)..(257): Homolog of NCBI NO: 9801268 NR Description: replication protein A2 [Oryza sativa]
  misc_feature (1)..(257): Homolog of NCBI NO: 6728969 NR Description: putative replication factor A [Arabidopsis
  misc_feature (1)..(257): Homolog of NCBI NO: 18396383 NR Description: replication factor - related [Arabidopsis
  misc_feature (1)..(257): Homolog of NCBI NO: 31790111 NR Description: RPA 32kDa [Pisum sativum]
  misc_feature (184)..(261): Homolog of NCBI NO: 25347925 NR Description: probable replication protein A1 [imported] -
  misc_feature (1)..(180): Homolog of NCBI NO: 25347925 NR Description: probable replication protein A1 [imported] -
  misc_feature (1)..(261): Homolog of NCBI NO: 18400560 NR Description: replication protein, putative [Arabidopsis

SEQ ID NO: 31403 - DNA, 604 bp, Arabidopsis thaliana; identical to SEQ ID NO: 27813
  misc_feature (1)..(604): Ceres Seq. ID no. 12395010
  misc_feature: MA Experiment ID: 108573 Result: Down-regulated in Transcription
  misc_feature: MA Experiment 108573 PARAMETER Experiment Name: At_Drought_cDNA_P Parameter: Timepoint (hr) Value: 6
  misc_feature: MA Experiment 108573 PARAMETER Experiment Name: At_Drought_cDNA_P Parameter: Tissue Value: Aerial
  misc_feature: MA Experiment 108573 PARAMETER Experiment Name: At_Drought_cDNA_P Parameter: Treatment Value: Drought vs. No Drought
  misc_feature: MA Experiment ID: 108576 Result: Down-regulated in Transcription
  misc_feature: MA Experiment 108576 PARAMETER Experiment Name: At_42deg_Heat_cDNA_P Parameter: Temperature (deg C) Value: 42 vs. 22
  misc_feature: MA Experiment 108576 PARAMETER Experiment Name: At_42deg_Heat_cDNA_P Parameter: Timepoint (hr) Value: 1
  misc_feature: MA Experiment 108576 PARAMETER Experiment Name: At_42deg_Heat_cDNA_P Parameter: Tissue Value: Aerial
  misc_feature: MA Experiment ID: 108577 Result: Down-regulated in Transcription
  misc_feature: MA Experiment 108577 PARAMETER Experiment Name: At_42deg_Heat_cDNA_P Parameter: Temperature (deg C) Value: 42 vs. 22
  misc_feature: MA Experiment 108577 PARAMETER Experiment Name: At_42deg_Heat_cDNA_P Parameter: Timepoint (hr) Value: 6
  misc_feature: MA Experiment 108577 PARAMETER Experiment Name: At_42deg_Heat_cDNA_P Parameter: Tissue Value: Aerial
  misc_feature: MA Experiment ID: 20000093 Result: Down-regulated in Transcription
  misc_feature: MA Experiment 20000093 PARAMETER Experiment Name: At_42deg_Heat_cDNA_P Parameter: Temperature (deg C) Value: 42 vs. 22
  misc_feature: MA Experiment 20000093 PARAMETER Experiment Name: At_42deg_Heat_cDNA_P Parameter: Timepoint (hr) Value: 0.5
  misc_feature: MA Experiment 20000093 PARAMETER Experiment Name: At_42deg_Heat_cDNA_P Parameter: Tissue Value: Aerial
  misc_feature: MA Experiment ID: 20000111 Result: Down-regulated in Transcription
  misc_feature: MA Experiment 20000111 PARAMETER Experiment Name: At_42deg_Heat_cDNA_P Parameter: Temperature (deg C) Value: 42 vs. 22
  misc_feature: MA Experiment 20000111 PARAMETER Experiment Name: At_42deg_Heat_cDNA_P Parameter: Timepoint (hr) Value: 6
  misc_feature: MA Experiment 20000111 PARAMETER Experiment Name: At_42deg_Heat_cDNA_P Parameter: Tissue Value: Aerial
  misc_feature: MA Experiment ID: 20000113 Result: Down-regulated in Transcription
  misc_feature: MA Experiment 20000113 PARAMETER Experiment Name: At_42deg_Heat_cDNA_P Parameter: Temperature (deg C) Value: 42 vs. 22
  misc_feature: MA Experiment 20000113 PARAMETER Experiment Name: At_42deg_Heat_cDNA_P Parameter: Timepoint (hr) Value: 8
  misc_feature: MA Experiment 20000113 PARAMETER Experiment Name: At_42deg_Heat_cDNA_P Parameter: Tissue Value: Aerial
  misc_feature: MA Experiment ID: 20000144 Result: Down-regulated in Transcription
  misc_feature: MA Experiment 20000144 PARAMETER Experiment Name: At_42deg_Heat_cDNA_P Parameter: Temperature (deg C) Value: 42 vs. 22
  misc_feature: MA Experiment 20000144 PARAMETER Experiment Name: At_42deg_Heat_cDNA_P Parameter: Timepoint (hr) Value: 1
  misc_feature: MA Experiment 20000144 PARAMETER Experiment Name: At_42deg_Heat_cDNA_P Parameter: Tissue Value: Aerial
  misc_feature: MA Experiment ID: 20000224 Result: Down-regulated in Transcription
  misc_feature: MA Experiment ID: 20000495 Result: Down-regulated in Transcription
  misc_feature: MA Experiment 20000495 PARAMETER Experiment Name: At_Guard_Cells_P Parameter: Harvest Date Value: 8/2/2002
  misc_feature: MA Experiment 20000495 PARAMETER Experiment Name: At_Guard_Cells_P Parameter: Organism Value: A. thaliana
  misc_feature: MA Experiment 20000495 PARAMETER Experiment Name: At_Guard_Cells_P Parameter: Tissue Value: Guard Cells vs. Leaves
  misc_feature: MA Experiment ID: 20001451 Result: Down-regulated in Transcription
  misc_feature: MA Experiment 20001451 PARAMETER Experiment Name: At_Far-red-induction_P Parameter: Age (day) Value: 7
  misc_feature: MA Experiment 20001451 PARAMETER Experiment Name: At_Far-red-induction_P Parameter: Light Value: Far-red vs. White
  misc_feature: MA Experiment 20001451 PARAMETER Experiment Name: At_Far-red-induction_P Parameter: Organism Value: A. thaliana
  misc_feature: MA Experiment 20001451 PARAMETER Experiment Name: At_Far-red-induction_P Parameter: Plant Line Value: Columbia
  misc_feature: MA Experiment 20001451 PARAMETER Experiment Name: At_Far-red-induction_P Parameter: Timepoint (hr) Value: 24
  misc_feature: MA Experiment 20001451 PARAMETER Experiment Name: At_Far-red-induction_P Parameter: Tissue Value: Whole Plant

SEQ ID NO: 31404 - protein, 52 aa, Arabidopsis thaliana; identical to SEQ ID NO: 27814
  peptide (1)..(52): Ceres Seq. ID no. 12395011
  misc_feature (1)..(52): Homolog of NCBI NO: 37590121 NR Description: Hist1h4h protein [Mus musculus]
  misc_feature (1)..(52): Homolog of NCBI NO: 34858262 NR Description: similar to germinal histone H4 gene [Rattus
  misc_feature (1)..(52): Homolog of NCBI NO: 27692935 NR Description: Similar to germinal histone H4 gene [Mus musculus]
  misc_feature (1)..(52): Homolog of NCBI NO: 4504301 NR Description: H4 histone family, member A [Homo sapiens]
  misc_feature (1)..(52): Homolog of NCBI NO: 1806283 NR Description: Histone H4 homologue [Sesbania rostrata]
  misc_feature (1)..(52): Homolog of NCBI NO: 462243 NR Description: Histone H4
  misc_feature (1)..(52): Homolog of NCBI NO: 27692960 NR Description: Similar to germinal histone H4 gene [Mus musculus]
  misc_feature (1)..(52): Homolog of NCBI NO: 17540668 NR Description: Histone H4 family member [Caenorhabditis elegans]
  misc_feature (1)..(52): Homolog of NCBI NO: 15226944 NR Description: histone H4
  misc_feature (1)..(52): Homolog of NCBI NO: 34876368 NR Description: similar to germinal histone H4 gene [Rattus

SEQ ID NO: 31405 - protein, 49 aa, Arabidopsis thaliana; identical to SEQ ID NO: 27815
  peptide (1)..(49): Ceres Seq. ID no. 12395012

SEQ ID NO: 31406 - DNA, 1204 bp, Arabidopsis thaliana; identical to SEQ ID NO: 27816
  misc_feature (1)..(1204): Ceres Seq. ID no. 12384946
  misc_feature: MA Experiment ID: 20000171 Result: Up-regulated in Transcription
  misc_feature: MA Experiment 20000171 PARAMETER Experiment Name: At_42deg_Heat_P Parameter: Age (day) Value: 14
  misc_feature: MA Experiment 20000171 PARAMETER Experiment Name: At_42deg_Heat_P Parameter: Organism Value: A. thaliana
  misc_feature: MA Experiment 20000171 PARAMETER Experiment Name: At_42deg_Heat_P Parameter: Plant Line Value: WS
  misc_feature: MA Experiment 20000171 PARAMETER Experiment Name: At_42deg_Heat_P Parameter: Temperature (deg C) Value: 42 vs. 22
  misc_feature: MA Experiment 20000171 PARAMETER Experiment Name: At_42deg_Heat_P Parameter: Timepoint (hr) Value: 1
  misc_feature: MA Experiment 20000171 PARAMETER Experiment Name: At_42deg_Heat_P Parameter: Tissue Value: Aerial
  misc_feature: MA Experiment ID: 20000173 Result: Up-regulated in Transcription
  misc_feature: MA Experiment 20000173 PARAMETER Experiment Name: At_42deg_Heat_P Parameter: Age (day) Value: 14
  misc_feature: MA Experiment 20000173 PARAMETER Experiment Name: At_42deg_Heat_P Parameter: Organism Value: A. thaliana
  misc_feature: MA Experiment 20000173 PARAMETER Experiment Name: At_42deg_Heat_P Parameter: Plant Line Value: WS
  misc_feature: MA Experiment 20000173 PARAMETER Experiment Name: At_42deg_Heat_P Parameter: Temperature (deg C) Value: 42 vs. 22
  misc_feature: MA Experiment 20000173 PARAMETER Experiment Name: At_42deg_Heat_P Parameter: Timepoint (hr) Value: 6
  misc_feature: MA Experiment 20000173 PARAMETER Experiment Name: At_42deg_Heat_P Parameter: Tissue Value: Aerial
  misc_feature: MA Experiment ID: 20000185 Result: Up-regulated in Transcription
  misc_feature: MA Experiment 20000185 PARAMETER Experiment Name: At_Roots__P Parameter: Age (day) Value: 7 vs. 21
  misc_feature: MA Experiment 20000185 PARAMETER Experiment Name: At_Roots__P Parameter: Organism Value: A. thaliana
  misc_feature: MA Experiment 20000185 PARAMETER Experiment Name: At_Roots__P Parameter: Tissue Value: Roots vs. Whole Plant
  misc_feature: MA Experiment ID: 20000265 Result: Up-regulated in Transcription
  misc_feature: MA Experiment 20000265 PARAMETER Experiment Name: At_Open_Flower_P Parameter: Age (day) Value: 21
  misc_feature: MA Experiment 20000265 PARAMETER Experiment Name: At_Open_Flower_P Parameter: Plant Line Value: WS
  misc_feature: MA Experiment 20000265 PARAMETER Experiment Name: At_Open_Flower_P Parameter: Tissue Value: Closed Flower vs. Whole Plant
  misc_feature: MA Experiment ID: 20000437 Result: Up-regulated in Transcription
  misc_feature: MA Experiment 20000437 PARAMETER Experiment Name: At_Drought_P Parameter: Age (day) Value: 8
  misc_feature: MA Experiment 20000437 PARAMETER Experiment Name: At_Drought_P Parameter: Organism Value: A. thaliana
  misc_feature: MA Experiment 20000437 PARAMETER Experiment Name: At_Drought_P Parameter: Plant Line Value: WS
  misc_feature: MA Experiment 20000437 PARAMETER Experiment Name: At_Drought_P Parameter: Timepoint (hr) Value: 24
  misc_feature: MA Experiment 20000437 PARAMETER Experiment Name: At_Drought_P Parameter: Tissue Value: Whole Plant
  misc_feature: MA Experiment 20000437 PARAMETER Experiment Name: At_Drought_P Parameter: Treatment Value: Drought vs. No Drought
  misc_feature: MA Experiment ID: 20000794 Result: Up-regulated in Transcription
  misc_feature: MA Experiment 20000794 PARAMETER Experiment Name: At_Petals_P Parameter: Age (day) Value: 23-25 days
  misc_feature: MA Experiment 20000794 PARAMETER Experiment Name: At_Petals_P Parameter: Plant Line Value: WS
  misc_feature: MA Experiment 20000794 PARAMETER Experiment Name: At_Petals_P Parameter: Tissue Value: Petals vs. Whole plant
  misc_feature: MA Experiment ID: 20001248 Result: Down-regulated in Transcription
  misc_feature: MA Experiment 20001248 PARAMETER Experiment Name: At_Far-red-induction_P Parameter: Age (day) Value: 7
  misc_feature: MA Experiment 20001248 PARAMETER Experiment Name: At_Far-red-induction_P Parameter: Light Value: Far-red vs. White
  misc_feature: MA Experiment 20001248 PARAMETER Experiment Name: At_Far-red-induction_P Parameter: Organism Value: A. thaliana
  misc_feature: MA Experiment 20001248 PARAMETER Experiment Name: At_Far-red-induction_P Parameter: Plant Line Value: Columbia
  misc_feature: MA Experiment 20001248 PARAMETER Experiment Name: At_Far-red-induction_P Parameter: Timepoint (hr) Value: 4
  misc_feature: MA Experiment 20001248 PARAMETER Experiment Name: At_Far-red-induction_P Parameter: Tissue Value: Whole Plant
  misc_feature: MA Experiment ID: 20001559 Result: Up-regulated in Transcription
  misc_feature: MA Experiment 20001559 PARAMETER Experiment Name: At_Drought_Soil_Dry_P Parameter: Age (day) Value: 28
  misc_feature: MA Experiment 20001559 PARAMETER Experiment Name: At_Drought_Soil_Dry_P Parameter: Organism Value: A. thaliana
  misc_feature: MA Experiment 20001559 PARAMETER Experiment Name: At_Drought_Soil_Dry_P Parameter: Plant Line Value: WS
  misc_feature: MA Experiment 20001559 PARAMETER Experiment Name: At_Drought_Soil_Dry_P Parameter: Post Timepoint (hr) Value: 29
  misc_feature: MA Experiment 20001559 PARAMETER Experiment Name: At_Drought_Soil_Dry_P Parameter: Post-Treatment Value: Re-Water vs. No Drought
  misc_feature: MA Experiment 20001559 PARAMETER Experiment Name: At_Drought_Soil_Dry_P Parameter: Timepoint (day) Value: 14
  misc_feature: MA Experiment 20001559 PARAMETER Experiment Name: At_Drought_Soil_Dry_P Parameter: Treatment Value: Drought vs. No Drought
  misc_feature: MA Experiment ID: 20001757 Result: Down-regulated in Transcription
  misc_feature: MA Experiment 20001757 PARAMETER Experiment Name: At_50mM_NH4NO3_L-to-H_P Parameter: Timepoint (hr) Value: 6
  misc_feature: MA Experiment 20001757 PARAMETER Experiment Name: At_50mM_NH4NO3_L-to-H_P Parameter: Tissue Value: Leaf
  misc_feature: MA Experiment 20001757 PARAMETER Experiment Name: At_50mM_NH4NO3_L-to-H_P Parameter: Treatment Value: 50mM NH4NO3 vs 100mM Mannitol
  misc_feature: MA Experiment ID: 20001905 Result: Up-regulated in Transcription
  misc_feature: MA Experiment 20001905 PARAMETER Experiment Name: At_Drought_Reproduction_P Parameter: Age (day) Value: 40
  misc_feature: MA Experiment 20001905 PARAMETER Experiment Name: At_Drought_Reproduction_P Parameter: Organism Value: A. thaliana
  misc_feature: MA Experiment 20001905 PARAMETER Experiment Name: At_Drought_Reproduction_P Parameter: Plant Line Value: WS
  misc_feature: MA Experiment 20001905 PARAMETER Experiment Name: At_Drought_Reproduction_P Parameter: Timepoint (day) Value: 10
  misc_feature: MA Experiment 20001905 PARAMETER Experiment Name: At_Drought_Reproduction_P Parameter: Tissue Value: Rosettes
  misc_feature: MA Experiment 20001905 PARAMETER Experiment Name: At_Drought_Reproduction_P Parameter: Treatment Value: Drought vs. No Drought
  misc_feature: MA Experiment ID: 20001911 Result: Up-regulated in Transcription
  misc_feature: MA Experiment 20001911 PARAMETER Experiment Name: At_Drought_Reproduction_P Parameter: Age (day) Value: 40
  misc_feature: MA Experiment 20001911 PARAMETER Experiment Name: At_Drought_Reproduction_P Parameter: Organism Value: A. thaliana
  misc_feature: MA Experiment 20001911 PARAMETER Experiment Name: At_Drought_Reproduction_P Parameter: Plant Line Value: WS
  misc_feature: MA Experiment 20001911 PARAMETER Experiment Name: At_Drought_Reproduction_P Parameter: Timepoint (day) Value: 10
  misc_feature: MA Experiment 20001911 PARAMETER Experiment Name: At_Drought_Reproduction_P Parameter: Tissue Value: Flowers
  misc_feature: MA Experiment 20001911 PARAMETER Experiment Name: At_Drought_Reproduction_P Parameter: Treatment Value: Drought vs. No Drought

SEQ ID NO: 31407 - protein, 268 aa, Arabidopsis thaliana; identical to SEQ ID NO: 27817
  peptide (1)..(268): Ceres Seq. ID no. 12384947
  misc_feature (9)..(77): Pfam Name: RNA recognition motif. (a.k.a. RRM, RBD, or RNP domain) Pfam Description: RNA recognition motif. (a.k.a. RRM, RBD, or RNP
  misc_feature (1)..(261): Homolog of NCBI NO: 33146854 NR Description: putative pre-mRNA splicing factor SF2
  misc_feature (1)..(256): Homolog of NCBI NO: 30678395 NR Description: pre-mRNA splicing factor SF2 (SR1 protein)
  misc_feature (1)..(256): Homolog of NCBI NO: 2443473 NR Description: ASF/SF2 homolog [Arabidopsis thaliana]
  misc_feature (1)..(265): Homolog of NCBI NO: 5815235 NR Description: splicing factor SR1 [Arabidopsis thaliana]
  misc_feature (1)..(265): Homolog of NCBI NO: 30678391 NR Description: pre-mRNA splicing factor SF2 (SR1 protein)
  misc_feature (62)..(268): Homolog of NCBI NO: 21954085 NR Description: putative SF2/ASF splicing modulator Srp30 protein
  misc_feature (1)..(218): Homolog of NCBI NO: 25386570 NR Description: hypothetical protein [imported] - Arabidopsis
  misc_feature (1)..(248): Homolog of NCBI NO: 4775271 NR Description: SF2/ASF-like splicing modulator Srp30, variant 1
  misc_feature (1)..(265): Homolog of NCBI NO: 22329428 NR Description: arginine/serine-rich splicing factor, atSRp30
  misc_feature (1)..(268): Homolog of NCBI NO: 4775270 NR Description: SF2/ASF-like splicing modulator Srp30

SEQ ID NO: 31408 - protein, 140 aa, Arabidopsis thaliana; identical to SEQ ID NO: 27818
  peptide (1)..(140): Ceres Seq. ID no. 12384948
  misc_feature (1)..(133): Homolog of NCBI NO: 33146854 NR Description: putative pre-mRNA splicing factor SF2
  misc_feature (1)..(128): Homolog of NCBI NO: 30678395 NR Description: pre-mRNA splicing factor SF2 (SR1 protein)
  misc_feature (1)..(128): Homolog of NCBI NO: 2443473 NR Description: ASF/SF2 homolog [Arabidopsis thaliana]
  misc_feature (1)..(137): Homolog of NCBI NO: 5815235 NR Description: splicing factor SR1 [Arabidopsis thaliana]
  misc_feature (1)..(137): Homolog of NCBI NO: 30678391 NR Description: pre-mRNA splicing factor SF2 (SR1 protein)
  misc_feature (1)..(140): Homolog of NCBI NO: 21954085 NR Description: putative SF2/ASF splicing modulator Srp30 protein
  misc_feature (1)..(90): Homolog of NCBI NO: 25386570 NR Description: hypothetical protein [imported] - Arabidopsis
  misc_feature (1)..(120): Homolog of NCBI NO: 4775271 NR Description: SF2/ASF-like splicing modulator Srp30, variant 1
  misc_feature (1)..(137): Homolog of NCBI NO: 22329428 NR Description: arginine/serine-rich splicing factor, atSRp30
  misc_feature (1)..(140): Homolog of NCBI NO: 4775270 NR Description: SF2/ASF-like splicing modulator Srp30

SEQ ID NO: 31409 - DNA, 1164 bp, Arabidopsis thaliana; identical to SEQ ID NO: 27819
  misc_feature (1)..(1164): Ceres Seq. ID no. 12421667
  misc_feature: MA Experiment ID: 108595 Result: Down-regulated in Transcription
  misc_feature: MA Experiment 108595 PARAMETER Experiment Name: At_Ler-pi_Ovule_cDNA_P Parameter: Plant Line Value: null
  misc_feature: MA Experiment ID: 20000224 Result: Down-regulated in Transcription

SEQ ID NO: 31410 - protein, 139 aa, Arabidopsis thaliana; identical to SEQ ID NO: 27820
  peptide (1)..(139): Ceres Seq. ID no. 12421668
  misc_feature (7)..(122): Homolog of NCBI NO: 34895618 NR Description: putative sterol-C5(6)-desaturase
  misc_feature (7)..(122): Homolog of NCBI NO: 4426627 NR Description: sterol-C5(6)-desaturase homolog [Nicotiana
  misc_feature (7)..(122): Homolog of NCBI NO: 33301670 NR Description: Delta-7-sterol-C5(6)-desaturase (Delta-7-C-5
  misc_feature (1)..(123): Homolog of NCBI NO: 15232937 NR Description: putative sterol-C5-desaturase; protein id:
  misc_feature (1)..(123): Homolog of NCBI NO: 2129741 NR Description: C-5 sterol desaturase (EC 1.-.-.-) - Arabidopsis
  misc_feature (1)..(123): Homolog of NCBI NO: 5031219 NR Description: delta7 sterol C-5 desaturase [Arabidopsis
  misc_feature (1)..(123): Homolog of NCBI NO: 21594971 NR Description: sterol-C5-desaturase [Arabidopsis thaliana]
  misc_feature (1)..(123): Homolog of NCBI NO: 15232935 NR Description: sterol-C5-desaturase

SEQ ID NO: 31411 - protein, 136 aa, Arabidopsis thaliana; identical to SEQ ID NO: 27821
  peptide (1)..(136): Ceres Seq. ID no. 12421669
  misc_feature (1)..(134): Homolog of NCBI NO: 25742651 NR Description: sterol-C5-desaturase (fungal ERG3,
  misc_feature (1)..(32): Homolog of NCBI NO: 34895618 NR Description: putative sterol-C5(6)-desaturase
  misc_feature (67)..(126): Homolog of NCBI NO: 34895618 NR Description: putative sterol-C5(6)-desaturase
  misc_feature (1)..(125): Homolog of NCBI NO: 4426627 NR Description: sterol-C5(6)-desaturase homolog [Nicotiana
  misc_feature (1)..(129): Homolog of NCBI NO: 33301670 NR Description: Delta-7-sterol-C5(6)-desaturase (Delta-7-C-5
  misc_feature (1)..(136): Homolog of NCBI NO: 15232937 NR Description: putative sterol-C5-desaturase; protein id:
  misc_feature (1)..(136): Homolog of NCBI NO: 2129741 NR Description: C-5 sterol desaturase (EC 1.-.-.-) - Arabidopsis
  misc_feature (1)..(136): Homolog of NCBI NO: 5031219 NR Description: delta7 sterol C-5 desaturase [Arabidopsis
  misc_feature (1)..(136): Homolog of NCBI NO: 21594971 NR Description: sterol-C5-desaturase [Arabidopsis thaliana]
  misc_feature (1)..(136): Homolog of NCBI NO: 15232935 NR Description: sterol-C5-desaturase

SEQ ID NO: 31412 - protein, 131 aa, Arabidopsis thaliana; identical to SEQ ID NO: 27822
  peptide (1)..(131): Ceres Seq. ID no. 12421670
  misc_feature (1)..(114): Homolog of NCBI NO: 34895618 NR Description: putative sterol-C5(6)-desaturase
  misc_feature (1)..(114): Homolog of NCBI NO: 4426627 NR Description: sterol-C5(6)-desaturase homolog [Nicotiana
  misc_feature (1)..(114): Homolog of NCBI NO: 33301670 NR Description: Delta-7-sterol-C5(6)-desaturase (Delta-7-C-5
  misc_feature (1)..(115): Homolog of NCBI NO: 15232937 NR Description: putative sterol-C5-desaturase; protein id:
  misc_feature (1)..(115): Homolog of NCBI NO: 2129741 NR Description: C-5 sterol desaturase (EC 1.-.-.-) - Arabidopsis
  misc_feature (1)..(115): Homolog of NCBI NO: 5031219 NR Description: delta7 sterol C-5 desaturase [Arabidopsis
  misc_feature (1)..(115): Homolog of NCBI NO: 21594971 NR Description: sterol-C5-desaturase [Arabidopsis thaliana]
  misc_feature (1)..(115): Homolog of NCBI NO: 15232935 NR Description: sterol-C5-desaturase

SEQ ID NO: 31413 - DNA, 1598 bp, Arabidopsis thaliana; identical to SEQ ID NO: 27823
  misc_feature (1)..(1598): Ceres Seq. ID no. 12738448
  misc_feature: MA Experiment ID: 108462 Result: Down-regulated in Transcription
  misc_feature: MA Experiment 108462 PARAMETER Experiment Name: At_Germinating_Seeds_cDNA_P Parameter: Age (day) Value: 2 vs. 0
  misc_feature: MA Experiment 108462 PARAMETER Experiment Name: At_Germinating_Seeds_cDNA_P Parameter: Tissue Value: Germinating Seeds
  misc_feature: MA Experiment ID: 108463 Result: Down-regulated in Transcription
  misc_feature: MA Experiment 108463 PARAMETER Experiment Name: At_Germinating_Seeds_cDNA_P Parameter: Age (day) Value: 3 vs. 0
  misc_feature: MA Experiment 108463 PARAMETER Experiment Name: At_Germinating_Seeds_cDNA_P Parameter: Tissue Value: Germinating Seeds
  misc_feature: MA Experiment ID: 108464 Result: Down-regulated in Transcription
  misc_feature: MA Experiment 108464 PARAMETER Experiment Name: At_Germinating_Seeds_cDNA_P Parameter: Age (day) Value: 4 vs. 0
  misc_feature: MA Experiment 108464 PARAMETER Experiment Name: At_Germinating_Seeds_cDNA_P Parameter: Tissue Value: Germinating Seeds
  misc_feature: MA Experiment ID: 108488 Result: Up-regulated in Transcription
  misc_feature: MA Experiment ID: 108579 Result: Up-regulated in Transcription
  misc_feature: MA Experiment 108579 PARAMETER Experiment Name: At_4deg_Cold_cDNA_P Parameter: Temperature (deg C) Value: 4 vs. 22
  misc_feature: MA Experiment 108579 PARAMETER Experiment Name: At_4deg_Cold_cDNA_P Parameter: Timepoint (hr) Value: 6
  misc_feature: MA Experiment 108579 PARAMETER Experiment Name: At_4deg_Cold_cDNA_P Parameter: Tissue Value: Aerial
  misc_feature: MA Experiment ID: 20000112 Result: Down-regulated in Transcription
  misc_feature: MA Experiment 20000112 PARAMETER Experiment Name: At_42deg_Heat_cDNA_P Parameter: Temperature (deg C) Value: 42 vs. 22
  misc_feature: MA Experiment 20000112 PARAMETER Experiment Name: At_42deg_Heat_cDNA_P Parameter: Timepoint (hr) Value: 2
  misc_feature: MA Experiment 20000112 PARAMETER Experiment Name: At_42deg_Heat_cDNA_P Parameter: Tissue Value: Aerial
  misc_feature: MA Experiment ID: 20000113 Result: Down-regulated in Transcription
  misc_feature: MA Experiment 20000113 PARAMETER Experiment Name: At_42deg_Heat_cDNA_P Parameter: Temperature (deg C) Value: 42 vs. 22
  misc_feature: MA Experiment 20000113 PARAMETER Experiment Name: At_42deg_Heat_cDNA_P Parameter: Timepoint (hr) Value: 8
  misc_feature: MA Experiment 20000113 PARAMETER Experiment Name: At_42deg_Heat_cDNA_P Parameter: Tissue Value: Aerial
  misc_feature: MA Experiment ID: 20000144 Result: Down-regulated in Transcription
  misc_feature: MA Experiment 20000144 PARAMETER Experiment Name: At_42deg_Heat_cDNA_P Parameter: Temperature (deg C) Value: 42 vs. 22
  misc_feature: MA Experiment 20000144 PARAMETER Experiment Name: At_42deg_Heat_cDNA_P Parameter: Timepoint (hr) Value: 1
  misc_feature: MA Experiment 20000144 PARAMETER Experiment Name: At_42deg_Heat_cDNA_P Parameter: Tissue Value: Aerial
  misc_feature: MA Experiment ID: 20000171 Result: Down-regulated in Transcription
  misc_feature: MA Experiment 20000171 PARAMETER Experiment Name: At_42deg_Heat_P Parameter: Age (day) Value: 14
  misc_feature: MA Experiment 20000171 PARAMETER Experiment Name: At_42deg_Heat_P Parameter: Organism Value: A. thaliana
  misc_feature: MA Experiment 20000171 PARAMETER Experiment Name: At_42deg_Heat_P Parameter: Plant Line Value: WS
  misc_feature: MA Experiment 20000171 PARAMETER Experiment Name: At_42deg_Heat_P Parameter: Temperature (deg C) Value: 42 vs. 22
  misc_feature: MA Experiment 20000171 PARAMETER Experiment Name: At_42deg_Heat_P Parameter: Timepoint (hr) Value: 1
  misc_feature: MA Experiment 20000171 PARAMETER Experiment Name: At_42deg_Heat_P Parameter: Tissue Value: Aerial
  misc_feature: MA Experiment ID: 20000173 Result: Down-regulated in Transcription
  misc_feature: MA Experiment 20000173 PARAMETER Experiment Name: At_42deg_Heat_P Parameter: Age (day) Value: 14
  misc_feature: MA Experiment 20000173 PARAMETER Experiment Name: At_42deg_Heat_P Parameter: Organism Value: A. thaliana
  misc_feature: MA Experiment 20000173 PARAMETER Experiment Name: At_42deg_Heat_P Parameter: Plant Line Value: WS
  misc_feature: MA Experiment 20000173 PARAMETER Experiment Name: At_42deg_Heat_P Parameter: Temperature (deg C) Value: 42 vs. 22
  misc_feature: MA Experiment 20000173 PARAMETER Experiment Name: At_42deg_Heat_P Parameter: Timepoint (hr) Value: 6
  misc_feature: MA Experiment 20000173 PARAMETER Experiment Name: At_42deg_Heat_P Parameter: Tissue Value: Aerial
  misc_feature: MA Experiment ID: 20000185 Result: Down-regulated in Transcription
  misc_feature: MA Experiment 20000185 PARAMETER Experiment Name: At_Roots__P Parameter: Age (day) Value: 7 vs. 21
  misc_feature: MA Experiment 20000185 PARAMETER Experiment Name: At_Roots__P Parameter: Organism Value: A. thaliana
  misc_feature: MA Experiment 20000185 PARAMETER Experiment Name: At_Roots__P Parameter: Tissue Value: Roots vs. Whole Plant
  misc_feature: MA Experiment ID: 20000213 Result: Up-regulated in Transcription
  misc_feature: MA Experiment 20000213 PARAMETER Experiment Name: At_4deg_Cold_P Parameter: Timepoint (hr) Value: 2
  misc_feature: MA Experiment ID: 20000224 Result: Down-regulated in Transcription
  misc_feature: MA Experiment ID: 20000227 Result: Down-regulated in Transcription
  misc_feature: MA Experiment 20000227 PARAMETER Experiment Name: At_Root-Tips-vs-Tops_P Parameter: Tissue Value: Root Tips vs. Root Tops
  misc_feature: MA Experiment ID: 20000234 Result: Up-regulated in Transcription
  misc_feature: MA Experiment 20000234 PARAMETER Experiment Name: At_Siliques_P Parameter: Age (day) Value: 21
  misc_feature: MA Experiment 20000234 PARAMETER Experiment Name: At_Siliques_P Parameter: Organism Value: A. thaliana
  misc_feature: MA Experiment 20000234 PARAMETER Experiment Name: At_Siliques_P Parameter: Plant Line Value: WS
  misc_feature: MA Experiment 20000234 PARAMETER Experiment Name: At_Siliques_P Parameter: Tissue Value: Less Than 5mm Siliques vs. Whole Plant
  misc_feature: MA Experiment ID: 20000264 Result: Up-regulated in Transcription
  misc_feature: MA Experiment 20000264 PARAMETER Experiment Name: At_Open_Flower_P Parameter: Age (day) Value: 21
  misc_feature: MA Experiment 20000264 PARAMETER Experiment Name: At_Open_Flower_P Parameter: Plant Line Value: WS
  misc_feature: MA Experiment 20000264 PARAMETER Experiment Name: At_Open_Flower_P Parameter: Tissue Value: Open Flower vs. Whole Plant
  misc_feature: MA Experiment ID: 20000265 Result: Up-regulated in Transcription
  misc_feature: MA Experiment 20000265 PARAMETER Experiment Name: At_Open_Flower_P Parameter: Age (day) Value: 21
  misc_feature: MA Experiment 20000265 PARAMETER Experiment Name: At_Open_Flower_P Parameter: Plant Line Value: WS
  misc_feature: MA Experiment 20000265 PARAMETER Experiment Name: At_Open_Flower_P Parameter: Tissue Value: Closed Flower vs. Whole Plant
  misc_feature: MA Experiment ID: 20000286 Result: Up-regulated in Transcription
  misc_feature: MA Experiment 20000286 PARAMETER Experiment Name: At_Open_Flower_P Parameter: Age (day) Value: 21
  misc_feature: MA Experiment 20000286 PARAMETER Experiment Name: At_Open_Flower_P Parameter: Plant Line Value: WS
  misc_feature: MA Experiment 20000286 PARAMETER Experiment Name: At_Open_Flower_P Parameter: Tissue Value: Half Open vs. Whole Plant
  misc_feature: MA Experiment ID: 20000327 Result: Down-regulated in Transcription
  misc_feature: MA Experiment 20000327 PARAMETER Experiment Name: At_42deg_Heat_Sub_P Parameter: Age (day) Value: 14
  misc_feature: MA Experiment 20000327 PARAMETER Experiment Name: At_42deg_Heat_Sub_P Parameter: Organism Value: A. thaliana
  misc_feature: MA Experiment 20000327 PARAMETER Experiment Name: At_42deg_Heat_Sub_P Parameter: Plant Line Value: WS
  misc_feature: MA Experiment 20000327 PARAMETER Experiment Name: At_42deg_Heat_Sub_P Parameter: Temperature (deg C) Value: 42 vs. 22
  misc_feature: MA Experiment 20000327 PARAMETER Experiment Name: At_42deg_Heat_Sub_P Parameter: Timepoint (hr) Value: 1
  misc_feature: MA Experiment 20000327 PARAMETER Experiment Name: At_42deg_Heat_Sub_P Parameter: Tissue Value: Aerial
  misc_feature: MA Experiment ID: 20000328 Result: Down-regulated in Transcription
  misc_feature: MA Experiment 20000328 PARAMETER Experiment Name: At_42deg_Heat_Sub_P Parameter: Age (day) Value: 14
  misc_feature: MA Experiment 20000328 PARAMETER Experiment Name: At_42deg_Heat_Sub_P Parameter: Organism Value: A. thaliana
  misc_feature: MA Experiment 20000328 PARAMETER Experiment Name: At_42deg_Heat_Sub_P Parameter: Plant Line Value: WS
  misc_feature: MA Experiment 20000328 PARAMETER Experiment Name: At_42deg_Heat_Sub_P Parameter: Temperature (deg C) Value: 42 vs. 22
  misc_feature: MA Experiment 20000328 PARAMETER Experiment Name: At_42deg_Heat_Sub_P Parameter: Timepoint (hr) Value: 6
  misc_feature: MA Experiment 20000328 PARAMETER Experiment Name: At_42deg_Heat_Sub_P Parameter: Tissue Value: Aerial
  misc_feature: MA Experiment ID: 20000329 Result: Up-regulated in Transcription
  misc_feature: MA Experiment 20000329 PARAMETER Experiment Name: At_4deg_Cold_Sub_P Parameter: Age (day) Value: 14
  misc_feature: MA Experiment 20000329 PARAMETER Experiment Name: At_4deg_Cold_Sub_P Parameter: Organism Value: A. thaliana
  misc_feature: MA Experiment 20000329 PARAMETER Experiment Name: At_4deg_Cold_Sub_P Parameter: Plant Line Value: WS
  misc_feature: MA Experiment 20000329 PARAMETER Experiment Name: At_4deg_Cold_Sub_P Parameter: Temperature (deg C) Value: 4 vs. 22
  misc_feature: MA Experiment 20000329 PARAMETER Experiment Name: At_4deg_Cold_Sub_P Parameter: Timepoint (hr) Value: 6
  misc_feature: MA Experiment 20000329 PARAMETER Experiment Name: At_4deg_Cold_Sub_P Parameter: Tissue Value: Aerial
  misc_feature: MA Experiment ID: 20000332 Result: Up-regulated in Transcription
  misc_feature: MA Experiment 20000332 PARAMETER Experiment Name: At_4deg_Cold_Sub_P Parameter: Age (day) Value: 14
  misc_feature: MA Experiment 20000332 PARAMETER Experiment Name: At_4deg_Cold_Sub_P Parameter: Organism Value: A. thaliana
  misc_feature: MA Experiment 20000332 PARAMETER Experiment Name: At_4deg_Cold_Sub_P Parameter: Plant Line Value: WS
  misc_feature: MA Experiment 20000332 PARAMETER Experiment Name: At_4deg_Cold_Sub_P Parameter: Temperature (deg C) Value: 4 vs. 22
  misc_feature: MA Experiment 20000332 PARAMETER Experiment Name: At_4deg_Cold_Sub_P Parameter: Timepoint (hr) Value: 2
  misc_feature: MA Experiment 20000332 PARAMETER Experiment Name: At_4deg_Cold_Sub_P Parameter: Tissue Value: Aerial
  misc_feature: MA Experiment ID: 20000349 Result: Down-regulated in Transcription
  misc_feature: MA Experiment 20000349 PARAMETER Experiment Name: At_100uM_ABA_Sub_P Parameter: Age (day) Value: 14
  misc_feature: MA Experiment 20000349 PARAMETER Experiment Name: At_100uM_ABA_Sub_P Parameter: Organism Value: A. thaliana
  misc_feature: MA Experiment 20000349 PARAMETER Experiment Name: At_100uM_ABA_Sub_P Parameter: Plant Line Value: WS
  misc_feature: MA Experiment 20000349 PARAMETER Experiment Name: At_100uM_ABA_Sub_P Parameter: Timepoint (hr) Value: 6
  misc_feature: MA Experiment 20000349 PARAMETER Experiment Name: At_100uM_ABA_Sub_P Parameter: Tissue Value: Aerial
  misc_feature: MA Experiment 20000349 PARAMETER Experiment Name: At_100uM_ABA_Sub_P Parameter: Treatment Value: 100uM ABA vs. No Treatment
  misc_feature: MA Experiment ID: 20000355 Result: Up-regulated in Transcription
  misc_feature: MA Experiment 20000355 PARAMETER Experiment Name: At_Siliques_Sub_P Parameter: Age (day) Value: 21
  misc_feature: MA Experiment 20000355 PARAMETER Experiment Name: At_Siliques_Sub_P Parameter: Organism Value: A. thaliana
  misc_feature: MA Experiment 20000355 PARAMETER Experiment Name: At_Siliques_Sub_P Parameter: Plant Line Value: WS
  misc_feature: MA Experiment 20000355 PARAMETER Experiment Name: At_Siliques_Sub_P Parameter: Tissue Value: Less Than 5mm Siliques vs. Whole Plant
  misc_feature: MA Experiment ID: 20000437 Result: Down-regulated in Transcription
  misc_feature: MA Experiment 20000437 PARAMETER Experiment Name: At_Drought_P Parameter: Age (day) Value: 8
  misc_feature: MA Experiment 20000437 PARAMETER Experiment Name: At_Drought_P Parameter: Organism Value: A. thaliana
  misc_feature: MA Experiment 20000437 PARAMETER Experiment Name: At_Drought_P Parameter: Plant Line Value: WS
  misc_feature: MA Experiment 20000437 PARAMETER Experiment Name: At_Drought_P Parameter: Timepoint (hr) Value: 24
  misc_feature: MA Experiment 20000437 PARAMETER Experiment Name: At_Drought_P Parameter: Tissue Value: Whole Plant
  misc_feature: MA Experiment 20000437 PARAMETER Experiment Name: At_Drought_P Parameter: Treatment Value: Drought vs. No Drought
  misc_feature: MA Experiment ID: 20000440 Result: Up-regulated in Transcription
  misc_feature: MA Experiment 20000440 PARAMETER Experiment Name: At_Closed-Flower__Sub_P Parameter: Tissue Value: Closed Flower vs. Whole Plant
  misc_feature: MA Experiment ID: 20001554 Result: Down-regulated in Transcription
  misc_feature: MA Experiment 20001554 PARAMETER Experiment Name: At_Drought_Soil_Dry_P Parameter: Age (day) Value: 21
  misc_feature: MA Experiment 20001554 PARAMETER Experiment Name: At_Drought_Soil_Dry_P Parameter: Organism Value: A. thaliana
  misc_feature: MA Experiment 20001554 PARAMETER Experiment Name: At_Drought_Soil_Dry_P Parameter: Plant Line Value: WS
  misc_feature: MA Experiment 20001554 PARAMETER Experiment Name: At_Drought_Soil_Dry_P Parameter: Post Timepoint (hr) Value: None
  misc_feature: MA Experiment 20001554 PARAMETER Experiment Name: At_Drought_Soil_Dry_P Parameter: Post-Treatment Value: None
  misc_feature: MA Experiment 20001554 PARAMETER Experiment Name: At_Drought_Soil_Dry_P Parameter: Timepoint (day) Value: 7
  misc_feature: MA Experiment 20001554 PARAMETER Experiment Name: At_Drought_Soil_Dry_P Parameter: Treatment Value: Drought vs. No Drought
  misc_feature: MA Experiment ID: 20001555 Result: Down-regulated in Transcription
  misc_feature: MA Experiment 20001555 PARAMETER Experiment Name: At_Drought_Soil_Dry_P Parameter: Age (day) Value: 24
  misc_feature: MA Experiment 20001555 PARAMETER Experiment Name: At_Drought_Soil_Dry_P Parameter: Organism Value: A. thaliana
  misc_feature: MA Experiment 20001555 PARAMETER Experiment Name: At_Drought_Soil_Dry_P Parameter: Plant Line Value: WS
  misc_feature: MA Experiment 20001555 PARAMETER Experiment Name: At_Drought_Soil_Dry_P Parameter: Post Timepoint (hr) Value: None
  misc_feature: MA Experiment 20001555 PARAMETER Experiment Name: At_Drought_Soil_Dry_P Parameter: Post-Treatment Value: None
  misc_feature: MA Experiment 20001555 PARAMETER Experiment Name: At_Drought_Soil_Dry_P Parameter: Timepoint (day) Value: 10
  misc_feature: MA Experiment 20001555 PARAMETER Experiment Name: At_Drought_Soil_Dry_P Parameter: Treatment Value: Drought vs. No Drought
  misc_feature: MA Experiment ID: 20001557 Result: Up-regulated in Transcription
  misc_feature: MA Experiment 20001557 PARAMETER Experiment Name: At_Drought_Soil_Dry_P Parameter: Age (day) Value: 27
  misc_feature: MA Experiment 20001557 PARAMETER Experiment Name: At_Drought_Soil_Dry_P Parameter: Organism Value: A. thaliana
  misc_feature: MA Experiment 20001557 PARAMETER Experiment Name: At_Drought_Soil_Dry_P Parameter: Plant Line Value: WS
  misc_feature: MA Experiment 20001557 PARAMETER Experiment Name: At_Drought_Soil_Dry_P Parameter: Post Timepoint (hr) Value: 3
  misc_feature: MA Experiment 20001557 PARAMETER Experiment Name: At_Drought_Soil_Dry_P Parameter: Post-Treatment Value: Re-Water vs. No Drought
  misc_feature: MA Experiment 20001557 PARAMETER Experiment Name: At_Drought_Soil_Dry_P Parameter: Timepoint (day) Value: 13
  misc_feature: MA Experiment 20001557 PARAMETER Experiment Name: At_Drought_Soil_Dry_P Parameter: Treatment Value: Drought vs. No Drought
  misc_feature: MA Experiment ID: 20001558 Result: Up-regulated in Transcription
  misc_feature: MA Experiment 20001558 PARAMETER Experiment Name: At_Drought_Soil_Dry_P Parameter: Age (day) Value: 27
  misc_feature: MA Experiment 20001558 PARAMETER Experiment Name: At_Drought_Soil_Dry_P Parameter: Organism Value: A. thaliana
  misc_feature: MA Experiment 20001558 PARAMETER Experiment Name: At_Drought_Soil_Dry_P Parameter: Plant Line Value: WS
  misc_feature: MA Experiment 20001558 PARAMETER Experiment Name: At_Drought_Soil_Dry_P Parameter: Post Timepoint (hr) Value: 6
  misc_feature: MA Experiment 20001558 PARAMETER Experiment Name: At_Drought_Soil_Dry_P Parameter: Post-Treatment Value: Re-Water vs. No Drought
  misc_feature: MA Experiment 20001558 PARAMETER Experiment Name: At_Drought_Soil_Dry_P Parameter: Timepoint (day) Value: 13
  misc_feature: MA Experiment 20001558 PARAMETER Experiment Name: At_Drought_Soil_Dry_P Parameter: Treatment Value: Drought vs. No Drought
  misc_feature: MA Experiment ID: 20001757 Result: Up-regulated in Transcription
  misc_feature: MA Experiment 20001757 PARAMETER Experiment Name: At_50mM_NH4NO3_L-to-H_P Parameter: Timepoint (hr) Value: 6
  misc_feature: MA Experiment 20001757 PARAMETER Experiment Name: At_50mM_NH4NO3_L-to-H_P Parameter: Tissue Value: Leaf
  misc_feature: MA Experiment 20001757 PARAMETER Experiment Name: At_50mM_NH4NO3_L-to-H_P Parameter: Treatment Value: 50mM NH4NO3 vs 100mM Mannitol
  misc_feature: MA Experiment ID: 20001807 Result: Up-regulated in Transcription
  misc_feature: MA Experiment 20001807 PARAMETER Experiment Name: At_50mM_NH4NO3_L-to-H_Sub_P Parameter: Timepoint (hr) Value: 6
  misc_feature: MA Experiment 20001807 PARAMETER Experiment Name: At_50mM_NH4NO3_L-to-H_Sub_P Parameter: Tissue Value: Leaf
  misc_feature: MA Experiment 20001807 PARAMETER Experiment Name: At_50mM_NH4NO3_L-to-H_Sub_P Parameter: Treatment Value: 50mM NH4NO3 vs 100mM Mannitol
  misc_feature: MA Experiment ID: 20001904 Result: Down-regulated in Transcription
  misc_feature: MA Experiment 20001904 PARAMETER Experiment Name: At_Drought_Reproduction_P Parameter: Age (day) Value: 37
  misc_feature: MA Experiment 20001904 PARAMETER Experiment Name: At_Drought_Reproduction_P Parameter: Organism Value: A. thaliana
  misc_feature: MA Experiment 20001904 PARAMETER Experiment Name: At_Drought_Reproduction_P Parameter: Plant Line Value: WS
  misc_feature: MA Experiment 20001904 PARAMETER Experiment Name: At_Drought_Reproduction_P Parameter: Timepoint (day) Value: 7
  misc_feature: MA Experiment 20001904 PARAMETER Experiment Name: At_Drought_Reproduction_P Parameter: Tissue Value: Rosettes
  misc_feature: MA Experiment 20001904 PARAMETER Experiment Name: At_Drought_Reproduction_P Parameter: Treatment Value: Drought vs. No Drought
  misc_feature: MA Experiment ID: 20001906 Result: Down-regulated in Transcription
  misc_feature: MA Experiment 20001906 PARAMETER Experiment Name: At_Drought_Reproduction_P Parameter: Age (day) Value: 35
  misc_feature: MA Experiment 20001906 PARAMETER Experiment Name: At_Drought_Reproduction_P Parameter: Organism Value: A. thaliana
  misc_feature: MA Experiment 20001906 PARAMETER Experiment Name: At_Drought_Reproduction_P Parameter: Plant Line Value: WS
  misc_feature: MA Experiment 20001906 PARAMETER Experiment Name: At_Drought_Reproduction_P Parameter: Timepoint (day) Value: 5
  misc_feature: MA Experiment 20001906 PARAMETER Experiment Name: At_Drought_Reproduction_P Parameter: Tissue Value: Siliques
  misc_feature: MA Experiment 20001906 PARAMETER Experiment Name: At_Drought_Reproduction_P Parameter: Treatment Value: Drought vs. No Drought
  misc_feature: MA Experiment ID: 20001908 Result: Down-regulated in Transcription
  misc_feature: MA Experiment 20001908 PARAMETER Experiment Name: At_Drought_Reproduction_P Parameter: Age (day) Value: 40
  misc_feature: MA Experiment 20001908 PARAMETER Experiment Name: At_Drought_Reproduction_P Parameter: Organism Value: A. thaliana
  misc_feature: MA Experiment 20001908 PARAMETER Experiment Name: At_Drought_Reproduction_P Parameter: Plant Line Value: WS
  misc_feature: MA Experiment 20001908 PARAMETER Experiment Name: At_Drought_Reproduction_P Parameter: Timepoint (day) Value: 10
  misc_feature: MA Experiment 20001908 PARAMETER Experiment Name: At_Drought_Reproduction_P Parameter: Tissue Value: Siliques
  misc_feature: MA Experiment 20001908 PARAMETER Experiment Name: At_Drought_Reproduction_P Parameter: Treatment Value: Drought vs. No Drought
  misc_feature: MA Experiment ID: 20001911 Result: Down-regulated in Transcription
  misc_feature: MA Experiment 20001911 PARAMETER Experiment Name: At_Drought_Reproduction_P Parameter: Age (day) Value: 40
  misc_feature: MA Experiment 20001911 PARAMETER Experiment Name: At_Drought_Reproduction_P Parameter: Organism Value: A. thaliana
  misc_feature: MA Experiment 20001911 PARAMETER Experiment Name: At_Drought_Reproduction_P Parameter: Plant Line Value: WS
  misc_feature: MA Experiment 20001911 PARAMETER Experiment Name: At_Drought_Reproduction_P Parameter: Timepoint (day) Value: 10
  misc_feature: MA Experiment 20001911 PARAMETER Experiment Name: At_Drought_Reproduction_P Parameter: Tissue Value: Flowers
  misc_feature: MA Experiment 20001911 PARAMETER Experiment Name: At_Drought_Reproduction_P Parameter: Treatment Value: Drought vs. No Drought

SEQ ID NO: 31414 - protein, 496 aa, Arabidopsis thaliana; identical to SEQ ID NO: 27824
  peptide (1)..(496): Ceres Seq. ID no. 12738449
  misc_feature (102)..(490): Pfam Name: Eukaryotic aspartyl protease Pfam Description: Eukaryotic aspartyl protease
  misc_feature (17)..(346): Homolog of NCBI NO: 14532550 NR Description: AT3g61820/F15G16_210 [Arabidopsis thaliana]
  misc_feature (100)..(495): Homolog of NCBI NO: 34895664 NR Description: nucleoid DNA-binding protein cnd41-like protein
  misc_feature (19)..(495): Homolog of NCBI NO: 28392860 NR Description: unknown protein [Arabidopsis thaliana]
  misc_feature (60)..(495): Homolog of NCBI NO: 19424106 NR Description: putative chloroplast nucleoid DNA-binding protein
  misc_feature (60)..(495): Homolog of NCBI NO: 15229656 NR Description: putative chloroplast nucleoid DNA-binding protein
  misc_feature (21)..(495): Homolog of NCBI NO: 15222611 NR Description: hypothetical protein
  misc_feature (52)..(495): Homolog of NCBI NO: 15290061 NR Description: nucleoid DNA-binding protein cnd41-like protein
  misc_feature (17)..(495): Homolog of NCBI NO: 15228618 NR Description: putative protein
  misc_feature (12)..(496): Homolog of NCBI NO: 15223368 NR Description: chloroplast nucleoid DNA binding protein, putative
  misc_feature (12)..(496): Homolog of NCBI NO: 21594980 NR Description: chloroplast nucleoid DNA binding protein,

SEQ ID NO: 31415 - protein, 485 aa, Arabidopsis thaliana; identical to SEQ ID NO: 27825
  peptide (1)..(485): Ceres Seq. ID no. 12738450
  misc_feature (91)..(479): Pfam Name: Eukaryotic aspartyl protease Pfam Description: Eukaryotic aspartyl protease
  misc_feature (6)..(335): Homolog of NCBI NO: 14532550 NR Description: AT3g61820/F15G16_210 [Arabidopsis thaliana]
  misc_feature (89)..(484): Homolog of NCBI NO: 34895664 NR Description: nucleoid DNA-binding protein cnd41-like protein
  misc_feature (8)..(484): Homolog of NCBI NO: 28392860 NR Description: unknown protein [Arabidopsis thaliana]
  misc_feature (49)..(484): Homolog of NCBI NO: 19424106 NR Description: putative chloroplast nucleoid DNA-binding protein
  misc_feature (49)..(484): Homolog of NCBI NO: 15229656 NR Description: putative chloroplast nucleoid DNA-binding protein
  misc_feature (10)..(484): Homolog of NCBI NO: 15222611 NR Description: hypothetical protein
  misc_feature (41)..(484): Homolog of NCBI NO: 15290061 NR Description: nucleoid DNA-binding protein cnd41-like protein
  misc_feature (6)..(484): Homolog of NCBI NO: 15228618 NR Description: putative protein
  misc_feature (1)..(485): Homolog of NCBI NO: 15223368 NR Description: chloroplast nucleoid DNA binding protein, putative
  misc_feature (1)..(485): Homolog of NCBI NO: 21594980 NR Description: chloroplast nucleoid DNA binding protein,

SEQ ID NO: 31416 - protein, 329 aa, Arabidopsis thaliana; identical to SEQ ID NO: 27826
  peptide (1)..(329): Ceres Seq. ID no. 12738451
  misc_feature (1)..(323): Pfam Name: Eukaryotic aspartyl protease Pfam Description: Eukaryotic aspartyl protease
  misc_feature (1)..(179): Homolog of NCBI NO: 14532550 NR Description: AT3g61820/F15G16_210 [Arabidopsis thaliana]
  misc_feature (1)..(328): Homolog of NCBI NO: 34895664 NR Description: nucleoid DNA-binding protein cnd41-like protein
  misc_feature (1)..(328): Homolog of NCBI NO: 28392860 NR Description: unknown protein [Arabidopsis thaliana]
  misc_feature (1)..(328): Homolog of NCBI NO: 19424106 NR Description: putative chloroplast nucleoid DNA-binding protein
  misc_feature (1)..(328): Homolog of NCBI NO: 15229656 NR Description: putative chloroplast nucleoid DNA-binding protein
  misc_feature (1)..(328): Homolog of NCBI NO: 15222611 NR Description: hypothetical protein
  misc_feature (1)..(328): Homolog of NCBI NO: 15290061 NR Description: nucleoid DNA-binding protein cnd41-like protein
  misc_feature (1)..(328): Homolog of NCBI NO: 15228618 NR Description: putative protein
  misc_feature (1)..(329): Homolog of NCBI NO: 15223368 NR Description: chloroplast nucleoid DNA binding protein, putative
  misc_feature (1)..(329): Homolog of NCBI NO: 21594980 NR Description: chloroplast nucleoid DNA binding protein,

SEQ ID NO: 31417 - DNA, 1496 bp, Arabidopsis thaliana; identical to SEQ ID NO: 27827
  misc_feature (1)..(1496): Ceres Seq. ID no. 12421656
  misc_feature: MA Experiment ID: 108435 Result: Down-regulated in Transcription
  misc_feature: MA Experiment 108435 PARAMETER Experiment Name: At_stm_Mutants_cDNA_P Parameter: Plant Line Value: wt Landsburg vs stm
  misc_feature: MA Experiment 108435 PARAMETER Experiment Name: At_stm_Mutants_cDNA_P Parameter: Tissue Value: Shoot Apical Meristem Region
  misc_feature: MA Experiment ID: 108569 Result: Up-regulated in Transcription
  misc_feature: MA Experiment 108569 PARAMETER Experiment Name: At_0.001%_MeJA__cDNA_P Parameter: Timepoint (hr) Value: 6
  misc_feature: MA Experiment 108569 PARAMETER Experiment Name: At_0.001%_MeJA__cDNA_P Parameter: Tissue Value: Aerial
  misc_feature: MA Experiment 108569 PARAMETER Experiment Name: At_0.001%_MeJA__cDNA_P Parameter: Treatment Value: 0.001% MeJA vs. No Treatment
  misc_feature: MA Experiment ID: 108573 Result: Up-regulated in Transcription
  misc_feature: MA Experiment 108573 PARAMETER Experiment Name: At_Drought_cDNA_P Parameter: Timepoint (hr) Value: 6
  misc_feature: MA Experiment 108573 PARAMETER Experiment Name: At_Drought_cDNA_P Parameter: Tissue Value: Aerial
  misc_feature: MA Experiment 108573 PARAMETER Experiment Name: At_Drought_cDNA_P Parameter: Treatment Value: Drought vs. No Drought
  misc_feature: MA Experiment ID: 108595 Result: Down-regulated in Transcription
  misc_feature: MA Experiment 108595 PARAMETER Experiment Name: At_Ler-pi_Ovule_cDNA_P Parameter: Plant Line Value: null
  misc_feature: MA Experiment ID: 20000113 Result: Up-regulated in Transcription
  misc_feature: MA Experiment 20000113 PARAMETER Experiment Name: At_42deg_Heat_cDNA_P Parameter: Temperature (deg C) Value: 42 vs. 22
  misc_feature: MA Experiment 20000113 PARAMETER Experiment Name: At_42deg_Heat_cDNA_P Parameter: Timepoint (hr) Value: 8
  misc_feature: MA Experiment 20000113 PARAMETER Experiment Name: At_42deg_Heat_cDNA_P Parameter: Tissue Value: Aerial
  misc_feature: MA Experiment ID: 20000234 Result: Up-regulated in Transcription
  misc_feature: MA Experiment 20000234 PARAMETER Experiment Name: At_Siliques_P Parameter: Age (day) Value: 21
  misc_feature: MA Experiment 20000234 PARAMETER Experiment Name: At_Siliques_P Parameter: Organism Value: A. thaliana
  misc_feature: MA Experiment 20000234 PARAMETER Experiment Name: At_Siliques_P Parameter: Plant Line Value: WS
  misc_feature: MA Experiment 20000234 PARAMETER Experiment Name: At_Siliques_P Parameter: Tissue Value: Less Than 5mm Siliques vs. Whole Plant
  misc_feature: MA Experiment ID: 20000264 Result: Up-regulated in Transcription
  misc_feature: MA Experiment 20000264 PARAMETER Experiment Name: At_Open_Flower_P Parameter: Age (day) Value: 21
  misc_feature: MA Experiment 20000264 PARAMETER Experiment Name: At_Open_Flower_P Parameter: Plant Line Value: WS
  misc_feature: MA Experiment 20000264 PARAMETER Experiment Name: At_Open_Flower_P Parameter: Tissue Value: Open Flower vs. Whole Plant
  misc_feature: MA Experiment ID: 20000265 Result: Up-regulated in Transcription
  misc_feature: MA Experiment 20000265 PARAMETER Experiment Name: At_Open_Flower_P Parameter: Age (day) Value: 21
  misc_feature: MA Experiment 20000265 PARAMETER Experiment Name: At_Open_Flower_P Parameter: Plant Line Value: WS
  misc_feature: MA Experiment 20000265 PARAMETER Experiment Name: At_Open_Flower_P Parameter: Tissue Value: Closed Flower vs. Whole Plant
  misc_feature: MA Experiment ID: 20000286 Result: Up-regulated in Transcription
  misc_feature: MA Experiment 20000286 PARAMETER Experiment Name: At_Open_Flower_P Parameter: Age (day) Value: 21
  misc_feature: MA Experiment 20000286 PARAMETER Experiment Name: At_Open_Flower_P Parameter: Plant Line Value: WS
  misc_feature: MA Experiment 20000286 PARAMETER Experiment Name: At_Open_Flower_P Parameter: Tissue Value: Half Open vs. Whole Plant
  misc_feature: MA Experiment ID: 20000438 Result: Up-regulated in Transcription
  misc_feature: MA Experiment 20000438 PARAMETER Experiment Name: At_Shoots__P Parameter: Age (day) Value: 14
  misc_feature: MA Experiment 20000438 PARAMETER Experiment Name: At_Shoots__P Parameter: Tissue Value: Shoots vs. Whole Plant
  misc_feature: MA Experiment ID: 20000573 Result: Up-regulated in Transcription
  misc_feature: MA Experiment 20000573 PARAMETER Experiment Name: At_100uM_ABA_Mutants__P Parameter: Organism Value: A. thaliana
  misc_feature: MA Experiment 20000573 PARAMETER Experiment Name: At_100uM_ABA_Mutants__P Parameter: Plant Line Value: CS22 vs. Ler wt
  misc_feature: MA Experiment 20000573 PARAMETER Experiment Name: At_100uM_ABA_Mutants__P Parameter: Timepoint (hr) Value: N/A
  misc_feature: MA Experiment 20000573 PARAMETER Experiment Name: At_100uM_ABA_Mutants__P Parameter: Tissue Value: Whole Plant
  misc_feature: MA Experiment 20000573 PARAMETER Experiment Name: At_100uM_ABA_Mutants__P Parameter: Treatment Value: None
  misc_feature: MA Experiment ID: 20000794 Result: Up-regulated in Transcription
  misc_feature: MA Experiment 20000794 PARAMETER Experiment Name: At_Petals_P Parameter: Age (day) Value: 23-25 days
  misc_feature: MA Experiment 20000794 PARAMETER Experiment Name: At_Petals_P Parameter: Plant Line Value: WS
  misc_feature: MA Experiment 20000794 PARAMETER Experiment Name: At_Petals_P Parameter: Tissue Value: Petals vs. Whole plant

SEQ ID NO: 31418 - protein, 343 aa, Arabidopsis thaliana; identical to SEQ ID NO: 27828
  peptide (1)..(343): Ceres Seq. ID no. 12421657
  misc_feature (39)..(339): Pfam Name: Mo25 protein family Pfam Description: Mo25 protein family
  misc_feature (4)..(338): Homolog of NCBI NO: 17569177 NR Description: Mouse Mo25 protein like family member
  misc_feature (4)..(338): Homolog of NCBI NO: 7459568 NR Description: hypothetical protein R02E12.2 - Caenorhabditis
  misc_feature (5)..(338): Homolog of NCBI NO: 34877516 NR Description: similar to MO25 protein [Rattus norvegicus]
  misc_feature (5)..(338): Homolog of NCBI NO: 7706481 NR Description: MO25 protein [Homo sapiens]
  misc_feature (1)..(342): Homolog of NCBI NO: 15227629 NR Description: unknown protein; protein id: At2g03410.1
  misc_feature (1)..(337): Homolog of NCBI NO: 34901086 NR Description: putative MO25 protein (CGI-66)
  misc_feature (44)..(343): Homolog of NCBI NO: 7485184 NR Description: hypothetical protein - Arabidopsis thaliana
  misc_feature (1)..(343): Homolog of NCBI NO: 15236013 NR Description: putative protein
  misc_feature (1)..(343): Homolog of NCBI NO: 15238126 NR Description: putative protein; protein id: At5g47540.1
  misc_feature (1)..(343): Homolog of NCBI NO: 15214076 NR Description: Hypothetical MO25-like protein At5g47540

SEQ ID NO: 31419 - protein, 300 aa, Arabidopsis thaliana; identical to SEQ ID NO: 27829
  peptide (1)..(300): Ceres Seq. ID no. 12421658
  misc_feature (1)..(296): Pfam Name: Mo25 protein family Pfam Description: Mo25 protein family
  misc_feature (1)..(295): Homolog of NCBI NO: 17569177 NR Description: Mouse Mo25 protein like family member
  misc_feature (1)..(295): Homolog of NCBI NO: 7459568 NR Description: hypothetical protein R02E12.2 - Caenorhabditis
  misc_feature (1)..(295): Homolog of NCBI NO: 34877516 NR Description: similar to MO25 protein [Rattus norvegicus]
  misc_feature (1)..(295): Homolog of NCBI NO: 7706481 NR Description: MO25 protein [Homo sapiens]
  misc_feature (1)..(299): Homolog of NCBI NO: 15227629 NR Description: unknown protein; protein id: At2g03410.1
  misc_feature (1)..(294): Homolog of NCBI NO: 34901086 NR Description: putative MO25 protein (CGI-66)
  misc_feature (1)..(300): Homolog of NCBI NO: 7485184 NR Description: hypothetical protein - Arabidopsis thaliana
  misc_feature (1)..(300): Homolog of NCBI NO: 15236013 NR Description: putative protein
  misc_feature (1)..(300): Homolog of NCBI NO: 15238126 NR Description: putative protein; protein id: At5g47540.1
  misc_feature (1)..(300): Homolog of NCBI NO: 15214076 NR Description: Hypothetical MO25-like protein At5g47540

SEQ ID NO: 31420 - protein, 290 aa, Arabidopsis thaliana; identical to SEQ ID NO: 27830
  peptide (1)..(290): Ceres Seq. ID no. 12421659
  misc_feature (1)..(286): Pfam Name: Mo25 protein family Pfam Description: Mo25 protein family
  misc_feature (1)..(285): Homolog of NCBI NO: 17569177 NR Description: Mouse Mo25 protein like family member
  misc_feature (1)..(285): Homolog of NCBI NO: 7459568 NR Description: hypothetical protein R02E12.2 - Caenorhabditis
  misc_feature (1)..(285): Homolog of NCBI NO: 34877516 NR Description: similar to MO25 protein [Rattus norvegicus]
  misc_feature (1)..(285): Homolog of NCBI NO: 7706481 NR Description: MO25 protein [Homo sapiens]
  misc_feature (1)..(289): Homolog of NCBI NO: 15227629 NR Description: unknown protein; protein id: At2g03410.1
  misc_feature (1)..(284): Homolog of NCBI NO: 34901086 NR Description: putative MO25 protein (CGI-66)
  misc_feature (1)..(290): Homolog of NCBI NO: 7485184 NR Description: hypothetical protein - Arabidopsis thaliana
  misc_feature (1)..(290): Homolog of NCBI NO: 15236013 NR Description: putative protein
  misc_feature (1)..(290): Homolog of NCBI NO: 15238126 NR Description: putative protein; protein id: At5g47540.1
  misc_feature (1)..(290): Homolog of NCBI NO: 15214076 NR Description: Hypothetical MO25-like protein At5g47540

SEQ ID NO: 31421 - DNA, 1367 bp, Arabidopsis thaliana; identical to SEQ ID NO: 27831
  misc_feature (1)..(1367): Ceres Seq. ID no. 12333764
  misc_feature: MA Experiment ID: 20000179 Result: Up-regulated in Transcription
  misc_feature: MA Experiment 20000179 PARAMETER Experiment Name: At_Germinating_Seeds_P Parameter: Age (hr) Value: 6 vs. 0
  misc_feature: MA Experiment 20000179 PARAMETER Experiment Name: At_Germinating_Seeds_P Parameter: Tissue Value: Germinating Seeds
  misc_feature: MA Experiment ID: 20000180 Result: Up-regulated in Transcription
  misc_feature: MA Experiment 20000180 PARAMETER Experiment Name: At_Germinating_Seeds_P Parameter: Age (hr) Value: 24 vs. 0
  misc_feature: MA Experiment 20000180 PARAMETER Experiment Name: At_Germinating_Seeds_P Parameter: Tissue Value: Germinating Seeds
  misc_feature: MA Experiment ID: 20000185 Result: Down-regulated in Transcription
  misc_feature: MA Experiment 20000185 PARAMETER Experiment Name: At_Roots__P Parameter: Age (day) Value: 7 vs. 21
  misc_feature: MA Experiment 20000185 PARAMETER Experiment Name: At_Roots__P Parameter: Organism Value: A. thaliana
  misc_feature: MA Experiment 20000185 PARAMETER Experiment Name: At_Roots__P Parameter: Tissue Value: Roots vs. Whole Plant
  misc_feature: MA Experiment ID: 20000234 Result: Up-regulated in Transcription
  misc_feature: MA Experiment 20000234 PARAMETER Experiment Name: At_Siliques_P Parameter: Age (day) Value: 21
  misc_feature: MA Experiment 20000234 PARAMETER Experiment Name: At_Siliques_P Parameter: Organism Value: A. thaliana
  misc_feature: MA Experiment 20000234 PARAMETER Experiment Name: At_Siliques_P Parameter: Plant Line Value: WS
  misc_feature: MA Experiment 20000234 PARAMETER Experiment Name: At_Siliques_P Parameter: Tissue Value: Less Than 5mm Siliques vs. Whole Plant
  misc_feature: MA Experiment ID: 20000235 Result: Up-regulated in Transcription
  misc_feature: MA Experiment 20000235 PARAMETER Experiment Name: At_Siliques_P Parameter: Age (day) Value: 21
  misc_feature: MA Experiment 20000235 PARAMETER Experiment Name: At_Siliques_P Parameter: Organism Value: A. thaliana
  misc_feature: MA Experiment 20000235 PARAMETER Experiment Name: At_Siliques_P Parameter: Plant Line Value: WS
  misc_feature: MA Experiment 20000235 PARAMETER Experiment Name: At_Siliques_P Parameter: Tissue Value: 5-10mm Siliques vs. Whole Plant
  misc_feature: MA Experiment ID: 20000437 Result: Down-regulated in Transcription
  misc_feature: MA Experiment 20000437 PARAMETER Experiment Name: At_Drought_P Parameter: Age (day) Value: 8
  misc_feature: MA Experiment 20000437 PARAMETER Experiment Name: At_Drought_P Parameter: Organism Value: A. thaliana
  misc_feature: MA Experiment 20000437 PARAMETER Experiment Name: At_Drought_P Parameter: Plant Line Value: WS
  misc_feature: MA Experiment 20000437 PARAMETER Experiment Name: At_Drought_P Parameter: Timepoint (hr) Value: 24
  misc_feature: MA Experiment 20000437 PARAMETER Experiment Name: At_Drought_P Parameter: Tissue Value: Whole Plant
  misc_feature: MA Experiment 20000437 PARAMETER Experiment Name: At_Drought_P Parameter: Treatment Value: Drought vs. No Drought
  misc_feature: MA Experiment ID: 20000438 Result: Up-regulated in Transcription
  misc_feature: MA Experiment 20000438 PARAMETER Experiment Name: At_Shoots__P Parameter: Age (day) Value: 14
  misc_feature: MA Experiment 20000438 PARAMETER Experiment Name: At_Shoots__P Parameter: Tissue Value: Shoots vs. Whole Plant
  misc_feature: MA Experiment ID: 20000439 Result: Down-regulated in Transcription
  misc_feature: MA Experiment 20000439 PARAMETER Experiment Name: At_Roots__P Parameter: Age (day) Value: 14 vs. 21
  misc_feature: MA Experiment 20000439 PARAMETER Experiment Name: At_Roots__P Parameter: Organism Value: A. thaliana
  misc_feature: MA Experiment 20000439 PARAMETER Experiment Name: At_Roots__P Parameter: Tissue Value: Roots vs. Whole Plant
  misc_feature: MA Experiment ID: 20000794 Result: Down-regulated in Transcription
  misc_feature: MA Experiment 20000794 PARAMETER Experiment Name: At_Petals_P Parameter: Age (day) Value: 23-25 days
  misc_feature: MA Experiment 20000794 PARAMETER Experiment Name: At_Petals_P Parameter: Plant Line Value: WS
  misc_feature: MA Experiment 20000794 PARAMETER Experiment Name: At_Petals_P Parameter: Tissue Value: Petals vs. Whole plant
  misc_feature: MA Experiment ID: 20001248 Result: Down-regulated in Transcription
  misc_feature: MA Experiment 20001248 PARAMETER Experiment Name: At_Far-red-induction_P Parameter: Age (day) Value: 7
  misc_feature: MA Experiment 20001248 PARAMETER Experiment Name: At_Far-red-induction_P Parameter: Light Value: Far-red vs. White
  misc_feature: MA Experiment 20001248 PARAMETER Experiment Name: At_Far-red-induction_P Parameter: Organism Value: A. thaliana
  misc_feature: MA Experiment 20001248 PARAMETER Experiment Name: At_Far-red-induction_P Parameter: Plant Line Value: Columbia
  misc_feature: MA Experiment 20001248 PARAMETER Experiment Name: At_Far-red-induction_P Parameter: Timepoint (hr) Value: 4
  misc_feature: MA Experiment 20001248 PARAMETER Experiment Name: At_Far-red-induction_P Parameter: Tissue Value: Whole Plant
  misc_feature: MA Experiment ID: 20001450 Result: Down-regulated in Transcription
  misc_feature: MA Experiment 20001450 PARAMETER Experiment Name: At_Far-red-induction_P Parameter: Age (day) Value: 7
  misc_feature: MA Experiment 20001450 PARAMETER Experiment Name: At_Far-red-induction_P Parameter: Light Value: Far-red vs. White
  misc_feature: MA Experiment 20001450 PARAMETER Experiment Name: At_Far-red-induction_P Parameter: Organism Value: A. thaliana
  misc_feature: MA Experiment 20001450 PARAMETER Experiment Name: At_Far-red-induction_P Parameter: Plant Line Value: Columbia
  misc_feature: MA Experiment 20001450 PARAMETER Experiment Name: At_Far-red-induction_P Parameter: Timepoint (hr) Value: 8
  misc_feature: MA Experiment 20001450 PARAMETER Experiment Name: At_Far-red-induction_P Parameter: Tissue Value: Whole Plant
  misc_feature: MA Experiment ID: 20001451 Result: Down-regulated in Transcription
  misc_feature: MA Experiment 20001451 PARAMETER Experiment Name: At_Far-red-induction_P Parameter: Age (day) Value: 7
  misc_feature: MA Experiment 20001451 PARAMETER Experiment Name: At_Far-red-induction_P Parameter: Light Value: Far-red vs. White
  misc_feature: MA Experiment 20001451 PARAMETER Experiment Name: At_Far-red-induction_P Parameter: Organism Value: A. thaliana
  misc_feature: MA Experiment 20001451 PARAMETER Experiment Name: At_Far-red-induction_P Parameter: Plant Line Value: Columbia
  misc_feature: MA Experiment 20001451 PARAMETER Experiment Name: At_Far-red-induction_P Parameter: Timepoint (hr) Value: 24
  misc_feature: MA Experiment 20001451 PARAMETER Experiment Name: At_Far-red-induction_P Parameter: Tissue Value: Whole Plant
  misc_feature: MA Experiment ID: 20001557 Result: Down-regulated in Transcription
  misc_feature: MA Experiment 20001557 PARAMETER Experiment Name: At_Drought_Soil_Dry_P Parameter: Age (day) Value: 27
  misc_feature: MA Experiment 20001557 PARAMETER Experiment Name: At_Drought_Soil_Dry_P Parameter: Organism Value: A. thaliana
  misc_feature: MA Experiment 20001557 PARAMETER Experiment Name: At_Drought_Soil_Dry_P Parameter: Plant Line Value: WS
  misc_feature: MA Experiment 20001557 PARAMETER Experiment Name: At_Drought_Soil_Dry_P Parameter: Post Timepoint (hr) Value: 3
  misc_feature: MA Experiment 20001557 PARAMETER Experiment Name: At_Drought_Soil_Dry_P Parameter: Post-Treatment Value: Re-Water vs. No Drought
  misc_feature: MA Experiment 20001557 PARAMETER Experiment Name: At_Drought_Soil_Dry_P Parameter: Timepoint (day) Value: 13
  misc_feature: MA Experiment 20001557 PARAMETER Experiment Name: At_Drought_Soil_Dry_P Parameter: Treatment Value: Drought vs. No Drought
  misc_feature: MA Experiment ID: 20001904 Result: Down-regulated in Transcription
  misc_feature: MA Experiment 20001904 PARAMETER Experiment Name: At_Drought_Reproduction_P Parameter: Age (day) Value: 37
  misc_feature: MA Experiment 20001904 PARAMETER Experiment Name: At_Drought_Reproduction_P Parameter: Organism Value: A. thaliana
  misc_feature: MA Experiment 20001904 PARAMETER Experiment Name: At_Drought_Reproduction_P Parameter: Plant Line Value: WS
  misc_feature: MA Experiment 20001904 PARAMETER Experiment Name: At_Drought_Reproduction_P Parameter: Timepoint (day) Value: 7
  misc_feature: MA Experiment 20001904 PARAMETER Experiment Name: At_Drought_Reproduction_P Parameter: Tissue Value: Rosettes
  misc_feature: MA Experiment 20001904 PARAMETER Experiment Name: At_Drought_Reproduction_P Parameter: Treatment Value: Drought vs. No Drought
  misc_feature: MA Experiment ID: 20001905 Result: Down-regulated in Transcription
  misc_feature: MA Experiment 20001905 PARAMETER Experiment Name: At_Drought_Reproduction_P Parameter: Age (day) Value: 40
  misc_feature: MA Experiment 20001905 PARAMETER Experiment Name: At_Drought_Reproduction_P Parameter: Organism Value: A. thaliana
  misc_feature: MA Experiment 20001905 PARAMETER Experiment Name: At_Drought_Reproduction_P Parameter: Plant Line Value: WS
  misc_feature: MA Experiment 20001905 PARAMETER Experiment Name: At_Drought_Reproduction_P Parameter: Timepoint (day) Value: 10
  misc_feature: MA Experiment 20001905 PARAMETER Experiment Name: At_Drought_Reproduction_P Parameter: Tissue Value: Rosettes
  misc_feature: MA Experiment 20001905 PARAMETER Experiment Name: At_Drought_Reproduction_P Parameter: Treatment Value: Drought vs. No Drought
  misc_feature: MA Experiment ID: 20001906 Result: Down-regulated in Transcription
  misc_feature: MA Experiment 20001906 PARAMETER Experiment Name: At_Drought_Reproduction_P Parameter: Age (day) Value: 35
  misc_feature: MA Experiment 20001906 PARAMETER Experiment Name: At_Drought_Reproduction_P Parameter: Organism Value: A. thaliana
  misc_feature: MA Experiment 20001906 PARAMETER Experiment Name: At_Drought_Reproduction_P Parameter: Plant Line Value: WS
  misc_feature: MA Experiment 20001906 PARAMETER Experiment Name: At_Drought_Reproduction_P Parameter: Timepoint (day) Value: 5
  misc_feature: MA Experiment 20001906 PARAMETER Experiment Name: At_Drought_Reproduction_P Parameter: Tissue Value: Siliques
  misc_feature: MA Experiment 20001906 PARAMETER Experiment Name: At_Drought_Reproduction_P Parameter: Treatment Value: Drought vs. No Drought
  misc_feature: MA Experiment ID: 20001908 Result: Down-regulated in Transcription
  misc_feature: MA Experiment 20001908 PARAMETER Experiment Name: At_Drought_Reproduction_P Parameter: Age (day) Value: 40
  misc_feature: MA Experiment 20001908 PARAMETER Experiment Name: At_Drought_Reproduction_P Parameter: Organism Value: A. thaliana
  misc_feature: MA Experiment 20001908 PARAMETER Experiment Name: At_Drought_Reproduction_P Parameter: Plant Line Value: WS
  misc_feature: MA Experiment 20001908 PARAMETER Experiment Name: At_Drought_Reproduction_P Parameter: Timepoint (day) Value: 10
  misc_feature: MA Experiment 20001908 PARAMETER Experiment Name: At_Drought_Reproduction_P Parameter: Tissue Value: Siliques
  misc_feature: MA Experiment 20001908 PARAMETER Experiment Name: At_Drought_Reproduction_P Parameter: Treatment Value: Drought vs. No Drought

SEQ ID NO: 31422 - protein, 401 aa, Arabidopsis thaliana; identical to SEQ ID NO: 27832
  peptide (1)..(401): Ceres Seq. ID no. 12333765
  misc_feature (1)..(401): Homolog of NCBI NO: 15239574 NR Description: NADPH:protochlorophyllide oxidoreductase A
  misc_feature (1)..(401): Homolog of NCBI NO: 968975 NR Description: NADPH:protochlorophyllide oxidoreductase A
  misc_feature (1)..(401): Homolog of NCBI NO: 15234129 NR Description: protochlorophyllide reductase precursor
  misc_feature (1)..(401): Homolog of NCBI NO: 21068895 NR Description: NADPH:protochlorophyllide oxidoreductase
  misc_feature (1)..(401): Homolog of NCBI NO: 266742 NR Description: Protochlorophyllide reductase, chloroplast
  misc_feature (1)..(401): Homolog of NCBI NO: 21068893 NR Description: NADPH:protochlorophyllide oxidoreductase
  misc_feature (1)..(401): Homolog of NCBI NO: 81946 NR Description: protochlorophyllide reductase (EC 1.3.1.33)
  misc_feature (1)..(401): Homolog of NCBI NO: 10720220 NR Description: Protochlorophyllide reductase, chloroplast
  misc_feature (1)..(401): Homolog of NCBI NO: 10720233 NR Description: Protochlorophyllide reductase, chloroplast
  misc_feature (1)..(401): Homolog of NCBI NO: 15218860 NR Description: putative protochlorophyllide reductase

SEQ ID NO: 31423 - protein, 283 aa, Arabidopsis thaliana; identical to SEQ ID NO: 27833
  peptide (1)..(283): Ceres Seq. ID no. 12333766
  misc_feature (1)..(283): Homolog of NCBI NO: 15239574 NR Description: NADPH:protochlorophyllide oxidoreductase A
  misc_feature (1)..(283): Homolog of NCBI NO: 968975 NR Description: NADPH:protochlorophyllide oxidoreductase A
  misc_feature (1)..(283): Homolog of NCBI NO: 15234129 NR Description: protochlorophyllide reductase precursor
  misc_feature (1)..(283): Homolog of NCBI NO: 21068895 NR Description: NADPH:protochlorophyllide oxidoreductase
  misc_feature (1)..(283): Homolog of NCBI NO: 266742 NR Description: Protochlorophyllide reductase, chloroplast
  misc_feature (1)..(283): Homolog of NCBI NO: 21068893 NR Description: NADPH:protochlorophyllide oxidoreductase
  misc_feature (1)..(283): Homolog of NCBI NO: 81946 NR Description: protochlorophyllide reductase (EC 1.3.1.33)
  misc_feature (1)..(283): Homolog of NCBI NO: 10720220 NR Description: Protochlorophyllide reductase, chloroplast
  misc_feature (1)..(283): Homolog of NCBI NO: 10720233 NR Description: Protochlorophyllide reductase, chloroplast
  misc_feature (1)..(283): Homolog of NCBI NO: 15218860 NR Description: putative protochlorophyllide reductase

SEQ ID NO: 31424 - protein, 266 aa, Arabidopsis thaliana; identical to SEQ ID NO: 27834
  peptide (1)..(266): Ceres Seq. ID no. 12333767
  misc_feature (1)..(266): Homolog of NCBI NO: 15239574 NR Description: NADPH:protochlorophyllide oxidoreductase A
  misc_feature (1)..(266): Homolog of NCBI NO: 968975 NR Description: NADPH:protochlorophyllide oxidoreductase A
  misc_feature (1)..(266): Homolog of NCBI NO: 15234129 NR Description: protochlorophyllide reductase precursor
  misc_feature (1)..(266): Homolog of NCBI NO: 21068895 NR Description: NADPH:protochlorophyllide oxidoreductase
  misc_feature (1)..(266): Homolog of NCBI NO: 266742 NR Description: Protochlorophyllide reductase, chloroplast
  misc_feature (1)..(266): Homolog of NCBI NO: 21068893 NR Description: NADPH:protochlorophyllide oxidoreductase
  misc_feature (1)..(266): Homolog of NCBI NO: 81946 NR Description: protochlorophyllide reductase (EC 1.3.1.33)
  misc_feature (1)..(266): Homolog of NCBI NO: 10720220 NR Description: Protochlorophyllide reductase, chloroplast
  misc_feature (1)..(266): Homolog of NCBI NO: 10720233 NR Description: Protochlorophyllide reductase, chloroplast
  misc_feature (1)..(266): Homolog of NCBI NO: 15218860 NR Description: putative protochlorophyllide reductase

SEQ ID NO: 31425 - DNA, 1148 bp, Arabidopsis thaliana; identical to SEQ ID NO: 27835
  misc_feature (1)..(1148): Ceres Seq. ID no. 13497523
  misc_feature: MA Experiment ID: 108462 Result: Down-regulated in Transcription
  misc_feature: MA Experiment 108462 PARAMETER Experiment Name: At_Germinating_Seeds_cDNA_P Parameter: Age (day) Value: 2 vs. 0
  misc_feature: MA Experiment 108462 PARAMETER Experiment Name: At_Germinating_Seeds_cDNA_P Parameter: Tissue Value: Germinating Seeds
  misc_feature: MA Experiment ID: 108572 Result: Up-regulated in Transcription
  misc_feature: MA Experiment 108572 PARAMETER Experiment Name: At_Drought_cDNA_P Parameter: Timepoint (hr) Value: 1
  misc_feature: MA Experiment 108572 PARAMETER Experiment Name: At_Drought_cDNA_P Parameter: Tissue Value: Aerial
  misc_feature: MA Experiment 108572 PARAMETER Experiment Name: At_Drought_cDNA_P Parameter: Treatment Value: Drought vs. No Drought
  misc_feature: MA Experiment ID: 108573 Result: Up-regulated in Transcription
  misc_feature: MA Experiment 108573 PARAMETER Experiment Name: At_Drought_cDNA_P Parameter: Timepoint (hr) Value: 6
  misc_feature: MA Experiment 108573 PARAMETER Experiment Name: At_Drought_cDNA_P Parameter: Tissue Value: Aerial
  misc_feature: MA Experiment 108573 PARAMETER Experiment Name: At_Drought_cDNA_P Parameter: Treatment Value: Drought vs. No Drought
  misc_feature: MA Experiment ID: 108585 Result: Up-regulated in Transcription
  misc_feature: MA Experiment 108585 PARAMETER Experiment Name: At_5mM_NaNP_cDNA_P Parameter: Timepoint (hr) Value: 6
  misc_feature: MA Experiment 108585 PARAMETER Experiment Name: At_5mM_NaNP_cDNA_P Parameter: Tissue Value: Aerial
  misc_feature: MA Experiment 108585 PARAMETER Experiment Name: At_5mM_NaNP_cDNA_P Parameter: Treatment Value: null
  misc_feature: MA Experiment ID: 108595 Result: Up-regulated in Transcription
  misc_feature: MA Experiment 108595 PARAMETER Experiment Name: At_Ler-pi_Ovule_cDNA_P Parameter: Plant Line Value: null
  misc_feature: MA Experiment ID: 108667 Result: Up-regulated in Transcription
  misc_feature: MA Experiment 108667 PARAMETER Experiment Name: At_2mM_SA_cDNA_P Parameter: Plant Line Value: WS
  misc_feature: MA Experiment 108667 PARAMETER Experiment Name: At_2mM_SA_cDNA_P Parameter: Timepoint (hr) Value: 1
  misc_feature: MA Experiment 108667 PARAMETER Experiment Name: At_2mM_SA_cDNA_P Parameter: Treatment Value: 2mM SA vs. No Treatment
  misc_feature: MA Experiment ID: 20000069 Result: Up-regulated in Transcription
  misc_feature: MA Experiment 20000069 PARAMETER Experiment Name: At_100uM_ABA_Mutants_cDNA_P Parameter: Plant Line Value: CS23
  misc_feature: MA Experiment 20000069 PARAMETER Experiment Name: At_100uM_ABA_Mutants_cDNA_P Parameter: Timepoint (hr) Value: 6
  misc_feature: MA Experiment 20000069 PARAMETER Experiment Name: At_100uM_ABA_Mutants_cDNA_P Parameter: Tissue Value: Aerial
  misc_feature: MA Experiment 20000069 PARAMETER Experiment Name: At_100uM_ABA_Mutants_cDNA_P Parameter: Treatment Value: 100uM ABA vs. No Treatment
  misc_feature: MA Experiment ID: 20000070 Result: Up-regulated in Transcription
  misc_feature: MA Experiment 20000070 PARAMETER Experiment Name: At_100uM_ABA_Mutants_cDNA_P Parameter: Plant Line Value: CS24
  misc_feature: MA Experiment 20000070 PARAMETER Experiment Name: At_100uM_ABA_Mutants_cDNA_P Parameter: Timepoint (hr) Value: 6
  misc_feature: MA Experiment 20000070 PARAMETER Experiment Name: At_100uM_ABA_Mutants_cDNA_P Parameter: Tissue Value: Aerial
  misc_feature: MA Experiment 20000070 PARAMETER Experiment Name: At_100uM_ABA_Mutants_cDNA_P Parameter: Treatment Value: 100uM ABA vs. No Treatment
  misc_feature: MA Experiment ID: 20000071 Result: Up-regulated in Transcription
  misc_feature: MA Experiment 20000071 PARAMETER Experiment Name: At_100uM_ABA_Mutants_cDNA_P Parameter: Plant Line Value: CS8104
  misc_feature: MA Experiment 20000071 PARAMETER Experiment Name: At_100uM_ABA_Mutants_cDNA_P Parameter: Timepoint (hr) Value: 6
  misc_feature: MA Experiment 20000071 PARAMETER Experiment Name: At_100uM_ABA_Mutants_cDNA_P Parameter: Tissue Value: Aerial
  misc_feature: MA Experiment 20000071 PARAMETER Experiment Name: At_100uM_ABA_Mutants_cDNA_P Parameter: Treatment Value: 100uM ABA vs. No Treatment
  misc_feature: MA Experiment ID: 20000072 Result: Up-regulated in Transcription
  misc_feature: MA Experiment 20000072 PARAMETER Experiment Name: At_100uM_ABA_Mutants_cDNA_P Parameter: Plant Line Value: CS8105
  misc_feature: MA Experiment 20000072 PARAMETER Experiment Name: At_100uM_ABA_Mutants_cDNA_P Parameter: Timepoint (hr) Value: 6
  misc_feature: MA Experiment 20000072 PARAMETER Experiment Name: At_100uM_ABA_Mutants_cDNA_P Parameter: Tissue Value: Aerial
  misc_feature: MA Experiment 20000072 PARAMETER Experiment Name: At_100uM_ABA_Mutants_cDNA_P Parameter: Treatment Value: 100uM ABA vs. No Treatment
  misc_feature: MA Experiment ID: 20000086 Result: Up-regulated in Transcription
  misc_feature: MA Experiment 20000086 PARAMETER Experiment Name: At_100uM_ABA_Mutants_cDNA_P Parameter: Plant Line Value: CS22
  misc_feature: MA Experiment 20000086 PARAMETER Experiment Name: At_100uM_ABA_Mutants_cDNA_P Parameter: Timepoint (hr) Value: 6
  misc_feature: MA Experiment 20000086 PARAMETER Experiment Name: At_100uM_ABA_Mutants_cDNA_P Parameter: Tissue Value: Aerial
  misc_feature: MA Experiment 20000086 PARAMETER Experiment Name: At_100uM_ABA_Mutants_cDNA_P Parameter: Treatment Value: 100uM ABA vs. No Treatment
  misc_feature: MA Experiment ID: 20000088 Result: Up-regulated in Transcription
  misc_feature: MA Experiment 20000088 PARAMETER Experiment Name: At_100uM_ABA_Mutants_cDNA_P Parameter: Plant Line Value: Landsberg
  misc_feature: MA Experiment 20000088 PARAMETER Experiment Name: At_100uM_ABA_Mutants_cDNA_P Parameter: Timepoint (hr) Value: 6
  misc_feature: MA Experiment 20000088 PARAMETER Experiment Name: At_100uM_ABA_Mutants_cDNA_P Parameter: Tissue Value: Aerial
  misc_feature: MA Experiment 20000088 PARAMETER Experiment Name: At_100uM_ABA_Mutants_cDNA_P Parameter: Treatment Value: 100uM ABA vs. No Treatment
  misc_feature: MA Experiment ID: 20000111 Result: Down-regulated in Transcription
  misc_feature: MA Experiment 20000111 PARAMETER Experiment Name: At_42deg_Heat_cDNA_P Parameter: Temperature (deg C) Value: 42 vs. 22
  misc_feature: MA Experiment 20000111 PARAMETER Experiment Name: At_42deg_Heat_cDNA_P Parameter: Timepoint (hr) Value: 6
  misc_feature: MA Experiment 20000111 PARAMETER Experiment Name: At_42deg_Heat_cDNA_P Parameter: Tissue Value: Aerial
  misc_feature: MA Experiment ID: 20000113 Result: Down-regulated in Transcription
  misc_feature: MA Experiment 20000113 PARAMETER Experiment Name: At_42deg_Heat_cDNA_P Parameter: Temperature (deg C) Value: 42 vs. 22
  misc_feature: MA Experiment 20000113 PARAMETER Experiment Name: At_42deg_Heat_cDNA_P Parameter: Timepoint (hr) Value: 8
  misc_feature: MA Experiment 20000113 PARAMETER Experiment Name: At_42deg_Heat_cDNA_P Parameter: Tissue Value: Aerial
  misc_feature: MA Experiment ID: 20000117 Result: Up-regulated in Transcription
  misc_feature: MA Experiment 20000117 PARAMETER Experiment Name: At_100uM_ABA_Mutants_cDNA_P Parameter: Plant Line Value: Columbia
  misc_feature: MA Experiment 20000117 PARAMETER Experiment Name: At_100uM_ABA_Mutants_cDNA_P Parameter: Timepoint (hr) Value: 6
  misc_feature: MA Experiment 20000117 PARAMETER Experiment Name: At_100uM_ABA_Mutants_cDNA_P Parameter: Tissue Value: Aerial
  misc_feature: MA Experiment 20000117 PARAMETER Experiment Name: At_100uM_ABA_Mutants_cDNA_P Parameter: Treatment Value: 100uM ABA vs. No Treatment
  misc_feature: MA Experiment ID: 20000144 Result: Down-regulated in Transcription
  misc_feature: MA Experiment 20000144 PARAMETER Experiment Name: At_42deg_Heat_cDNA_P Parameter: Temperature (deg C) Value: 42 vs. 22
  misc_feature: MA Experiment 20000144 PARAMETER Experiment Name: At_42deg_Heat_cDNA_P Parameter: Timepoint (hr) Value: 1
  misc_feature: MA Experiment 20000144 PARAMETER Experiment Name: At_42deg_Heat_cDNA_P Parameter: Tissue Value: Aerial
  misc_feature: MA Experiment ID: 20000171 Result: Down-regulated in Transcription
  misc_feature: MA Experiment 20000171 PARAMETER Experiment Name: At_42deg_Heat_P Parameter: Age (day) Value: 14
  misc_feature: MA Experiment 20000171 PARAMETER Experiment Name: At_42deg_Heat_P Parameter: Organism Value: A. thaliana
  misc_feature: MA Experiment 20000171 PARAMETER Experiment Name: At_42deg_Heat_P Parameter: Plant Line Value: WS
  misc_feature: MA Experiment 20000171 PARAMETER Experiment Name: At_42deg_Heat_P Parameter: Temperature (deg C) Value: 42 vs. 22
  misc_feature: MA Experiment 20000171 PARAMETER Experiment Name: At_42deg_Heat_P Parameter: Timepoint (hr) Value: 1
  misc_feature: MA Experiment 20000171 PARAMETER Experiment Name: At_42deg_Heat_P Parameter: Tissue Value: Aerial
  misc_feature: MA Experiment ID: 20000173 Result: Down-regulated in Transcription
  misc_feature: MA Experiment 20000173 PARAMETER Experiment Name: At_42deg_Heat_P Parameter: Age (day) Value: 14
  misc_feature: MA Experiment 20000173 PARAMETER Experiment Name: At_42deg_Heat_P Parameter: Organism Value: A. thaliana
  misc_feature: MA Experiment 20000173 PARAMETER Experiment Name: At_42deg_Heat_P Parameter: Plant Line Value: WS
  misc_feature: MA Experiment 20000173 PARAMETER Experiment Name: At_42deg_Heat_P Parameter: Temperature (deg C) Value: 42 vs. 22
  misc_feature: MA Experiment 20000173 PARAMETER Experiment Name: At_42deg_Heat_P Parameter: Timepoint (hr) Value: 6
  misc_feature: MA Experiment 20000173 PARAMETER Experiment Name: At_42deg_Heat_P Parameter: Tissue Value: Aerial
  misc_feature: MA Experiment ID: 20000180 Result: Down-regulated in Transcription
  misc_feature: MA Experiment 20000180 PARAMETER Experiment Name: At_Germinating_Seeds_P Parameter: Age (hr) Value: 24 vs. 0
  misc_feature: MA Experiment 20000180 PARAMETER Experiment Name: At_Germinating_Seeds_P Parameter: Tissue Value: Germinating Seeds
  misc_feature: MA Experiment ID: 20000184 Result: Down-regulated in Transcription
  misc_feature: MA Experiment 20000184 PARAMETER Experiment Name: At_Shoots__P Parameter: Age (day) Value: 7
  misc_feature: MA Experiment 20000184 PARAMETER Experiment Name: At_Shoots__P Parameter: Tissue Value: Shoots vs. Whole Plant
  misc_feature: MA Experiment ID: 20000227 Result: Down-regulated in Transcription
  misc_feature: MA Experiment 20000227 PARAMETER Experiment Name: At_Root-Tips-vs-Tops_P Parameter: Tissue Value: Root Tips vs. Root Tops
  misc_feature: MA Experiment ID: 20000234 Result: Down-regulated in Transcription
  misc_feature: MA Experiment 20000234 PARAMETER Experiment Name: At_Siliques_P Parameter: Age (day) Value: 21
  misc_feature: MA Experiment 20000234 PARAMETER Experiment Name: At_Siliques_P Parameter: Organism Value: A. thaliana
  misc_feature: MA Experiment 20000234 PARAMETER Experiment Name: At_Siliques_P Parameter: Plant Line Value: WS
  misc_feature: MA Experiment 20000234 PARAMETER Experiment Name: At_Siliques_P Parameter: Tissue Value: Less Than 5mm Siliques vs. Whole Plant
  misc_feature: MA Experiment ID: 20000235 Result: Down-regulated in Transcription
  misc_feature: MA Experiment 20000235 PARAMETER Experiment Name: At_Siliques_P Parameter: Age (day) Value: 21
  misc_feature: MA Experiment 20000235 PARAMETER Experiment Name: At_Siliques_P Parameter: Organism Value: A. thaliana
  misc_feature: MA Experiment 20000235 PARAMETER Experiment Name: At_Siliques_P Parameter: Plant Line Value: WS
  misc_feature: MA Experiment 20000235 PARAMETER Experiment Name: At_Siliques_P Parameter: Tissue Value: 5-10mm Siliques vs. Whole Plant
  misc_feature: MA Experiment ID: 20000264 Result: Down-regulated in Transcription
  misc_feature: MA Experiment 20000264 PARAMETER Experiment Name: At_Open_Flower_P Parameter: Age (day) Value: 21
  misc_feature: MA Experiment 20000264 PARAMETER Experiment Name: At_Open_Flower_P Parameter: Plant Line Value: WS
  misc_feature: MA Experiment 20000264 PARAMETER Experiment Name: At_Open_Flower_P Parameter: Tissue Value: Open Flower vs. Whole Plant
  misc_feature: MA Experiment ID: 20000265 Result: Down-regulated in Transcription
  misc_feature: MA Experiment 20000265 PARAMETER Experiment Name: At_Open_Flower_P Parameter: Age (day) Value: 21
  misc_feature: MA Experiment 20000265 PARAMETER Experiment Name: At_Open_Flower_P Parameter: Plant Line Value: WS
  misc_feature: MA Experiment 20000265 PARAMETER Experiment Name: At_Open_Flower_P Parameter: Tissue Value: Closed Flower vs. Whole Plant
  misc_feature: MA Experiment ID: 20000286 Result: Down-regulated in Transcription
  misc_feature: MA Experiment 20000286 PARAMETER Experiment Name: At_Open_Flower_P Parameter: Age (day) Value: 21
  misc_feature: MA Experiment 20000286 PARAMETER Experiment Name: At_Open_Flower_P Parameter: Plant Line Value: WS
  misc_feature: MA Experiment 20000286 PARAMETER Experiment Name: At_Open_Flower_P Parameter: Tissue Value: Half Open vs. Whole Plant
  misc_feature: MA Experiment ID: 20000437 Result: Up-regulated in Transcription
  misc_feature: MA Experiment 20000437 PARAMETER Experiment Name: At_Drought_P Parameter: Age (day) Value: 8
  misc_feature: MA Experiment 20000437 PARAMETER Experiment Name: At_Drought_P Parameter: Organism Value: A. thaliana
  misc_feature: MA Experiment 20000437 PARAMETER Experiment Name: At_Drought_P Parameter: Plant Line Value: WS
  misc_feature: MA Experiment 20000437 PARAMETER Experiment Name: At_Drought_P Parameter: Timepoint (hr) Value: 24
  misc_feature: MA Experiment 20000437 PARAMETER Experiment Name: At_Drought_P Parameter: Tissue Value: Whole Plant
  misc_feature: MA Experiment 20000437 PARAMETER Experiment Name: At_Drought_P Parameter: Treatment Value: Drought vs. No Drought
  misc_feature: MA Experiment ID: 20000438 Result: Down-regulated in Transcription
  misc_feature: MA Experiment 20000438 PARAMETER Experiment Name: At_Shoots__P Parameter: Age (day) Value: 14
  misc_feature: MA Experiment 20000438 PARAMETER Experiment Name: At_Shoots__P Parameter: Tissue Value: Shoots vs. Whole Plant
  misc_feature: MA Experiment ID: 20000439 Result: Down-regulated in Transcription
  misc_feature: MA Experiment 20000439 PARAMETER Experiment Name: At_Roots__P Parameter: Age (day) Value: 14 vs. 21
  misc_feature: MA Experiment 20000439 PARAMETER Experiment Name: At_Roots__P Parameter: Organism Value: A. thaliana
  misc_feature: MA Experiment 20000439 PARAMETER Experiment Name: At_Roots__P Parameter: Tissue Value: Roots vs. Whole Plant
  misc_feature: MA Experiment ID: 20000441 Result: Up-regulated in Transcription
  misc_feature: MA Experiment 20000441 PARAMETER Experiment Name: At_1uM_BR-BRZ__P Parameter: Tissue Value: Shoot Apices
  misc_feature: MA Experiment 20000441 PARAMETER Experiment Name: At_1uM_BR-BRZ__P Parameter: Treatment Value: 1uM BR vs. No Treatment
  misc_feature: MA Experiment ID: 20000443 Result: Up-regulated in Transcription
  misc_feature: MA Experiment 20000443 PARAMETER Experiment Name: At_1uM_BR-BRZ__P Parameter: Tissue Value: Shoot Apices
  misc_feature: MA Experiment 20000443 PARAMETER Experiment Name: At_1uM_BR-BRZ__P Parameter: Treatment Value: 1uM BRZ vs. No Treatment
  misc_feature: MA Experiment ID: 20000452 Result: Up-regulated in Transcription
  misc_feature: MA Experiment 20000452 PARAMETER Experiment Name: At_CS6879_Shoots-Roots_P Parameter: Age (day) Value: 14
  misc_feature: MA Experiment 20000452 PARAMETER Experiment Name: At_CS6879_Shoots-Roots_P Parameter: Organism Value: A. thaliana
  misc_feature: MA Experiment 20000452 PARAMETER Experiment Name: At_CS6879_Shoots-Roots_P Parameter: Plant Line Value: CS6879 vs. WS
  misc_feature: MA Experiment 20000452 PARAMETER Experiment Name: At_CS6879_Shoots-Roots_P Parameter: Tissue Value: Shoots
  misc_feature: MA Experiment ID: 20000495 Result: Down-regulated in Transcription
  misc_feature: MA Experiment 20000495 PARAMETER Experiment Name: At_Guard_Cells_P Parameter: Harvest Date Value: 8/2/2002
  misc_feature: MA Experiment 20000495 PARAMETER Experiment Name: At_Guard_Cells_P Parameter: Organism Value: A. thaliana
  misc_feature: MA Experiment 20000495 PARAMETER Experiment Name: At_Guard_Cells_P Parameter: Tissue Value: Guard Cells vs. Leaves
  misc_feature: MA Experiment ID: 20000574 Result: Down-regulated in Transcription
  misc_feature: MA Experiment 20000574 PARAMETER Experiment Name: At_100uM_ABA_Mutants__P Parameter: Organism Value: A. thaliana
  misc_feature: MA Experiment 20000574 PARAMETER Experiment Name: At_100uM_ABA_Mutants__P Parameter: Plant Line Value: CS23 vs. Ler wt
  misc_feature: MA Experiment 20000574 PARAMETER Experiment Name: At_100uM_ABA_Mutants__P Parameter: Timepoint (hr) Value: N/A
  misc_feature: MA Experiment 20000574 PARAMETER Experiment Name: At_100uM_ABA_Mutants__P Parameter: Tissue Value: Whole Plant
  misc_feature: MA Experiment 20000574 PARAMETER Experiment Name: At_100uM_ABA_Mutants__P Parameter: Treatment Value: None
  misc_feature: MA Experiment ID: 20001248 Result: Up-regulated in Transcription
  misc_feature: MA Experiment 20001248 PARAMETER Experiment Name: At_Far-red-induction_P Parameter: Age (day) Value: 7
  misc_feature: MA Experiment 20001248 PARAMETER Experiment Name: At_Far-red-induction_P Parameter: Light Value: Far-red vs. White
  misc_feature: MA Experiment 20001248 PARAMETER Experiment Name: At_Far-red-induction_P Parameter: Organism Value: A. thaliana
  misc_feature: MA Experiment 20001248 PARAMETER Experiment Name: At_Far-red-induction_P Parameter: Plant Line Value: Columbia
  misc_feature: MA Experiment 20001248 PARAMETER Experiment Name: At_Far-red-induction_P Parameter: Timepoint (hr) Value: 4
  misc_feature: MA Experiment 20001248 PARAMETER Experiment Name: At_Far-red-induction_P Parameter: Tissue Value: Whole Plant
  misc_feature: MA Experiment ID: 20001911 Result: Up-regulated in Transcription
  misc_feature: MA Experiment 20001911 PARAMETER Experiment Name: At_Drought_Reproduction_P Parameter: Age (day) Value: 40
  misc_feature: MA Experiment 20001911 PARAMETER Experiment Name: At_Drought_Reproduction_P Parameter: Organism Value: A. thaliana
  misc_feature: MA Experiment 20001911 PARAMETER Experiment Name: At_Drought_Reproduction_P Parameter: Plant Line Value: WS
  misc_feature: MA Experiment 20001911 PARAMETER Experiment Name: At_Drought_Reproduction_P Parameter: Timepoint (day) Value: 10
  misc_feature: MA Experiment 20001911 PARAMETER Experiment Name: At_Drought_Reproduction_P Parameter: Tissue Value: Flowers
  misc_feature: MA Experiment 20001911 PARAMETER Experiment Name: At_Drought_Reproduction_P Parameter: Treatment Value: Drought vs. No Drought

SEQ ID NO: 31426 - protein, 333 aa, Arabidopsis thaliana; identical to SEQ ID NO: 27836
  peptide (1)..(333): Ceres Seq. ID no. 13497524
  misc_feature (70)..(329): Pfam Name: Protein kinase domain Pfam Description: Protein kinase domain
  misc_feature (33)..(329): Homolog of NCBI NO: 15217998 NR Description: mitogen-activated protein kinase kinase (MAPKK),
  misc_feature (24)..(329): Homolog of NCBI NO: 15528439 NR Description: MEK map kinase kinsae [Medicago sativa subsp. x
  misc_feature (33)..(332): Homolog of NCBI NO: 12484128 NR Description: mitogen-activated protein kinase 2 [Nicotiana
  misc_feature (23)..(329): Homolog of NCBI NO: 25287595 NR Description: mitogen-activated protein kinase kinase (EC
  misc_feature (23)..(329): Homolog of NCBI NO: 19698851 NR Description: MAP kinase kinase 5 [Arabidopsis thaliana]
  misc_feature (23)..(329): Homolog of NCBI NO: 15232491 NR Description: mitogen-activated protein kinase kinase (MAPKK),
  misc_feature (33)..(332): Homolog of NCBI NO: 33563103 NR Description: mitogen-activated protein kinase kinase [Solanum
  misc_feature (24)..(317): Homolog of NCBI NO: 15230671 NR Description: mitogen-activated protein kinase kinase (MAPKK),
  misc_feature (24)..(333): Homolog of NCBI NO: 15221060 NR Description: mitogen-activated protein kinase kinase (MAPKK),
  misc_feature (24)..(333): Homolog of NCBI NO: 15219482 NR Description: mitogen-activated protein kinase kinase (MAPKK),

SEQ ID NO: 31427 - protein, 310 aa, Arabidopsis thaliana; identical to SEQ ID NO: 27837
  peptide (1)..(310): Ceres Seq. ID no. 13497525
  misc_feature (47)..(306): Pfam Name: Protein kinase domain Pfam Description: Protein kinase domain
  misc_feature (10)..(306): Homolog of NCBI NO: 15217998 NR Description: mitogen-activated protein kinase kinase (MAPKK),
  misc_feature (1)..(306): Homolog of NCBI NO: 15528439 NR Description: MEK map kinase kinsae [Medicago sativa subsp. x
  misc_feature (10)..(309): Homolog of NCBI NO: 12484128 NR Description: mitogen-activated protein kinase 2 [Nicotiana
  misc_feature (1)..(306): Homolog of NCBI NO: 25287595 NR Description: mitogen-activated protein kinase kinase (EC
  misc_feature (1)..(306): Homolog of NCBI NO: 19698851 NR Description: MAP kinase kinase 5 [Arabidopsis thaliana]
  misc_feature (1)..(306): Homolog of NCBI NO: 15232491 NR Description: mitogen-activated protein kinase kinase (MAPKK),
  misc_feature (10)..(309): Homolog of NCBI NO: 33563103 NR Description: mitogen-activated protein kinase kinase [Solanum
  misc_feature (1)..(294): Homolog of NCBI NO: 15230671 NR Description: mitogen-activated protein kinase kinase (MAPKK),
  misc_feature (1)..(310): Homolog of NCBI NO: 15221060 NR Description: mitogen-activated protein kinase kinase (MAPKK),
  misc_feature (1)..(310): Homolog of NCBI NO: 15219482 NR Description: mitogen-activated protein kinase kinase (MAPKK),

SEQ ID NO: 31428 - protein, 229 aa, Arabidopsis thaliana; identical to SEQ ID NO: 27838
  peptide (1)..(229): Ceres Seq. ID no. 13497526
  misc_feature (1)..(225): Pfam Name: Protein kinase domain Pfam Description: Protein kinase domain
  misc_feature (1)..(225): Homolog of NCBI NO: 15217998 NR Description: mitogen-activated protein kinase kinase (MAPKK),
  misc_feature (1)..(225): Homolog of NCBI NO: 15528439 NR Description: MEK map kinase kinsae [Medicago sativa subsp. x
  misc_feature (1)..(228): Homolog of NCBI NO: 12484128 NR Description: mitogen-activated protein kinase 2 [Nicotiana
  misc_feature (1)..(225): Homolog of NCBI NO: 25287595 NR Description: mitogen-activated protein kinase kinase (EC
  misc_feature (1)..(225): Homolog of NCBI NO: 19698851 NR Description: MAP kinase kinase 5 [Arabidopsis thaliana]
  misc_feature (1)..(225): Homolog of NCBI NO: 15232491 NR Description: mitogen-activated protein kinase kinase (MAPKK),
  misc_feature (1)..(228): Homolog of NCBI NO: 33563103 NR Description: mitogen-activated protein kinase kinase [Solanum
  misc_feature (1)..(213): Homolog of NCBI NO: 15230671 NR Description: mitogen-activated protein kinase kinase (MAPKK),
  misc_feature (1)..(229): Homolog of NCBI NO: 15221060 NR Description: mitogen-activated protein kinase kinase (MAPKK),
  misc_feature (1)..(229): Homolog of NCBI NO: 15219482 NR Description: mitogen-activated protein kinase kinase (MAPKK),

SEQ ID NO: 31429 - DNA, 1266 bp, Arabidopsis thaliana; identical to SEQ ID NO: 27839
  misc_feature (1)..(1266): Ceres Seq. ID no. 12327432
  misc_feature: MA Experiment ID: 108434 Result: Up-regulated in Transcription
  misc_feature: MA Experiment 108434 PARAMETER Experiment Name: At_Root_Tips_cDNA_P Parameter: Tissue Value: Root Tips
  misc_feature: MA Experiment ID: 20000794 Result: Down-regulated in Transcription
  misc_feature: MA Experiment 20000794 PARAMETER Experiment Name: At_Petals_P Parameter: Age (day) Value: 23-25 days
  misc_feature: MA Experiment 20000794 PARAMETER Experiment Name: At_Petals_P Parameter: Plant Line Value: WS
  misc_feature: MA Experiment 20000794 PARAMETER Experiment Name: At_Petals_P Parameter: Tissue Value: Petals vs. Whole plant

SEQ ID NO: 31430 - protein, 364 aa, Arabidopsis thaliana; identical to SEQ ID NO: 27840
  peptide (1)..(364): Ceres Seq. ID no. 12327433
  misc_feature (50)..(360): Pfam Name: Homocysteine S-methyltransferase Pfam Description: Homocysteine S-methyltransferase
  misc_feature (39)..(363): Homolog of NCBI NO: 22748320 NR Description: Putative homocysteine S-methyltransferase-1
  misc_feature (39)..(354): Homolog of NCBI NO: 10732791 NR Description: homocysteine S-methyltransferase-4 [Zea mays]
  misc_feature (34)..(358): Homolog of NCBI NO: 10732789 NR Description: homocysteine S-methyltransferase-3 [Zea mays]
  misc_feature (34)..(358): Homolog of NCBI NO: 10732787 NR Description: homocysteine S-methyltransferase-2 [Zea mays]
  misc_feature (40)..(358): Homolog of NCBI NO: 37534456 NR Description: putative homocysteine S-methyltransferase-2
  misc_feature (40)..(363): Homolog of NCBI NO: 21593147 NR Description: putative selenocysteine methyltransferase
  misc_feature (40)..(363): Homolog of NCBI NO: 18403505 NR Description: putative selenocysteine methyltransferase
  misc_feature (42)..(363): Homolog of NCBI NO: 6094303 NR Description: Selenocysteine methyltransferase
  misc_feature (32)..(364): Homolog of NCBI NO: 25453566 NR Description: homocysteine S-methyltransferase (EC 2.1.1.10)
  misc_feature (32)..(364): Homolog of NCBI NO: 15229396 NR Description: homocysteine S-methyltransferase AtHMT-2

SEQ ID NO: 31431 - protein, 333 aa, Arabidopsis thaliana; identical to SEQ ID NO: 27841
  peptide (1)..(333): Ceres Seq. ID no. 12327434
  misc_feature (19)..(329): Pfam Name: Homocysteine S-methyltransferase Pfam Description: Homocysteine S-methyltransferase
  misc_feature (8)..(332): Homolog of NCBI NO: 22748320 NR Description: Putative homocysteine S-methyltransferase-1
  misc_feature (8)..(323): Homolog of NCBI NO: 10732791 NR Description: homocysteine S-methyltransferase-4 [Zea mays]
  misc_feature (3)..(327): Homolog of NCBI NO: 10732789 NR Description: homocysteine S-methyltransferase-3 [Zea mays]
  misc_feature (3)..(327): Homolog of NCBI NO: 10732787 NR Description: homocysteine S-methyltransferase-2 [Zea mays]
  misc_feature (9)..(327): Homolog of NCBI NO: 37534456 NR Description: putative homocysteine S-methyltransferase-2
  misc_feature (9)..(332): Homolog of NCBI NO: 21593147 NR Description: putative selenocysteine methyltransferase
  misc_feature (9)..(332): Homolog of NCBI NO: 18403505 NR Description: putative selenocysteine methyltransferase
  misc_feature (11)..(332): Homolog of NCBI NO: 6094303 NR Description: Selenocysteine methyltransferase
  misc_feature (1)..(333): Homolog of NCBI NO: 25453566 NR Description: homocysteine S-methyltransferase (EC 2.1.1.10)
  misc_feature (1)..(333): Homolog of NCBI NO: 15229396 NR Description: homocysteine S-methyltransferase AtHMT-2

SEQ ID NO: 31432 - protein, 325 aa, Arabidopsis thaliana; identical to SEQ ID NO: 27842
  peptide (1)..(325): Ceres Seq. ID no. 12327435
  misc_feature (11)..(321): Pfam Name: Homocysteine S-methyltransferase Pfam Description: Homocysteine S-methyltransferase
  misc_feature (1)..(324): Homolog of NCBI NO: 22748320 NR Description: Putative homocysteine S-methyltransferase-1
  misc_feature (1)..(315): Homolog of NCBI NO: 10732791 NR Description: homocysteine S-methyltransferase-4 [Zea mays]
  misc_feature (1)..(319): Homolog of NCBI NO: 10732789 NR Description: homocysteine S-methyltransferase-3 [Zea mays]
  misc_feature (1)..(319): Homolog of NCBI NO: 10732787 NR Description: homocysteine S-methyltransferase-2 [Zea mays]
  misc_feature (1)..(319): Homolog of NCBI NO: 37534456 NR Description: putative homocysteine S-methyltransferase-2
  misc_feature (1)..(324): Homolog of NCBI NO: 21593147 NR Description: putative selenocysteine methyltransferase
  misc_feature (1)..(324): Homolog of NCBI NO: 18403505 NR Description: putative selenocysteine methyltransferase
  misc_feature (3)..(324): Homolog of NCBI NO: 6094303 NR Description: Selenocysteine methyltransferase
  misc_feature (1)..(325): Homolog of NCBI NO: 25453566 NR Description: homocysteine S-methyltransferase (EC 2.1.1.10)
  misc_feature (1)..(325): Homolog of NCBI NO: 15229396 NR Description: homocysteine S-methyltransferase AtHMT-2

SEQ ID NO: 31433 - DNA, 771 bp, Arabidopsis thaliana; identical to SEQ ID NO: 27843
  misc_feature (1)..(771): Ceres Seq. ID no. 12333364
  misc_feature: MA Experiment ID: 108501 Result: Down-regulated in Transcription
  misc_feature: MA Experiment 108501 PARAMETER Experiment Name: At_ap2_floral_buds_cDNA_P Parameter: Plant Line Value: ap2 (Ler.)
  misc_feature: MA Experiment 108501 PARAMETER Experiment Name: At_ap2_floral_buds_cDNA_P Parameter: Tissue Value: Closed Flower

SEQ ID NO: 31434 - protein, 220 aa, Arabidopsis thaliana; identical to SEQ ID NO: 27844
  peptide (1)..(220): Ceres Seq. ID no. 12333365
  misc_feature (1)..(68): Homolog of NCBI NO: 15795162 NR Description: gb|AAD26968.1~gene_id:MQC3.25~similar to unknown
  misc_feature (1)..(68): Homolog of NCBI NO: 15230481 NR Description: hypothetical protein; protein id: At3g12430.1
  misc_feature (62)..(210): Homolog of NCBI NO: 15795162 NR Description: gb|AAD26968.1~gene_id:MQC3.25~similar to unknown
  misc_feature (62)..(210): Homolog of NCBI NO: 15230481 NR Description: hypothetical protein; protein id: At3g12430.1
  misc_feature (1)..(75): Homolog of NCBI NO: 15230500 NR Description: hypothetical protein; protein id: At3g12460.1
  misc_feature (72)..(213): Homolog of NCBI NO: 15230500 NR Description: hypothetical protein; protein id: At3g12460.1
  misc_feature (2)..(75): Homolog of NCBI NO: 15230479 NR Description: hypothetical protein; protein id: At3g12410.1
  misc_feature (72)..(212): Homolog of NCBI NO: 15230479 NR Description: hypothetical protein; protein id: At3g12410.1
  misc_feature (1)..(220): Homolog of NCBI NO: 18399624 NR Description: expressed protein
  misc_feature (1)..(220): Homolog of NCBI NO: 21595009 NR Description: unknown [Arabidopsis thaliana]

SEQ ID NO: 31435 - DNA, 698 bp, Arabidopsis thaliana; identical to SEQ ID NO: 27845
  misc_feature (1)..(698): Ceres Seq. ID no. 12340193
  misc_feature: MA Experiment ID: 20000173 Result: Down-regulated in Transcription
  misc_feature: MA Experiment 20000173 PARAMETER Experiment Name: At_42deg_Heat_P Parameter: Age (day) Value: 14
  misc_feature: MA Experiment 20000173 PARAMETER Experiment Name: At_42deg_Heat_P Parameter: Organism Value: A. thaliana
  misc_feature: MA Experiment 20000173 PARAMETER Experiment Name: At_42deg_Heat_P Parameter: Plant Line Value: WS
  misc_feature: MA Experiment 20000173 PARAMETER Experiment Name: At_42deg_Heat_P Parameter: Temperature (deg C) Value: 42 vs. 22
  misc_feature: MA Experiment 20000173 PARAMETER Experiment Name: At_42deg_Heat_P Parameter: Timepoint (hr) Value: 6
  misc_feature: MA Experiment 20000173 PARAMETER Experiment Name: At_42deg_Heat_P Parameter: Tissue Value: Aerial
  misc_feature: MA Experiment ID: 20000182 Result: Up-regulated in Transcription
  misc_feature: MA Experiment 20000182 PARAMETER Experiment Name: At_2mM_SA_P Parameter: Age (day) Value: 14
  misc_feature: MA Experiment 20000182 PARAMETER Experiment Name: At_2mM_SA_P Parameter: Organism Value: A. thaliana
  misc_feature: MA Experiment 20000182 PARAMETER Experiment Name: At_2mM_SA_P Parameter: Plant Line Value: WS
  misc_feature: MA Experiment 20000182 PARAMETER Experiment Name: At_2mM_SA_P Parameter: Timepoint (hr) Value: 6
  misc_feature: MA Experiment 20000182 PARAMETER Experiment Name: At_2mM_SA_P Parameter: Tissue Value: Aerial
  misc_feature: MA Experiment 20000182 PARAMETER Experiment Name: At_2mM_SA_P Parameter: Treatment Value: 2mM SA vs. No Treatment
  misc_feature: MA Experiment ID: 20000184 Result: Down-regulated in Transcription
  misc_feature: MA Experiment 20000184 PARAMETER Experiment Name: At_Shoots__P Parameter: Age (day) Value: 7
  misc_feature: MA Experiment 20000184 PARAMETER Experiment Name: At_Shoots__P Parameter: Tissue Value: Shoots vs. Whole Plant
  misc_feature: MA Experiment ID: 20000185 Result: Up-regulated in Transcription
  misc_feature: MA Experiment 20000185 PARAMETER Experiment Name: At_Roots__P Parameter: Age (day) Value: 7 vs. 21
  misc_feature: MA Experiment 20000185 PARAMETER Experiment Name: At_Roots__P Parameter: Organism Value: A. thaliana
  misc_feature: MA Experiment 20000185 PARAMETER Experiment Name: At_Roots__P Parameter: Tissue Value: Roots vs. Whole Plant
  misc_feature: MA Experiment ID: 20000227 Result: Down-regulated in Transcription
  misc_feature: MA Experiment 20000227 PARAMETER Experiment Name: At_Root-Tips-vs-Tops_P Parameter: Tissue Value: Root Tips vs. Root Tops
  misc_feature: MA Experiment ID: 20000234 Result: Down-regulated in Transcription
  misc_feature: MA Experiment 20000234 PARAMETER Experiment Name: At_Siliques_P Parameter: Age (day) Value: 21
  misc_feature: MA Experiment 20000234 PARAMETER Experiment Name: At_Siliques_P Parameter: Organism Value: A. thaliana
  misc_feature: MA Experiment 20000234 PARAMETER Experiment Name: At_Siliques_P Parameter: Plant Line Value: WS
  misc_feature: MA Experiment 20000234 PARAMETER Experiment Name: At_Siliques_P Parameter: Tissue Value: Less Than 5mm Siliques vs. Whole Plant
  misc_feature: MA Experiment ID: 20000235 Result: Down-regulated in Transcription
  misc_feature: MA Experiment 20000235 PARAMETER Experiment Name: At_Siliques_P Parameter: Age (day) Value: 21
  misc_feature: MA Experiment 20000235 PARAMETER Experiment Name: At_Siliques_P Parameter: Organism Value: A. thaliana
  misc_feature: MA Experiment 20000235 PARAMETER Experiment Name: At_Siliques_P Parameter: Plant Line Value: WS
  misc_feature: MA Experiment 20000235 PARAMETER Experiment Name: At_Siliques_P Parameter: Tissue Value: 5-10mm Siliques vs. Whole Plant
  misc_feature: MA Experiment ID: 20000264 Result: Down-regulated in Transcription
  misc_feature: MA Experiment 20000264 PARAMETER Experiment Name: At_Open_Flower_P Parameter: Age (day) Value: 21
  misc_feature: MA Experiment 20000264 PARAMETER Experiment Name: At_Open_Flower_P Parameter: Plant Line Value: WS
  misc_feature: MA Experiment 20000264 PARAMETER Experiment Name: At_Open_Flower_P Parameter: Tissue Value: Open Flower vs. Whole Plant
  misc_feature: MA Experiment ID: 20000269 Result: Down-regulated in Transcription
  misc_feature: MA Experiment 20000269 PARAMETER Experiment Name: At_1mM_KNO3_L-vs-H_Roots_P Parameter: Age (day) Value: 7,10,12
  misc_feature: MA Experiment 20000269 PARAMETER Experiment Name: At_1mM_KNO3_L-vs-H_Roots_P Parameter: Organism Value: A. thaliana
  misc_feature: MA Experiment 20000269 PARAMETER Experiment Name: At_1mM_KNO3_L-vs-H_Roots_P Parameter: Plant Line Value: WS
  misc_feature: MA Experiment 20000269 PARAMETER Experiment Name: At_1mM_KNO3_L-vs-H_Roots_P Parameter: Timepoint (day) Value: 7,10,12
  misc_feature: MA Experiment 20000269 PARAMETER Experiment Name: At_1mM_KNO3_L-vs-H_Roots_P Parameter: Tissue Value: Roots
  misc_feature: MA Experiment 20000269 PARAMETER Experiment Name: At_1mM_KNO3_L-vs-H_Roots_P Parameter: Treatment Value: 1mM KNO3 vs. 50mM KNO3
  misc_feature: MA Experiment ID: 20000286 Result: Down-regulated in Transcription
  misc_feature: MA Experiment 20000286 PARAMETER Experiment Name: At_Open_Flower_P Parameter: Age (day) Value: 21
  misc_feature: MA Experiment 20000286 PARAMETER Experiment Name: At_Open_Flower_P Parameter: Plant Line Value: WS
  misc_feature: MA Experiment 20000286 PARAMETER Experiment Name: At_Open_Flower_P Parameter: Tissue Value: Half Open vs. Whole Plant
  misc_feature: MA Experiment ID: 20000308 Result: Up-regulated in Transcription
  misc_feature: MA Experiment 20000308 PARAMETER Experiment Name: At_100mM_NaCl__P Parameter: Age (day) Value: 17
  misc_feature: MA Experiment 20000308 PARAMETER Experiment Name: At_100mM_NaCl__P Parameter: Organism Value: A. thaliana
  misc_feature: MA Experiment 20000308 PARAMETER Experiment Name: At_100mM_NaCl__P Parameter: Plant Line Value: WS
  misc_feature: MA Experiment 20000308 PARAMETER Experiment Name: At_100mM_NaCl__P Parameter: Timepoint (hr) Value: 72
  misc_feature: MA Experiment 20000308 PARAMETER Experiment Name: At_100mM_NaCl__P Parameter: Tissue Value: Whole Plant
  misc_feature: MA Experiment 20000308 PARAMETER Experiment Name: At_100mM_NaCl__P Parameter: Treatment Value: 100mM NaCl vs. No Treatment
  misc_feature: MA Experiment ID: 20000438 Result: Down-regulated in Transcription
  misc_feature: MA Experiment 20000438 PARAMETER Experiment Name: At_Shoots__P Parameter: Age (day) Value: 14
  misc_feature: MA Experiment 20000438 PARAMETER Experiment Name: At_Shoots__P Parameter: Tissue Value: Shoots vs. Whole Plant
  misc_feature: MA Experiment ID: 20000439 Result: Up-regulated in Transcription
  misc_feature: MA Experiment 20000439 PARAMETER Experiment Name: At_Roots__P Parameter: Age (day) Value: 14 vs. 21
  misc_feature: MA Experiment 20000439 PARAMETER Experiment Name: At_Roots__P Parameter: Organism Value: A. thaliana
  misc_feature: MA Experiment 20000439 PARAMETER Experiment Name: At_Roots__P Parameter: Tissue Value: Roots vs. Whole Plant
  misc_feature: MA Experiment ID: 20000453 Result: Up-regulated in Transcription
  misc_feature: MA Experiment 20000453 PARAMETER Experiment Name: At_100uM_ABA_P Parameter: Age (day) Value: 15
  misc_feature: MA Experiment 20000453 PARAMETER Experiment Name: At_100uM_ABA_P Parameter: Organism Value: A. thaliana
  misc_feature: MA Experiment 20000453 PARAMETER Experiment Name: At_100uM_ABA_P Parameter: Plant Line Value: WS
  misc_feature: MA Experiment 20000453 PARAMETER Experiment Name: At_100uM_ABA_P Parameter: Timepoint (hr) Value: 24
  misc_feature: MA Experiment 20000453 PARAMETER Experiment Name: At_100uM_ABA_P Parameter: Tissue Value: Aerial
  misc_feature: MA Experiment 20000453 PARAMETER Experiment Name: At_100uM_ABA_P Parameter: Treatment Value: 100uM ABA vs. No Treatment
  misc_feature: MA Experiment ID: 20000456 Result: Down-regulated in Transcription
  misc_feature: MA Experiment 20000456 PARAMETER Experiment Name: At_100uM_BA_P Parameter: Age (day) Value: 14
  misc_feature: MA Experiment 20000456 PARAMETER Experiment Name: At_100uM_BA_P Parameter: Organism Value: A. thaliana
  misc_feature: MA Experiment 20000456 PARAMETER Experiment Name: At_100uM_BA_P Parameter: Plant Line Value: WS
  misc_feature: MA Experiment 20000456 PARAMETER Experiment Name: At_100uM_BA_P Parameter: Timepoint (hr) Value: 6
  misc_feature: MA Experiment 20000456 PARAMETER Experiment Name: At_100uM_BA_P Parameter: Tissue Value: Aerial
  misc_feature: MA Experiment 20000456 PARAMETER Experiment Name: At_100uM_BA_P Parameter: Treatment Value: 100uM BA vs. No Treatment
  misc_feature: MA Experiment ID: 20000527 Result: Down-regulated in Transcription
  misc_feature: MA Experiment 20000527 PARAMETER Experiment Name: At_10percent_PEG_P Parameter: Age (day) Value: 20
  misc_feature: MA Experiment 20000527 PARAMETER Experiment Name: At_10percent_PEG_P Parameter: Organism Value: A. thaliana
  misc_feature: MA Experiment 20000527 PARAMETER Experiment Name: At_10percent_PEG_P Parameter: Plant Line Value: WS
  misc_feature: MA Experiment 20000527 PARAMETER Experiment Name: At_10percent_PEG_P Parameter: Timepoint (day) Value: 20
  misc_feature: MA Experiment 20000527 PARAMETER Experiment Name: At_10percent_PEG_P Parameter: Tissue Value: Whole Plant
  misc_feature: MA Experiment 20000527 PARAMETER Experiment Name: At_10percent_PEG_P Parameter: Treatment Value: 10percent PEG vs. No Treatment
  misc_feature: MA Experiment ID: 20000794 Result: Down-regulated in Transcription
  misc_feature: MA Experiment 20000794 PARAMETER Experiment Name: At_Petals_P Parameter: Age (day) Value: 23-25 days
  misc_feature: MA Experiment 20000794 PARAMETER Experiment Name: At_Petals_P Parameter: Plant Line Value: WS
  misc_feature: MA Experiment 20000794 PARAMETER Experiment Name: At_Petals_P Parameter: Tissue Value: Petals vs. Whole plant
  misc_feature: MA Experiment ID: 20001450 Result: Down-regulated in Transcription
  misc_feature: MA Experiment 20001450 PARAMETER Experiment Name: At_Far-red-induction_P Parameter: Age (day) Value: 7
  misc_feature: MA Experiment 20001450 PARAMETER Experiment Name: At_Far-red-induction_P Parameter: Light Value: Far-red vs. White
  misc_feature: MA Experiment 20001450 PARAMETER Experiment Name: At_Far-red-induction_P Parameter: Organism Value: A. thaliana
  misc_feature: MA Experiment 20001450 PARAMETER Experiment Name: At_Far-red-induction_P Parameter: Plant Line Value: Columbia
  misc_feature: MA Experiment 20001450 PARAMETER Experiment Name: At_Far-red-induction_P Parameter: Timepoint (hr) Value: 8
  misc_feature: MA Experiment 20001450 PARAMETER Experiment Name: At_Far-red-induction_P Parameter: Tissue Value: Whole Plant
  misc_feature: MA Experiment ID: 20001451 Result: Up-regulated in Transcription
  misc_feature: MA Experiment 20001451 PARAMETER Experiment Name: At_Far-red-induction_P Parameter: Age (day) Value: 7
  misc_feature: MA Experiment 20001451 PARAMETER Experiment Name: At_Far-red-induction_P Parameter: Light Value: Far-red vs. White
  misc_feature: MA Experiment 20001451 PARAMETER Experiment Name: At_Far-red-induction_P Parameter: Organism Value: A. thaliana
  misc_feature: MA Experiment 20001451 PARAMETER Experiment Name: At_Far-red-induction_P Parameter: Plant Line Value: Columbia
  misc_feature: MA Experiment 20001451 PARAMETER Experiment Name: At_Far-red-induction_P Parameter: Timepoint (hr) Value: 24
  misc_feature: MA Experiment 20001451 PARAMETER Experiment Name: At_Far-red-induction_P Parameter: Tissue Value: Whole Plant
  misc_feature: MA Experiment ID: 20001554 Result: Down-regulated in Transcription
  misc_feature: MA Experiment 20001554 PARAMETER Experiment Name: At_Drought_Soil_Dry_P Parameter: Age (day) Value: 21
  misc_feature: MA Experiment 20001554 PARAMETER Experiment Name: At_Drought_Soil_Dry_P Parameter: Organism Value: A. thaliana
  misc_feature: MA Experiment 20001554 PARAMETER Experiment Name: At_Drought_Soil_Dry_P Parameter: Plant Line Value: WS
  misc_feature: MA Experiment 20001554 PARAMETER Experiment Name: At_Drought_Soil_Dry_P Parameter: Post Timepoint (hr) Value: None
  misc_feature: MA Experiment 20001554 PARAMETER Experiment Name: At_Drought_Soil_Dry_P Parameter: Post-Treatment Value: None
  misc_feature: MA Experiment 20001554 PARAMETER Experiment Name: At_Drought_Soil_Dry_P Parameter: Timepoint (day) Value: 7
  misc_feature: MA Experiment 20001554 PARAMETER Experiment Name: At_Drought_Soil_Dry_P Parameter: Treatment Value: Drought vs. No Drought
  misc_feature: MA Experiment ID: 20001555 Result: Down-regulated in Transcription
  misc_feature: MA Experiment 20001555 PARAMETER Experiment Name: At_Drought_Soil_Dry_P Parameter: Age (day) Value: 24
  misc_feature: MA Experiment 20001555 PARAMETER Experiment Name: At_Drought_Soil_Dry_P Parameter: Organism Value: A. thaliana
  misc_feature: MA Experiment 20001555 PARAMETER Experiment Name: At_Drought_Soil_Dry_P Parameter: Plant Line Value: WS
  misc_feature: MA Experiment 20001555 PARAMETER Experiment Name: At_Drought_Soil_Dry_P Parameter: Post Timepoint (hr) Value: None
  misc_feature: MA Experiment 20001555 PARAMETER Experiment Name: At_Drought_Soil_Dry_P Parameter: Post-Treatment Value: None
  misc_feature: MA Experiment 20001555 PARAMETER Experiment Name: At_Drought_Soil_Dry_P Parameter: Timepoint (day) Value: 10
  misc_feature: MA Experiment 20001555 PARAMETER Experiment Name: At_Drought_Soil_Dry_P Parameter: Treatment Value: Drought vs. No Drought
  misc_feature: MA Experiment ID: 20001556 Result: Down-regulated in Transcription
  misc_feature: MA Experiment 20001556 PARAMETER Experiment Name: At_Drought_Soil_Dry_P Parameter: Age (day) Value: 26
  misc_feature: MA Experiment 20001556 PARAMETER Experiment Name: At_Drought_Soil_Dry_P Parameter: Organism Value: A. thaliana
  misc_feature: MA Experiment 20001556 PARAMETER Experiment Name: At_Drought_Soil_Dry_P Parameter: Plant Line Value: WS
  misc_feature: MA Experiment 20001556 PARAMETER Experiment Name: At_Drought_Soil_Dry_P Parameter: Post Timepoint (hr) Value: None
  misc_feature: MA Experiment 20001556 PARAMETER Experiment Name: At_Drought_Soil_Dry_P Parameter: Post-Treatment Value: None
  misc_feature: MA Experiment 20001556 PARAMETER Experiment Name: At_Drought_Soil_Dry_P Parameter: Timepoint (day) Value: 12
  misc_feature: MA Experiment 20001556 PARAMETER Experiment Name: At_Drought_Soil_Dry_P Parameter: Treatment Value: Drought vs. No Drought
  misc_feature: MA Experiment ID: 20001557 Result: Down-regulated in Transcription
  misc_feature: MA Experiment 20001557 PARAMETER Experiment Name: At_Drought_Soil_Dry_P Parameter: Age (day) Value: 27
  misc_feature: MA Experiment 20001557 PARAMETER Experiment Name: At_Drought_Soil_Dry_P Parameter: Organism Value: A. thaliana
  misc_feature: MA Experiment 20001557 PARAMETER Experiment Name: At_Drought_Soil_Dry_P Parameter: Plant Line Value: WS
  misc_feature: MA Experiment 20001557 PARAMETER Experiment Name: At_Drought_Soil_Dry_P Parameter: Post Timepoint (hr) Value: 3
  misc_feature: MA Experiment 20001557 PARAMETER Experiment Name: At_Drought_Soil_Dry_P Parameter: Post-Treatment Value: Re-Water vs. No Drought
  misc_feature: MA Experiment 20001557 PARAMETER Experiment Name: At_Drought_Soil_Dry_P Parameter: Timepoint (day) Value: 13
  misc_feature: MA Experiment 20001557 PARAMETER Experiment Name: At_Drought_Soil_Dry_P Parameter: Treatment Value: Drought vs. No Drought
  misc_feature: MA Experiment ID: 20001558 Result: Down-regulated in Transcription
  misc_feature: MA Experiment 20001558 PARAMETER Experiment Name: At_Drought_Soil_Dry_P Parameter: Age (day) Value: 27
  misc_feature: MA Experiment 20001558 PARAMETER Experiment Name: At_Drought_Soil_Dry_P Parameter: Organism Value: A. thaliana
  misc_feature: MA Experiment 20001558 PARAMETER Experiment Name: At_Drought_Soil_Dry_P Parameter: Plant Line Value: WS
  misc_feature: MA Experiment 20001558 PARAMETER Experiment Name: At_Drought_Soil_Dry_P Parameter: Post Timepoint (hr) Value: 6
  misc_feature: MA Experiment 20001558 PARAMETER Experiment Name: At_Drought_Soil_Dry_P Parameter: Post-Treatment Value: Re-Water vs. No Drought
  misc_feature: MA Experiment 20001558 PARAMETER Experiment Name: At_Drought_Soil_Dry_P Parameter: Timepoint (day) Value: 13
  misc_feature: MA Experiment 20001558 PARAMETER Experiment Name: At_Drought_Soil_Dry_P Parameter: Treatment Value: Drought vs. No Drought
  misc_feature: MA Experiment ID: 20001559 Result: Down-regulated in Transcription
  misc_feature: MA Experiment 20001559 PARAMETER Experiment Name: At_Drought_Soil_Dry_P Parameter: Age (day) Value: 28
  misc_feature: MA Experiment 20001559 PARAMETER Experiment Name: At_Drought_Soil_Dry_P Parameter: Organism Value: A. thaliana
  misc_feature: MA Experiment 20001559 PARAMETER Experiment Name: At_Drought_Soil_Dry_P Parameter: Plant Line Value: WS
  misc_feature: MA Experiment 20001559 PARAMETER Experiment Name: At_Drought_Soil_Dry_P Parameter: Post Timepoint (hr) Value: 29
  misc_feature: MA Experiment 20001559 PARAMETER Experiment Name: At_Drought_Soil_Dry_P Parameter: Post-Treatment Value: Re-Water vs. No Drought
  misc_feature: MA Experiment 20001559 PARAMETER Experiment Name: At_Drought_Soil_Dry_P Parameter: Timepoint (day) Value: 14
  misc_feature: MA Experiment 20001559 PARAMETER Experiment Name: At_Drought_Soil_Dry_P Parameter: Treatment Value: Drought vs. No Drought
  misc_feature: MA Experiment ID: 20001560 Result: Down-regulated in Transcription
  misc_feature: MA Experiment 20001560 PARAMETER Experiment Name: At_Drought_Soil_Dry_P Parameter: Age (day) Value: 28
  misc_feature: MA Experiment 20001560 PARAMETER Experiment Name: At_Drought_Soil_Dry_P Parameter: Organism Value: A. thaliana
  misc_feature: MA Experiment 20001560 PARAMETER Experiment Name: At_Drought_Soil_Dry_P Parameter: Plant Line Value: WS
  misc_feature: MA Experiment 20001560 PARAMETER Experiment Name: At_Drought_Soil_Dry_P Parameter: Post Timepoint (hr) Value: None
  misc_feature: MA Experiment 20001560 PARAMETER Experiment Name: At_Drought_Soil_Dry_P Parameter: Post-Treatment Value: None
  misc_feature: MA Experiment 20001560 PARAMETER Experiment Name: At_Drought_Soil_Dry_P Parameter: Timepoint (day) Value: 14
  misc_feature: MA Experiment 20001560 PARAMETER Experiment Name: At_Drought_Soil_Dry_P Parameter: Treatment Value: Drought vs. No Drought

SEQ ID NO: 31436 - protein, 189 aa, Arabidopsis thaliana; identical to SEQ ID NO: 27846
  peptide (1)..(189): Ceres Seq. ID no. 12340194
  misc_feature (1)..(179): Pfam Name: Glycosyl hydrolases family 17 Pfam Description: Glycosyl hydrolases family 17
  misc_feature (1)..(147): Homolog of NCBI NO: 15234880 NR Description: glycosyl hydrolase family 17
  misc_feature (1)..(179): Homolog of NCBI NO: 2506467 NR Description: Lichenase precursor (Endo-beta-1,3-1,4 glucanase)
  misc_feature (1)..(179): Homolog of NCBI NO: 82131 NR Description: beta-glucanase (EC 3.2.1.-) precursor -
  misc_feature (1)..(179): Homolog of NCBI NO: 82130 NR Description: beta-1,3-glucanase (EC 3.2.1.-) precursor -
  misc_feature (1)..(179): Homolog of NCBI NO: 10946499 NR Description: beta-1,3-glucanase [Hevea brasiliensis]
  misc_feature (1)..(179): Homolog of NCBI NO: 4469175 NR Description: beta-1,3-glucanase [Hevea brasiliensis]
  misc_feature (1)..(183): Homolog of NCBI NO: 22550395 NR Description: beta-1,3-glucanase [Vitis vinifera]
  misc_feature (1)..(184): Homolog of NCBI NO: 1706547 NR Description: Glucan endo-1,3-beta-glucosidase, basic vacuolar
  misc_feature (1)..(184): Homolog of NCBI NO: 32765543 NR Description: beta-1,3-glucanase [Hevea brasiliensis]
  misc_feature (1)..(189): Homolog of NCBI NO: 17381238 NR Description: AT4g16260/dl4170c [Arabidopsis thaliana]

SEQ ID NO: 31437 - DNA, 707 bp, Arabidopsis thaliana; identical to SEQ ID NO: 27847
  misc_feature (1)..(707): Ceres Seq. ID no. 12370068
  misc_feature: MA Experiment ID: 20000069 Result: Up-regulated in Transcription
  misc_feature: MA Experiment 20000069 PARAMETER Experiment Name: At_100uM_ABA_Mutants_cDNA_P Parameter: Plant Line Value: CS23
  misc_feature: MA Experiment 20000069 PARAMETER Experiment Name: At_100uM_ABA_Mutants_cDNA_P Parameter: Timepoint (hr) Value: 6
  misc_feature: MA Experiment 20000069 PARAMETER Experiment Name: At_100uM_ABA_Mutants_cDNA_P Parameter: Tissue Value: Aerial
  misc_feature: MA Experiment 20000069 PARAMETER Experiment Name: At_100uM_ABA_Mutants_cDNA_P Parameter: Treatment Value: 100uM ABA vs. No Treatment
  misc_feature: MA Experiment ID: 20000070 Result: Up-regulated in Transcription
  misc_feature: MA Experiment 20000070 PARAMETER Experiment Name: At_100uM_ABA_Mutants_cDNA_P Parameter: Plant Line Value: CS24
  misc_feature: MA Experiment 20000070 PARAMETER Experiment Name: At_100uM_ABA_Mutants_cDNA_P Parameter: Timepoint (hr) Value: 6
  misc_feature: MA Experiment 20000070 PARAMETER Experiment Name: At_100uM_ABA_Mutants_cDNA_P Parameter: Tissue Value: Aerial
  misc_feature: MA Experiment 20000070 PARAMETER Experiment Name: At_100uM_ABA_Mutants_cDNA_P Parameter: Treatment Value: 100uM ABA vs. No Treatment
  misc_feature: MA Experiment ID: 20000314 Result: Up-regulated in Transcription
  misc_feature: MA Experiment 20000314 PARAMETER Experiment Name: At_14day_Shoots-Roots_Sub_P Parameter: Age (day) Value: 14
  misc_feature: MA Experiment 20000314 PARAMETER Experiment Name: At_14day_Shoots-Roots_Sub_P Parameter: Organism Value: A. thaliana
  misc_feature: MA Experiment 20000314 PARAMETER Experiment Name: At_14day_Shoots-Roots_Sub_P Parameter: Plant Line Value: WS
  misc_feature: MA Experiment 20000314 PARAMETER Experiment Name: At_14day_Shoots-Roots_Sub_P Parameter: Tissue Value: Roots vs. Whole Plant
  misc_feature: MA Experiment ID: 20000327 Result: Down-regulated in Transcription
  misc_feature: MA Experiment 20000327 PARAMETER Experiment Name: At_42deg_Heat_Sub_P Parameter: Age (day) Value: 14
  misc_feature: MA Experiment 20000327 PARAMETER Experiment Name: At_42deg_Heat_Sub_P Parameter: Organism Value: A. thaliana
  misc_feature: MA Experiment 20000327 PARAMETER Experiment Name: At_42deg_Heat_Sub_P Parameter: Plant Line Value: WS
  misc_feature: MA Experiment 20000327 PARAMETER Experiment Name: At_42deg_Heat_Sub_P Parameter: Temperature (deg C) Value: 42 vs. 22
  misc_feature: MA Experiment 20000327 PARAMETER Experiment Name: At_42deg_Heat_Sub_P Parameter: Timepoint (hr) Value: 1
  misc_feature: MA Experiment 20000327 PARAMETER Experiment Name: At_42deg_Heat_Sub_P Parameter: Tissue Value: Aerial
  misc_feature: MA Experiment ID: 20000328 Result: Down-regulated in Transcription
  misc_feature: MA Experiment 20000328 PARAMETER Experiment Name: At_42deg_Heat_Sub_P Parameter: Age (day) Value: 14
  misc_feature: MA Experiment 20000328 PARAMETER Experiment Name: At_42deg_Heat_Sub_P Parameter: Organism Value: A. thaliana
  misc_feature: MA Experiment 20000328 PARAMETER Experiment Name: At_42deg_Heat_Sub_P Parameter: Plant Line Value: WS
  misc_feature: MA Experiment 20000328 PARAMETER Experiment Name: At_42deg_Heat_Sub_P Parameter: Temperature (deg C) Value: 42 vs. 22
  misc_feature: MA Experiment 20000328 PARAMETER Experiment Name: At_42deg_Heat_Sub_P Parameter: Timepoint (hr) Value: 6
  misc_feature: MA Experiment 20000328 PARAMETER Experiment Name: At_42deg_Heat_Sub_P Parameter: Tissue Value: Aerial
  misc_feature: MA Experiment ID: 20000355 Result: Up-regulated in Transcription
  misc_feature: MA Experiment 20000355 PARAMETER Experiment Name: At_Siliques_Sub_P Parameter: Age (day) Value: 21
  misc_feature: MA Experiment 20000355 PARAMETER Experiment Name: At_Siliques_Sub_P Parameter: Organism Value: A. thaliana
  misc_feature: MA Experiment 20000355 PARAMETER Experiment Name: At_Siliques_Sub_P Parameter: Plant Line Value: WS
  misc_feature: MA Experiment 20000355 PARAMETER Experiment Name: At_Siliques_Sub_P Parameter: Tissue Value: Less Than 5mm Siliques vs. Whole Plant

SEQ ID NO: 31438 - protein, 183 aa, Arabidopsis thaliana; identical to SEQ ID NO: 27848
  peptide (1)..(183): Ceres Seq. ID no. 12370069
  misc_feature (1)..(179): Homolog of NCBI NO: 37533460 NR Description: hypothetical protein [Oryza sativa (japonica
  misc_feature (1)..(181): Homolog of NCBI NO: 30691875 NR Description: glycosyltransferase family 8 [Arabidopsis
  misc_feature (1)..(181): Homolog of NCBI NO: 7485958 NR Description: hypothetical protein F22I13.40 - Arabidopsis
  misc_feature (1)..(181): Homolog of NCBI NO: 7271113 NR Description: 68 kDa protein [Cicer arietinum]
  misc_feature (1)..(181): Homolog of NCBI NO: 38423965 NR Description: putative glycosyltransferase
  misc_feature (1)..(181): Homolog of NCBI NO: 15233046 NR Description: putative protein
  misc_feature (1)..(181): Homolog of NCBI NO: 18422837 NR Description: putative protein
  misc_feature (1)..(181): Homolog of NCBI NO: 10177914 NR Description: emb|CAB71043.1~gene_id:MCA23.10~strong similarity
  misc_feature (1)..(181): Homolog of NCBI NO: 30684642 NR Description: glycosyltransferase family 8 [Arabidopsis
  misc_feature (1)..(183): Homolog of NCBI NO: 18390688 NR Description: expressed protein

SEQ ID NO: 31439 - protein, 162 aa, Arabidopsis thaliana; identical to SEQ ID NO: 27849
  peptide (1)..(162): Ceres Seq. ID no. 12370070
  misc_feature (1)..(158): Homolog of NCBI NO: 37533460 NR Description: hypothetical protein [Oryza sativa (japonica
  misc_feature (1)..(160): Homolog of NCBI NO: 30691875 NR Description: glycosyltransferase family 8 [Arabidopsis
  misc_feature (1)..(160): Homolog of NCBI NO: 7485958 NR Description: hypothetical protein F22I13.40 - Arabidopsis
  misc_feature (1)..(160): Homolog of NCBI NO: 7271113 NR Description: 68 kDa protein [Cicer arietinum]
  misc_feature (1)..(160): Homolog of NCBI NO: 38423965 NR Description: putative glycosyltransferase
  misc_feature (1)..(160): Homolog of NCBI NO: 15233046 NR Description: putative protein
  misc_feature (1)..(160): Homolog of NCBI NO: 18422837 NR Description: putative protein
  misc_feature (1)..(160): Homolog of NCBI NO: 10177914 NR Description: emb|CAB71043.1~gene_id:MCA23.10~strong similarity
  misc_feature (1)..(160): Homolog of NCBI NO: 30684642 NR Description: glycosyltransferase family 8 [Arabidopsis
  misc_feature (1)..(162): Homolog of NCBI NO: 18390688 NR Description: expressed protein

SEQ ID NO: 31440 - protein, 141 aa, Arabidopsis thaliana; identical to SEQ ID NO: 27850
  peptide (1)..(141): Ceres Seq. ID no. 12370071
  misc_feature (1)..(137): Homolog of NCBI NO: 37533460 NR Description: hypothetical protein [Oryza sativa (japonica
  misc_feature (1)..(139): Homolog of NCBI NO: 30691875 NR Description: glycosyltransferase family 8 [Arabidopsis
  misc_feature (1)..(139): Homolog of NCBI NO: 7485958 NR Description: hypothetical protein F22I13.40 - Arabidopsis
  misc_feature (1)..(139): Homolog of NCBI NO: 7271113 NR Description: 68 kDa protein [Cicer arietinum]
  misc_feature (1)..(139): Homolog of NCBI NO: 38423965 NR Description: putative glycosyltransferase
  misc_feature (1)..(139): Homolog of NCBI NO: 15233046 NR Description: putative protein
  misc_feature (1)..(139): Homolog of NCBI NO: 18422837 NR Description: putative protein
  misc_feature (1)..(139): Homolog of NCBI NO: 10177914 NR Description: emb|CAB71043.1~gene_id:MCA23.10~strong similarity
  misc_feature (1)..(139): Homolog of NCBI NO: 30684642 NR Description: glycosyltransferase family 8 [Arabidopsis
  misc_feature (1)..(141): Homolog of NCBI NO: 18390688 NR Description: expressed protein

SEQ ID NO: 31441 - DNA, 763 bp, Arabidopsis thaliana; identical to SEQ ID NO: 27851
  misc_feature (1)..(763): Ceres Seq. ID no. 13491922
  misc_feature: MA Experiment ID: 108434 Result: Down-regulated in Transcription
  misc_feature: MA Experiment 108434 PARAMETER Experiment Name: At_Root_Tips_cDNA_P Parameter: Tissue Value: Root Tips
  misc_feature: MA Experiment ID: 108435 Result: Down-regulated in Transcription
  misc_feature: MA Experiment 108435 PARAMETER Experiment Name: At_stm_Mutants_cDNA_P Parameter: Plant Line Value: wt Landsburg vs stm
  misc_feature: MA Experiment 108435 PARAMETER Experiment Name: At_stm_Mutants_cDNA_P Parameter: Tissue Value: Shoot Apical Meristem Region
  misc_feature: MA Experiment ID: 108461 Result: Up-regulated in Transcription
  misc_feature: MA Experiment 108461 PARAMETER Experiment Name: At_Germinating_Seeds_cDNA_P Parameter: Age (day) Value: 1 vs. 0
  misc_feature: MA Experiment 108461 PARAMETER Experiment Name: At_Germinating_Seeds_cDNA_P Parameter: Tissue Value: Germinating Seeds
  misc_feature: MA Experiment ID: 108462 Result: Up-regulated in Transcription
  misc_feature: MA Experiment 108462 PARAMETER Experiment Name: At_Germinating_Seeds_cDNA_P Parameter: Age (day) Value: 2 vs. 0
  misc_feature: MA Experiment 108462 PARAMETER Experiment Name: At_Germinating_Seeds_cDNA_P Parameter: Tissue Value: Germinating Seeds
  misc_feature: MA Experiment ID: 108464 Result: Up-regulated in Transcription
  misc_feature: MA Experiment 108464 PARAMETER Experiment Name: At_Germinating_Seeds_cDNA_P Parameter: Age (day) Value: 4 vs. 0
  misc_feature: MA Experiment 108464 PARAMETER Experiment Name: At_Germinating_Seeds_cDNA_P Parameter: Tissue Value: Germinating Seeds
  misc_feature: MA Experiment ID: 108488 Result: Up-regulated in Transcription
  misc_feature: MA Experiment ID: 108489 Result: Down-regulated in Transcription
  misc_feature: MA Experiment ID: 20000179 Result: Up-regulated in Transcription
  misc_feature: MA Experiment 20000179 PARAMETER Experiment Name: At_Germinating_Seeds_P Parameter: Age (hr) Value: 6 vs. 0
  misc_feature: MA Experiment 20000179 PARAMETER Experiment Name: At_Germinating_Seeds_P Parameter: Tissue Value: Germinating Seeds
  misc_feature: MA Experiment ID: 20000180 Result: Up-regulated in Transcription
  misc_feature: MA Experiment 20000180 PARAMETER Experiment Name: At_Germinating_Seeds_P Parameter: Age (hr) Value: 24 vs. 0
  misc_feature: MA Experiment 20000180 PARAMETER Experiment Name: At_Germinating_Seeds_P Parameter: Tissue Value: Germinating Seeds
  misc_feature: MA Experiment ID: 20000185 Result: Down-regulated in Transcription
  misc_feature: MA Experiment 20000185 PARAMETER Experiment Name: At_Roots__P Parameter: Age (day) Value: 7 vs. 21
  misc_feature: MA Experiment 20000185 PARAMETER Experiment Name: At_Roots__P Parameter: Organism Value: A. thaliana
  misc_feature: MA Experiment 20000185 PARAMETER Experiment Name: At_Roots__P Parameter: Tissue Value: Roots vs. Whole Plant
  misc_feature: MA Experiment ID: 20000286 Result: Down-regulated in Transcription
  misc_feature: MA Experiment 20000286 PARAMETER Experiment Name: At_Open_Flower_P Parameter: Age (day) Value: 21
  misc_feature: MA Experiment 20000286 PARAMETER Experiment Name: At_Open_Flower_P Parameter: Plant Line Value: WS
  misc_feature: MA Experiment 20000286 PARAMETER Experiment Name: At_Open_Flower_P Parameter: Tissue Value: Half Open vs. Whole Plant
  misc_feature: MA Experiment ID: 20000437 Result: Down-regulated in Transcription
  misc_feature: MA Experiment 20000437 PARAMETER Experiment Name: At_Drought_P Parameter: Age (day) Value: 8
  misc_feature: MA Experiment 20000437 PARAMETER Experiment Name: At_Drought_P Parameter: Organism Value: A. thaliana
  misc_feature: MA Experiment 20000437 PARAMETER Experiment Name: At_Drought_P Parameter: Plant Line Value: WS
  misc_feature: MA Experiment 20000437 PARAMETER Experiment Name: At_Drought_P Parameter: Timepoint (hr) Value: 24
  misc_feature: MA Experiment 20000437 PARAMETER Experiment Name: At_Drought_P Parameter: Tissue Value: Whole Plant
  misc_feature: MA Experiment 20000437 PARAMETER Experiment Name: At_Drought_P Parameter: Treatment Value: Drought vs. No Drought
  misc_feature: MA Experiment ID: 20000438 Result: Up-regulated in Transcription
  misc_feature: MA Experiment 20000438 PARAMETER Experiment Name: At_Shoots__P Parameter: Age (day) Value: 14
  misc_feature: MA Experiment 20000438 PARAMETER Experiment Name: At_Shoots__P Parameter: Tissue Value: Shoots vs. Whole Plant
  misc_feature: MA Experiment ID: 20000439 Result: Down-regulated in Transcription
  misc_feature: MA Experiment 20000439 PARAMETER Experiment Name: At_Roots__P Parameter: Age (day) Value: 14 vs. 21
  misc_feature: MA Experiment 20000439 PARAMETER Experiment Name: At_Roots__P Parameter: Organism Value: A. thaliana
  misc_feature: MA Experiment 20000439 PARAMETER Experiment Name: At_Roots__P Parameter: Tissue Value: Roots vs. Whole Plant
  misc_feature: MA Experiment ID: 20000496 Result: Down-regulated in Transcription
  misc_feature: MA Experiment 20000496 PARAMETER Experiment Name: At_Guard_Cells_P Parameter: Harvest Date Value: 7/19/2002
  misc_feature: MA Experiment 20000496 PARAMETER Experiment Name: At_Guard_Cells_P Parameter: Organism Value: Canola
  misc_feature: MA Experiment 20000496 PARAMETER Experiment Name: At_Guard_Cells_P Parameter: Tissue Value: Guard Cells vs. Leaves
  misc_feature: MA Experiment ID: 20000794 Result: Down-regulated in Transcription
  misc_feature: MA Experiment 20000794 PARAMETER Experiment Name: At_Petals_P Parameter: Age (day) Value: 23-25 days
  misc_feature: MA Experiment 20000794 PARAMETER Experiment Name: At_Petals_P Parameter: Plant Line Value: WS
  misc_feature: MA Experiment 20000794 PARAMETER Experiment Name: At_Petals_P Parameter: Tissue Value: Petals vs. Whole plant
  misc_feature: MA Experiment ID: 20001248 Result: Down-regulated in Transcription
  misc_feature: MA Experiment 20001248 PARAMETER Experiment Name: At_Far-red-induction_P Parameter: Age (day) Value: 7
  misc_feature: MA Experiment 20001248 PARAMETER Experiment Name: At_Far-red-induction_P Parameter: Light Value: Far-red vs. White
  misc_feature: MA Experiment 20001248 PARAMETER Experiment Name: At_Far-red-induction_P Parameter: Organism Value: A. thaliana
  misc_feature: MA Experiment 20001248 PARAMETER Experiment Name: At_Far-red-induction_P Parameter: Plant Line Value: Columbia
  misc_feature: MA Experiment 20001248 PARAMETER Experiment Name: At_Far-red-induction_P Parameter: Timepoint (hr) Value: 4
  misc_feature: MA Experiment 20001248 PARAMETER Experiment Name: At_Far-red-induction_P Parameter: Tissue Value: Whole Plant
  misc_feature: MA Experiment ID: 20001451 Result: Down-regulated in Transcription
  misc_feature: MA Experiment 20001451 PARAMETER Experiment Name: At_Far-red-induction_P Parameter: Age (day) Value: 7
  misc_feature: MA Experiment 20001451 PARAMETER Experiment Name: At_Far-red-induction_P Parameter: Light Value: Far-red vs. White
  misc_feature: MA Experiment 20001451 PARAMETER Experiment Name: At_Far-red-induction_P Parameter: Organism Value: A. thaliana
  misc_feature: MA Experiment 20001451 PARAMETER Experiment Name: At_Far-red-induction_P Parameter: Plant Line Value: Columbia
  misc_feature: MA Experiment 20001451 PARAMETER Experiment Name: At_Far-red-induction_P Parameter: Timepoint (hr) Value: 24
  misc_feature: MA Experiment 20001451 PARAMETER Experiment Name: At_Far-red-induction_P Parameter: Tissue Value: Whole Plant
  misc_feature: MA Experiment ID: 20001558 Result: Down-regulated in Transcription
  misc_feature: MA Experiment 20001558 PARAMETER Experiment Name: At_Drought_Soil_Dry_P Parameter: Age (day) Value: 27
  misc_feature: MA Experiment 20001558 PARAMETER Experiment Name: At_Drought_Soil_Dry_P Parameter: Organism Value: A. thaliana
  misc_feature: MA Experiment 20001558 PARAMETER Experiment Name: At_Drought_Soil_Dry_P Parameter: Plant Line Value: WS
  misc_feature: MA Experiment 20001558 PARAMETER Experiment Name: At_Drought_Soil_Dry_P Parameter: Post Timepoint (hr) Value: 6
  misc_feature: MA Experiment 20001558 PARAMETER Experiment Name: At_Drought_Soil_Dry_P Parameter: Post-Treatment Value: Re-Water vs. No Drought
  misc_feature: MA Experiment 20001558 PARAMETER Experiment Name: At_Drought_Soil_Dry_P Parameter: Timepoint (day) Value: 13
  misc_feature: MA Experiment 20001558 PARAMETER Experiment Name: At_Drought_Soil_Dry_P Parameter: Treatment Value: Drought vs. No Drought
  misc_feature: MA Experiment ID: 20001757 Result: Up-regulated in Transcription
  misc_feature: MA Experiment 20001757 PARAMETER Experiment Name: At_50mM_NH4NO3_L-to-H_P Parameter: Timepoint (hr) Value: 6
  misc_feature: MA Experiment 20001757 PARAMETER Experiment Name: At_50mM_NH4NO3_L-to-H_P Parameter: Tissue Value: Leaf
  misc_feature: MA Experiment 20001757 PARAMETER Experiment Name: At_50mM_NH4NO3_L-to-H_P Parameter: Treatment Value: 50mM NH4NO3 vs 100mM Mannitol
  misc_feature: MA Experiment ID: 20001905 Result: Down-regulated in Transcription
  misc_feature: MA Experiment 20001905 PARAMETER Experiment Name: At_Drought_Reproduction_P Parameter: Age (day) Value: 40
  misc_feature: MA Experiment 20001905 PARAMETER Experiment Name: At_Drought_Reproduction_P Parameter: Organism Value: A. thaliana
  misc_feature: MA Experiment 20001905 PARAMETER Experiment Name: At_Drought_Reproduction_P Parameter: Plant Line Value: WS
  misc_feature: MA Experiment 20001905 PARAMETER Experiment Name: At_Drought_Reproduction_P Parameter: Timepoint (day) Value: 10
  misc_feature: MA Experiment 20001905 PARAMETER Experiment Name: At_Drought_Reproduction_P Parameter: Tissue Value: Rosettes
  misc_feature: MA Experiment 20001905 PARAMETER Experiment Name: At_Drought_Reproduction_P Parameter: Treatment Value: Drought vs. No Drought
  misc_feature: MA Experiment ID: 20001906 Result: Down-regulated in Transcription
  misc_feature: MA Experiment 20001906 PARAMETER Experiment Name: At_Drought_Reproduction_P Parameter: Age (day) Value: 35
  misc_feature: MA Experiment 20001906 PARAMETER Experiment Name: At_Drought_Reproduction_P Parameter: Organism Value: A. thaliana
  misc_feature: MA Experiment 20001906 PARAMETER Experiment Name: At_Drought_Reproduction_P Parameter: Plant Line Value: WS
  misc_feature: MA Experiment 20001906 PARAMETER Experiment Name: At_Drought_Reproduction_P Parameter: Timepoint (day) Value: 5
  misc_feature: MA Experiment 20001906 PARAMETER Experiment Name: At_Drought_Reproduction_P Parameter: Tissue Value: Siliques
  misc_feature: MA Experiment 20001906 PARAMETER Experiment Name: At_Drought_Reproduction_P Parameter: Treatment Value: Drought vs. No Drought
  misc_feature: MA Experiment ID: 20001908 Result: Down-regulated in Transcription
  misc_feature: MA Experiment 20001908 PARAMETER Experiment Name: At_Drought_Reproduction_P Parameter: Age (day) Value: 40
  misc_feature: MA Experiment 20001908 PARAMETER Experiment Name: At_Drought_Reproduction_P Parameter: Organism Value: A. thaliana
  misc_feature: MA Experiment 20001908 PARAMETER Experiment Name: At_Drought_Reproduction_P Parameter: Plant Line Value: WS
  misc_feature: MA Experiment 20001908 PARAMETER Experiment Name: At_Drought_Reproduction_P Parameter: Timepoint (day) Value: 10
  misc_feature: MA Experiment 20001908 PARAMETER Experiment Name: At_Drought_Reproduction_P Parameter: Tissue Value: Siliques
  misc_feature: MA Experiment 20001908 PARAMETER Experiment Name: At_Drought_Reproduction_P Parameter: Treatment Value: Drought vs. No Drought

SEQ ID NO: 31442 - protein, 208 aa, Arabidopsis thaliana; identical to SEQ ID NO: 27852
  peptide (1)..(208): Ceres Seq. ID no. 13491923
  misc_feature (70)..(207): Pfam Name: PsaD Pfam Description: PsaD
  misc_feature (1)..(208): Homolog of NCBI NO: 131166 NR Description: Photosystem I reaction center subunit II,
  misc_feature (1)..(208): Homolog of NCBI NO: 34787117 NR Description: putative photosystem I reaction centre PSI-D
  misc_feature (1)..(208): Homolog of NCBI NO: 417544 NR Description: Photosystem I reaction center subunit II,
  misc_feature (1)..(208): Homolog of NCBI NO: 19855891 NR Description: Photosystem I reaction center subunit II,
  misc_feature (1)..(208): Homolog of NCBI NO: 21293 NR Description: 20 kDa protein (AA 1-212) [Spinacia oleracea]
  misc_feature (1)..(208): Homolog of NCBI NO: 72680 NR Description: photosystem I chain II precursor - spinach
  misc_feature (1)..(208): Homolog of NCBI NO: 5732201 NR Description: photosystem I subunit II precursor [Arabidopsis
  misc_feature (1)..(208): Homolog of NCBI NO: 15218708 NR Description: photosystem I reaction center subunit II
  misc_feature (1)..(208): Homolog of NCBI NO: 15235503 NR Description: photosystem I reaction center subunit II
  misc_feature (1)..(208): Homolog of NCBI NO: 21595031 NR Description: putative photosystem I reaction center subunit II

SEQ ID NO: 31443 - DNA, 1267 bp, Arabidopsis thaliana; identical to SEQ ID NO: 27853
  misc_feature (1)..(1267): Ceres Seq. ID no. 12338433
  misc_feature: MA Experiment ID: 108594 Result: Down-regulated in Transcription
  misc_feature: MA Experiment 108594 PARAMETER Experiment Name: At_Ler-rhl_Root_cDNA_P Parameter: Plant Line Value: null
  misc_feature: MA Experiment ID: 108595 Result: Down-regulated in Transcription
  misc_feature: MA Experiment 108595 PARAMETER Experiment Name: At_Ler-pi_Ovule_cDNA_P Parameter: Plant Line Value: null
  misc_feature: MA Experiment ID: 20000180 Result: Up-regulated in Transcription
  misc_feature: MA Experiment 20000180 PARAMETER Experiment Name: At_Germinating_Seeds_P Parameter: Age (hr) Value: 24 vs. 0
  misc_feature: MA Experiment 20000180 PARAMETER Experiment Name: At_Germinating_Seeds_P Parameter: Tissue Value: Germinating Seeds
  misc_feature: MA Experiment ID: 20000185 Result: Down-regulated in Transcription
  misc_feature: MA Experiment 20000185 PARAMETER Experiment Name: At_Roots__P Parameter: Age (day) Value: 7 vs. 21
  misc_feature: MA Experiment 20000185 PARAMETER Experiment Name: At_Roots__P Parameter: Organism Value: A. thaliana
  misc_feature: MA Experiment 20000185 PARAMETER Experiment Name: At_Roots__P Parameter: Tissue Value: Roots vs. Whole Plant
  misc_feature: MA Experiment ID: 20000439 Result: Down-regulated in Transcription
  misc_feature: MA Experiment 20000439 PARAMETER Experiment Name: At_Roots__P Parameter: Age (day) Value: 14 vs. 21
  misc_feature: MA Experiment 20000439 PARAMETER Experiment Name: At_Roots__P Parameter: Organism Value: A. thaliana
  misc_feature: MA Experiment 20000439 PARAMETER Experiment Name: At_Roots__P Parameter: Tissue Value: Roots vs. Whole Plant
  misc_feature: MA Experiment ID: 20000794 Result: Down-regulated in Transcription
  misc_feature: MA Experiment 20000794 PARAMETER Experiment Name: At_Petals_P Parameter: Age (day) Value: 23-25 days
  misc_feature: MA Experiment 20000794 PARAMETER Experiment Name: At_Petals_P Parameter: Plant Line Value: WS
  misc_feature: MA Experiment 20000794 PARAMETER Experiment Name: At_Petals_P Parameter: Tissue Value: Petals vs. Whole plant
  misc_feature: MA Experiment ID: 20001248 Result: Down-regulated in Transcription
  misc_feature: MA Experiment 20001248 PARAMETER Experiment Name: At_Far-red-induction_P Parameter: Age (day) Value: 7
  misc_feature: MA Experiment 20001248 PARAMETER Experiment Name: At_Far-red-induction_P Parameter: Light Value: Far-red vs. White
  misc_feature: MA Experiment 20001248 PARAMETER Experiment Name: At_Far-red-induction_P Parameter: Organism Value: A. thaliana
  misc_feature: MA Experiment 20001248 PARAMETER Experiment Name: At_Far-red-induction_P Parameter: Plant Line Value: Columbia
  misc_feature: MA Experiment 20001248 PARAMETER Experiment Name: At_Far-red-induction_P Parameter: Timepoint (hr) Value: 4
  misc_feature: MA Experiment 20001248 PARAMETER Experiment Name: At_Far-red-induction_P Parameter: Tissue Value: Whole Plant
  misc_feature: MA Experiment ID: 20001450 Result: Down-regulated in Transcription
  misc_feature: MA Experiment 20001450 PARAMETER Experiment Name: At_Far-red-induction_P Parameter: Age (day) Value: 7
  misc_feature: MA Experiment 20001450 PARAMETER Experiment Name: At_Far-red-induction_P Parameter: Light Value: Far-red vs. White
  misc_feature: MA Experiment 20001450 PARAMETER Experiment Name: At_Far-red-induction_P Parameter: Organism Value: A. thaliana
  misc_feature: MA Experiment 20001450 PARAMETER Experiment Name: At_Far-red-induction_P Parameter: Plant Line Value: Columbia
  misc_feature: MA Experiment 20001450 PARAMETER Experiment Name: At_Far-red-induction_P Parameter: Timepoint (hr) Value: 8
  misc_feature: MA Experiment 20001450 PARAMETER Experiment Name: At_Far-red-induction_P Parameter: Tissue Value: Whole Plant
  misc_feature: MA Experiment ID: 20001451 Result: Down-regulated in Transcription
  misc_feature: MA Experiment 20001451 PARAMETER Experiment Name: At_Far-red-induction_P Parameter: Age (day) Value: 7
  misc_feature: MA Experiment 20001451 PARAMETER Experiment Name: At_Far-red-induction_P Parameter: Light Value: Far-red vs. White
  misc_feature: MA Experiment 20001451 PARAMETER Experiment Name: At_Far-red-induction_P Parameter: Organism Value: A. thaliana
  misc_feature: MA Experiment 20001451 PARAMETER Experiment Name: At_Far-red-induction_P Parameter: Plant Line Value: Columbia
  misc_feature: MA Experiment 20001451 PARAMETER Experiment Name: At_Far-red-induction_P Parameter: Timepoint (hr) Value: 24
  misc_feature: MA Experiment 20001451 PARAMETER Experiment Name: At_Far-red-induction_P Parameter: Tissue Value: Whole Plant
  misc_feature: MA Experiment ID: 20001557 Result: Down-regulated in Transcription
  misc_feature: MA Experiment 20001557 PARAMETER Experiment Name: At_Drought_Soil_Dry_P Parameter: Age (day) Value: 27
  misc_feature: MA Experiment 20001557 PARAMETER Experiment Name: At_Drought_Soil_Dry_P Parameter: Organism Value: A. thaliana
  misc_feature: MA Experiment 20001557 PARAMETER Experiment Name: At_Drought_Soil_Dry_P Parameter: Plant Line Value: WS
  misc_feature: MA Experiment 20001557 PARAMETER Experiment Name: At_Drought_Soil_Dry_P Parameter: Post Timepoint (hr) Value: 3
  misc_feature: MA Experiment 20001557 PARAMETER Experiment Name: At_Drought_Soil_Dry_P Parameter: Post-Treatment Value: Re-Water vs. No Drought
  misc_feature: MA Experiment 20001557 PARAMETER Experiment Name: At_Drought_Soil_Dry_P Parameter: Timepoint (day) Value: 13
  misc_feature: MA Experiment 20001557 PARAMETER Experiment Name: At_Drought_Soil_Dry_P Parameter: Treatment Value: Drought vs. No Drought
  misc_feature: MA Experiment ID: 20001904 Result: Down-regulated in Transcription
  misc_feature: MA Experiment 20001904 PARAMETER Experiment Name: At_Drought_Reproduction_P Parameter: Age (day) Value: 37
  misc_feature: MA Experiment 20001904 PARAMETER Experiment Name: At_Drought_Reproduction_P Parameter: Organism Value: A. thaliana
  misc_feature: MA Experiment 20001904 PARAMETER Experiment Name: At_Drought_Reproduction_P Parameter: Plant Line Value: WS
  misc_feature: MA Experiment 20001904 PARAMETER Experiment Name: At_Drought_Reproduction_P Parameter: Timepoint (day) Value: 7
  misc_feature: MA Experiment 20001904 PARAMETER Experiment Name: At_Drought_Reproduction_P Parameter: Tissue Value: Rosettes
  misc_feature: MA Experiment 20001904 PARAMETER Experiment Name: At_Drought_Reproduction_P Parameter: Treatment Value: Drought vs. No Drought
  misc_feature: MA Experiment ID: 20001905 Result: Down-regulated in Transcription
  misc_feature: MA Experiment 20001905 PARAMETER Experiment Name: At_Drought_Reproduction_P Parameter: Age (day) Value: 40
  misc_feature: MA Experiment 20001905 PARAMETER Experiment Name: At_Drought_Reproduction_P Parameter: Organism Value: A. thaliana
  misc_feature: MA Experiment 20001905 PARAMETER Experiment Name: At_Drought_Reproduction_P Parameter: Plant Line Value: WS
  misc_feature: MA Experiment 20001905 PARAMETER Experiment Name: At_Drought_Reproduction_P Parameter: Timepoint (day) Value: 10
  misc_feature: MA Experiment 20001905 PARAMETER Experiment Name: At_Drought_Reproduction_P Parameter: Tissue Value: Rosettes
  misc_feature: MA Experiment 20001905 PARAMETER Experiment Name: At_Drought_Reproduction_P Parameter: Treatment Value: Drought vs. No Drought
  misc_feature: MA Experiment ID: 20001906 Result: Down-regulated in Transcription
  misc_feature: MA Experiment 20001906 PARAMETER Experiment Name: At_Drought_Reproduction_P Parameter: Age (day) Value: 35
  misc_feature: MA Experiment 20001906 PARAMETER Experiment Name: At_Drought_Reproduction_P Parameter: Organism Value: A. thaliana
  misc_feature: MA Experiment 20001906 PARAMETER Experiment Name: At_Drought_Reproduction_P Parameter: Plant Line Value: WS
  misc_feature: MA Experiment 20001906 PARAMETER Experiment Name: At_Drought_Reproduction_P Parameter: Timepoint (day) Value: 5
  misc_feature: MA Experiment 20001906 PARAMETER Experiment Name: At_Drought_Reproduction_P Parameter: Tissue Value: Siliques
  misc_feature: MA Experiment 20001906 PARAMETER Experiment Name: At_Drought_Reproduction_P Parameter: Treatment Value: Drought vs. No Drought
  misc_feature: MA Experiment ID: 20001908 Result: Down-regulated in Transcription
  misc_feature: MA Experiment 20001908 PARAMETER Experiment Name: At_Drought_Reproduction_P Parameter: Age (day) Value: 40
  misc_feature: MA Experiment 20001908 PARAMETER Experiment Name: At_Drought_Reproduction_P Parameter: Organism Value: A. thaliana
  misc_feature: MA Experiment 20001908 PARAMETER Experiment Name: At_Drought_Reproduction_P Parameter: Plant Line Value: WS
  misc_feature: MA Experiment 20001908 PARAMETER Experiment Name: At_Drought_Reproduction_P Parameter: Timepoint (day) Value: 10
  misc_feature: MA Experiment 20001908 PARAMETER Experiment Name: At_Drought_Reproduction_P Parameter: Tissue Value: Siliques
  misc_feature: MA Experiment 20001908 PARAMETER Experiment Name: At_Drought_Reproduction_P Parameter: Treatment Value: Drought vs. No Drought
  misc_feature: MA Experiment ID: 20001911 Result: Down-regulated in Transcription
  misc_feature: MA Experiment 20001911 PARAMETER Experiment Name: At_Drought_Reproduction_P Parameter: Age (day) Value: 40
  misc_feature: MA Experiment 20001911 PARAMETER Experiment Name: At_Drought_Reproduction_P Parameter: Organism Value: A. thaliana
  misc_feature: MA Experiment 20001911 PARAMETER Experiment Name: At_Drought_Reproduction_P Parameter: Plant Line Value: WS
  misc_feature: MA Experiment 20001911 PARAMETER Experiment Name: At_Drought_Reproduction_P Parameter: Timepoint (day) Value: 10
  misc_feature: MA Experiment 20001911 PARAMETER Experiment Name: At_Drought_Reproduction_P Parameter: Tissue Value: Flowers
  misc_feature: MA Experiment 20001911 PARAMETER Experiment Name: At_Drought_Reproduction_P Parameter: Treatment Value: Drought vs. No Drought

SEQ ID NO: 31444 - protein, 379 aa, Arabidopsis thaliana; identical to SEQ ID NO: 26380
  peptide (1)..(379): Ceres Seq. ID no. 12338434
  misc_feature (96)..(345): Pfam Name: haloacid dehalogenase-like hydrolase Pfam Description: haloacid dehalogenase-like hydrolase
  misc_feature (81)..(372): Homolog of NCBI NO: 15238800 NR Description: 4-nitrophenylphosphatase-like protein
  misc_feature (81)..(372): Homolog of NCBI NO: 10177912 NR Description: 4-nitrophenylphosphatase-like protein
  misc_feature (81)..(372): Homolog of NCBI NO: 21593203 NR Description: 4-nitrophenylphosphatase-like protein
  misc_feature (67)..(375): Homolog of NCBI NO: 15982558 NR Description: phosphoglycolate phosphatase precursor
  misc_feature (80)..(379): Homolog of NCBI NO: 38345235 NR Description: OSJNBa0084K20.14 [Oryza sativa (japonica
  misc_feature (71)..(206): Homolog of NCBI NO: 8885622 NR Description: N-glyceraldehyde-2-phosphotransferase-like
  misc_feature (202)..(379): Homolog of NCBI NO: 8885622 NR Description: N-glyceraldehyde-2-phosphotransferase-like
  misc_feature (71)..(379): Homolog of NCBI NO: 26450878 NR Description: putative p-nitrophenylphosphatase [Arabidopsis
  misc_feature (18)..(379): Homolog of NCBI NO: 15239406 NR Description: p-nitrophenylphosphatase-like protein
  misc_feature (18)..(349): Homolog of NCBI NO: 8953699 NR Description: 4-nitrophenylphosphatase-like [Arabidopsis

SEQ ID NO: 31445 - protein, 362 aa, Arabidopsis thaliana; identical to SEQ ID NO: 26381
  peptide (1)..(362): Ceres Seq. ID no. 12338436
  misc_feature (79)..(328): Pfam Name: haloacid dehalogenase-like hydrolase Pfam Description: haloacid dehalogenase-like hydrolase
  misc_feature (64)..(355): Homolog of NCBI NO: 15238800 NR Description: 4-nitrophenylphosphatase-like protein
  misc_feature (64)..(355): Homolog of NCBI NO: 10177912 NR Description: 4-nitrophenylphosphatase-like protein
  misc_feature (64)..(355): Homolog of NCBI NO: 21593203 NR Description: 4-nitrophenylphosphatase-like protein
  misc_feature (50)..(358): Homolog of NCBI NO: 15982558 NR Description: phosphoglycolate phosphatase precursor
  misc_feature (63)..(362): Homolog of NCBI NO: 38345235 NR Description: OSJNBa0084K20.14 [Oryza sativa (japonica
  misc_feature (54)..(189): Homolog of NCBI NO: 8885622 NR Description: N-glyceraldehyde-2-phosphotransferase-like
  misc_feature (185)..(362): Homolog of NCBI NO: 8885622 NR Description: N-glyceraldehyde-2-phosphotransferase-like
  misc_feature (54)..(362): Homolog of NCBI NO: 26450878 NR Description: putative p-nitrophenylphosphatase [Arabidopsis
  misc_feature (1)..(362): Homolog of NCBI NO: 15239406 NR Description: p-nitrophenylphosphatase-like protein
  misc_feature (1)..(332): Homolog of NCBI NO: 8953699 NR Description: 4-nitrophenylphosphatase-like [Arabidopsis

SEQ ID NO: 31446 - protein, 309 aa, Arabidopsis thaliana; identical to SEQ ID NO: 26382
  peptide (1)..(309): Ceres Seq. ID no. 12338437
  misc_feature (26)..(275): Pfam Name: haloacid dehalogenase-like hydrolase Pfam Description: haloacid dehalogenase-like hydrolase
  misc_feature (11)..(302): Homolog of NCBI NO: 15238800 NR Description: 4-nitrophenylphosphatase-like protein
  misc_feature (11)..(302): Homolog of NCBI NO: 10177912 NR Description: 4-nitrophenylphosphatase-like protein
  misc_feature (11)..(302): Homolog of NCBI NO: 21593203 NR Description: 4-nitrophenylphosphatase-like protein
  misc_feature (1)..(305): Homolog of NCBI NO: 15982558 NR Description: phosphoglycolate phosphatase precursor
  misc_feature (10)..(309): Homolog of NCBI NO: 38345235 NR Description: OSJNBa0084K20.14 [Oryza sativa (japonica
  misc_feature (1)..(136): Homolog of NCBI NO: 8885622 NR Description: N-glyceraldehyde-2-phosphotransferase-like
  misc_feature (132)..(309): Homolog of NCBI NO: 8885622 NR Description: N-glyceraldehyde-2-phosphotransferase-like
  misc_feature (1)..(309): Homolog of NCBI NO: 26450878 NR Description: putative p-nitrophenylphosphatase [Arabidopsis
  misc_feature (1)..(309): Homolog of NCBI NO: 15239406 NR Description: p-nitrophenylphosphatase-like protein
  misc_feature (1)..(279): Homolog of NCBI NO: 8953699 NR Description: 4-nitrophenylphosphatase-like [Arabidopsis

SEQ ID NO: 31447 - DNA, 1400 bp, Arabidopsis thaliana; identical to SEQ ID NO: 27857
  misc_feature (1)..(1400): Ceres Seq. ID no. 12335141
  misc_feature: MA Experiment ID: 108434 Result: Up-regulated in Transcription
  misc_feature: MA Experiment 108434 PARAMETER Experiment Name: At_Root_Tips_cDNA_P Parameter: Tissue Value: Root Tips
  misc_feature: MA Experiment ID: 108577 Result: Down-regulated in Transcription
  misc_feature: MA Experiment 108577 PARAMETER Experiment Name: At_42deg_Heat_cDNA_P Parameter: Temperature (deg C) Value: 42 vs. 22
  misc_feature: MA Experiment 108577 PARAMETER Experiment Name: At_42deg_Heat_cDNA_P Parameter: Timepoint (hr) Value: 6
  misc_feature: MA Experiment 108577 PARAMETER Experiment Name: At_42deg_Heat_cDNA_P Parameter: Tissue Value: Aerial
  misc_feature: MA Experiment ID: 20000171 Result: Down-regulated in Transcription
  misc_feature: MA Experiment 20000171 PARAMETER Experiment Name: At_42deg_Heat_P Parameter: Age (day) Value: 14
  misc_feature: MA Experiment 20000171 PARAMETER Experiment Name: At_42deg_Heat_P Parameter: Organism Value: A. thaliana
  misc_feature: MA Experiment 20000171 PARAMETER Experiment Name: At_42deg_Heat_P Parameter: Plant Line Value: WS
  misc_feature: MA Experiment 20000171 PARAMETER Experiment Name: At_42deg_Heat_P Parameter: Temperature (deg C) Value: 42 vs. 22
  misc_feature: MA Experiment 20000171 PARAMETER Experiment Name: At_42deg_Heat_P Parameter: Timepoint (hr) Value: 1
  misc_feature: MA Experiment 20000171 PARAMETER Experiment Name: At_42deg_Heat_P Parameter: Tissue Value: Aerial
  misc_feature: MA Experiment ID: 20000173 Result: Down-regulated in Transcription
  misc_feature: MA Experiment 20000173 PARAMETER Experiment Name: At_42deg_Heat_P Parameter: Age (day) Value: 14
  misc_feature: MA Experiment 20000173 PARAMETER Experiment Name: At_42deg_Heat_P Parameter: Organism Value: A. thaliana
  misc_feature: MA Experiment 20000173 PARAMETER Experiment Name: At_42deg_Heat_P Parameter: Plant Line Value: WS
  misc_feature: MA Experiment 20000173 PARAMETER Experiment Name: At_42deg_Heat_P Parameter: Temperature (deg C) Value: 42 vs. 22
  misc_feature: MA Experiment 20000173 PARAMETER Experiment Name: At_42deg_Heat_P Parameter: Timepoint (hr) Value: 6
  misc_feature: MA Experiment 20000173 PARAMETER Experiment Name: At_42deg_Heat_P Parameter: Tissue Value: Aerial
  misc_feature: MA Experiment ID: 20001560 Result: Up-regulated in Transcription
  misc_feature: MA Experiment 20001560 PARAMETER Experiment Name: At_Drought_Soil_Dry_P Parameter: Age (day) Value: 28
  misc_feature: MA Experiment 20001560 PARAMETER Experiment Name: At_Drought_Soil_Dry_P Parameter: Organism Value: A. thaliana
  misc_feature: MA Experiment 20001560 PARAMETER Experiment Name: At_Drought_Soil_Dry_P Parameter: Plant Line Value: WS
  misc_feature: MA Experiment 20001560 PARAMETER Experiment Name: At_Drought_Soil_Dry_P Parameter: Post Timepoint (hr) Value: None
  misc_feature: MA Experiment 20001560 PARAMETER Experiment Name: At_Drought_Soil_Dry_P Parameter: Post-Treatment Value: None
  misc_feature: MA Experiment 20001560 PARAMETER Experiment Name: At_Drought_Soil_Dry_P Parameter: Timepoint (day) Value: 14
  misc_feature: MA Experiment 20001560 PARAMETER Experiment Name: At_Drought_Soil_Dry_P Parameter: Treatment Value: Drought vs. No Drought

SEQ ID NO: 31448 - protein, 335 aa, Arabidopsis thaliana; identical to SEQ ID NO: 27858
  peptide (1)..(335): Ceres Seq. ID no. 12335142
  misc_feature (1)..(297): Homolog of NCBI NO: 15238957 NR Description: putative protein; protein id: At5g42420.1
  misc_feature (1)..(315): Homolog of NCBI NO: 21536703 NR Description: unknown [Arabidopsis thaliana]
  misc_feature (1)..(315): Homolog of NCBI NO: 18394949 NR Description: expressed protein
  misc_feature (1)..(329): Homolog of NCBI NO: 30313364 NR Description: putative transmembrane protein [Oryza sativa]
  misc_feature (2)..(330): Homolog of NCBI NO: 7486049 NR Description: hypothetical protein F23K16.20 - Arabidopsis
  misc_feature (2)..(330): Homolog of NCBI NO: 21593003 NR Description: unknown [Arabidopsis thaliana]
  misc_feature (1)..(330): Homolog of NCBI NO: 18420440 NR Description: putative protein
  misc_feature (1)..(335): Homolog of NCBI NO: 15234794 NR Description: hypothetical protein; protein id: At4g09810.1
  misc_feature (1)..(335): Homolog of NCBI NO: 18399097 NR Description: expressed protein
  misc_feature (1)..(335): Homolog of NCBI NO: 21595054 NR Description: unknown [Arabidopsis thaliana]

SEQ ID NO: 31449 - protein, 317 aa, Arabidopsis thaliana; identical to SEQ ID NO: 27859
  peptide (1)..(317): Ceres Seq. ID no. 12335143
  misc_feature (1)..(279): Homolog of NCBI NO: 15238957 NR Description: putative protein; protein id: At5g42420.1
  misc_feature (1)..(297): Homolog of NCBI NO: 21536703 NR Description: unknown [Arabidopsis thaliana]
  misc_feature (1)..(297): Homolog of NCBI NO: 18394949 NR Description: expressed protein
  misc_feature (1)..(311): Homolog of NCBI NO: 30313364 NR Description: putative transmembrane protein [Oryza sativa]
  misc_feature (1)..(312): Homolog of NCBI NO: 7486049 NR Description: hypothetical protein F23K16.20 - Arabidopsis
  misc_feature (1)..(312): Homolog of NCBI NO: 21593003 NR Description: unknown [Arabidopsis thaliana]
  misc_feature (1)..(312): Homolog of NCBI NO: 18420440 NR Description: putative protein
  misc_feature (1)..(317): Homolog of NCBI NO: 15234794 NR Description: hypothetical protein; protein id: At4g09810.1
  misc_feature (1)..(317): Homolog of NCBI NO: 18399097 NR Description: expressed protein
  misc_feature (1)..(317): Homolog of NCBI NO: 21595054 NR Description: unknown [Arabidopsis thaliana]

SEQ ID NO: 31450 - protein, 300 aa, Arabidopsis thaliana; identical to SEQ ID NO: 27860
  peptide (1)..(300): Ceres Seq. ID no. 12335144
  misc_feature (1)..(262): Homolog of NCBI NO: 15238957 NR Description: putative protein; protein id: At5g42420.1
  misc_feature (1)..(280): Homolog of NCBI NO: 21536703 NR Description: unknown [Arabidopsis thaliana]
  misc_feature (1)..(280): Homolog of NCBI NO: 18394949 NR Description: expressed protein
  misc_feature (1)..(294): Homolog of NCBI NO: 30313364 NR Description: putative transmembrane protein [Oryza sativa]
  misc_feature (1)..(295): Homolog of NCBI NO: 7486049 NR Description: hypothetical protein F23K16.20 - Arabidopsis
  misc_feature (1)..(295): Homolog of NCBI NO: 21593003 NR Description: unknown [Arabidopsis thaliana]
  misc_feature (1)..(295): Homolog of NCBI NO: 18420440 NR Description: putative protein
  misc_feature (1)..(300): Homolog of NCBI NO: 15234794 NR Description: hypothetical protein; protein id: At4g09810.1
  misc_feature (1)..(300): Homolog of NCBI NO: 18399097 NR Description: expressed protein
  misc_feature (1)..(300): Homolog of NCBI NO: 21595054 NR Description: unknown [Arabidopsis thaliana]

SEQ ID NO: 31451 - DNA, 1681 bp, Arabidopsis thaliana; identical to SEQ ID NO: 27861
  misc_feature (1)..(1681): Ceres Seq. ID no. 12332449
  misc_feature: MA Experiment ID: 108462 Result: Up-regulated in Transcription
  misc_feature: MA Experiment 108462 PARAMETER Experiment Name: At_Germinating_Seeds_cDNA_P Parameter: Age (day) Value: 2 vs. 0
  misc_feature: MA Experiment 108462 PARAMETER Experiment Name: At_Germinating_Seeds_cDNA_P Parameter: Tissue Value: Germinating Seeds
  misc_feature: MA Experiment ID: 108463 Result: Up-regulated in Transcription
  misc_feature: MA Experiment 108463 PARAMETER Experiment Name: At_Germinating_Seeds_cDNA_P Parameter: Age (day) Value: 3 vs. 0
  misc_feature: MA Experiment 108463 PARAMETER Experiment Name: At_Germinating_Seeds_cDNA_P Parameter: Tissue Value: Germinating Seeds
  misc_feature: MA Experiment ID: 108464 Result: Up-regulated in Transcription
  misc_feature: MA Experiment 108464 PARAMETER Experiment Name: At_Germinating_Seeds_cDNA_P Parameter: Age (day) Value: 4 vs. 0
  misc_feature: MA Experiment 108464 PARAMETER Experiment Name: At_Germinating_Seeds_cDNA_P Parameter: Tissue Value: Germinating Seeds
  misc_feature: MA Experiment ID: 20000089 Result: Down-regulated in Transcription
  misc_feature: MA Experiment ID: 20000090 Result: Down-regulated in Transcription
  misc_feature: MA Experiment ID: 20000111 Result: Down-regulated in Transcription
  misc_feature: MA Experiment 20000111 PARAMETER Experiment Name: At_42deg_Heat_cDNA_P Parameter: Temperature (deg C) Value: 42 vs. 22
  misc_feature: MA Experiment 20000111 PARAMETER Experiment Name: At_42deg_Heat_cDNA_P Parameter: Timepoint (hr) Value: 6
  misc_feature: MA Experiment 20000111 PARAMETER Experiment Name: At_42deg_Heat_cDNA_P Parameter: Tissue Value: Aerial
  misc_feature: MA Experiment ID: 20000112 Result: Down-regulated in Transcription
  misc_feature: MA Experiment 20000112 PARAMETER Experiment Name: At_42deg_Heat_cDNA_P Parameter: Temperature (deg C) Value: 42 vs. 22
  misc_feature: MA Experiment 20000112 PARAMETER Experiment Name: At_42deg_Heat_cDNA_P Parameter: Timepoint (hr) Value: 2
  misc_feature: MA Experiment 20000112 PARAMETER Experiment Name: At_42deg_Heat_cDNA_P Parameter: Tissue Value: Aerial
  misc_feature: MA Experiment ID: 20000113 Result: Down-regulated in Transcription
  misc_feature: MA Experiment 20000113 PARAMETER Experiment Name: At_42deg_Heat_cDNA_P Parameter: Temperature (deg C) Value: 42 vs. 22
  misc_feature: MA Experiment 20000113 PARAMETER Experiment Name: At_42deg_Heat_cDNA_P Parameter: Timepoint (hr) Value: 8
  misc_feature: MA Experiment 20000113 PARAMETER Experiment Name: At_42deg_Heat_cDNA_P Parameter: Tissue Value: Aerial
  misc_feature: MA Experiment ID: 20000144 Result: Down-regulated in Transcription
  misc_feature: MA Experiment 20000144 PARAMETER Experiment Name: At_42deg_Heat_cDNA_P Parameter: Temperature (deg C) Value: 42 vs. 22
  misc_feature: MA Experiment 20000144 PARAMETER Experiment Name: At_42deg_Heat_cDNA_P Parameter: Timepoint (hr) Value: 1
  misc_feature: MA Experiment 20000144 PARAMETER Experiment Name: At_42deg_Heat_cDNA_P Parameter: Tissue Value: Aerial
  misc_feature: MA Experiment ID: 20000184 Result: Up-regulated in Transcription
  misc_feature: MA Experiment 20000184 PARAMETER Experiment Name: At_Shoots__P Parameter: Age (day) Value: 7
  misc_feature: MA Experiment 20000184 PARAMETER Experiment Name: At_Shoots__P Parameter: Tissue Value: Shoots vs. Whole Plant
  misc_feature: MA Experiment ID: 20000227 Result: Up-regulated in Transcription
  misc_feature: MA Experiment 20000227 PARAMETER Experiment Name: At_Root-Tips-vs-Tops_P Parameter: Tissue Value: Root Tips vs. Root Tops
  misc_feature: MA Experiment ID: 20000437 Result: Down-regulated in Transcription
  misc_feature: MA Experiment 20000437 PARAMETER Experiment Name: At_Drought_P Parameter: Age (day) Value: 8
  misc_feature: MA Experiment 20000437 PARAMETER Experiment Name: At_Drought_P Parameter: Organism Value: A. thaliana
  misc_feature: MA Experiment 20000437 PARAMETER Experiment Name: At_Drought_P Parameter: Plant Line Value: WS
  misc_feature: MA Experiment 20000437 PARAMETER Experiment Name: At_Drought_P Parameter: Timepoint (hr) Value: 24
  misc_feature: MA Experiment 20000437 PARAMETER Experiment Name: At_Drought_P Parameter: Tissue Value: Whole Plant
  misc_feature: MA Experiment 20000437 PARAMETER Experiment Name: At_Drought_P Parameter: Treatment Value: Drought vs. No Drought
  misc_feature: MA Experiment ID: 20000439 Result: Down-regulated in Transcription
  misc_feature: MA Experiment 20000439 PARAMETER Experiment Name: At_Roots__P Parameter: Age (day) Value: 14 vs. 21
  misc_feature: MA Experiment 20000439 PARAMETER Experiment Name: At_Roots__P Parameter: Organism Value: A. thaliana
  misc_feature: MA Experiment 20000439 PARAMETER Experiment Name: At_Roots__P Parameter: Tissue Value: Roots vs. Whole Plant
  misc_feature: MA Experiment ID: 20001247 Result: Up-regulated in Transcription
  misc_feature: MA Experiment 20001247 PARAMETER Experiment Name: At_Far-red-induction_P Parameter: Age (day) Value: 7
  misc_feature: MA Experiment 20001247 PARAMETER Experiment Name: At_Far-red-induction_P Parameter: Light Value: Far-red vs. White
  misc_feature: MA Experiment 20001247 PARAMETER Experiment Name: At_Far-red-induction_P Parameter: Organism Value: A. thaliana
  misc_feature: MA Experiment 20001247 PARAMETER Experiment Name: At_Far-red-induction_P Parameter: Plant Line Value: Columbia
  misc_feature: MA Experiment 20001247 PARAMETER Experiment Name: At_Far-red-induction_P Parameter: Timepoint (hr) Value: 1
  misc_feature: MA Experiment 20001247 PARAMETER Experiment Name: At_Far-red-induction_P Parameter: Tissue Value: Whole Plant
  misc_feature: MA Experiment ID: 20001555 Result: Down-regulated in Transcription
  misc_feature: MA Experiment 20001555 PARAMETER Experiment Name: At_Drought_Soil_Dry_P Parameter: Age (day) Value: 24
  misc_feature: MA Experiment 20001555 PARAMETER Experiment Name: At_Drought_Soil_Dry_P Parameter: Organism Value: A. thaliana
  misc_feature: MA Experiment 20001555 PARAMETER Experiment Name: At_Drought_Soil_Dry_P Parameter: Plant Line Value: WS
  misc_feature: MA Experiment 20001555 PARAMETER Experiment Name: At_Drought_Soil_Dry_P Parameter: Post Timepoint (hr) Value: None
  misc_feature: MA Experiment 20001555 PARAMETER Experiment Name: At_Drought_Soil_Dry_P Parameter: Post-Treatment Value: None
  misc_feature: MA Experiment 20001555 PARAMETER Experiment Name: At_Drought_Soil_Dry_P Parameter: Timepoint (day) Value: 10
  misc_feature: MA Experiment 20001555 PARAMETER Experiment Name: At_Drought_Soil_Dry_P Parameter: Treatment Value: Drought vs. No Drought
  misc_feature: MA Experiment ID: 20001556 Result: Down-regulated in Transcription
  misc_feature: MA Experiment 20001556 PARAMETER Experiment Name: At_Drought_Soil_Dry_P Parameter: Age (day) Value: 26
  misc_feature: MA Experiment 20001556 PARAMETER Experiment Name: At_Drought_Soil_Dry_P Parameter: Organism Value: A. thaliana
  misc_feature: MA Experiment 20001556 PARAMETER Experiment Name: At_Drought_Soil_Dry_P Parameter: Plant Line Value: WS
  misc_feature: MA Experiment 20001556 PARAMETER Experiment Name: At_Drought_Soil_Dry_P Parameter: Post Timepoint (hr) Value: None
  misc_feature: MA Experiment 20001556 PARAMETER Experiment Name: At_Drought_Soil_Dry_P Parameter: Post-Treatment Value: None
  misc_feature: MA Experiment 20001556 PARAMETER Experiment Name: At_Drought_Soil_Dry_P Parameter: Timepoint (day) Value: 12
  misc_feature: MA Experiment 20001556 PARAMETER Experiment Name: At_Drought_Soil_Dry_P Parameter: Treatment Value: Drought vs. No Drought
  misc_feature: MA Experiment ID: 20001559 Result: Down-regulated in Transcription
  misc_feature: MA Experiment 20001559 PARAMETER Experiment Name: At_Drought_Soil_Dry_P Parameter: Age (day) Value: 28
  misc_feature: MA Experiment 20001559 PARAMETER Experiment Name: At_Drought_Soil_Dry_P Parameter: Organism Value: A. thaliana
  misc_feature: MA Experiment 20001559 PARAMETER Experiment Name: At_Drought_Soil_Dry_P Parameter: Plant Line Value: WS
  misc_feature: MA Experiment 20001559 PARAMETER Experiment Name: At_Drought_Soil_Dry_P Parameter: Post Timepoint (hr) Value: 29
  misc_feature: MA Experiment 20001559 PARAMETER Experiment Name: At_Drought_Soil_Dry_P Parameter: Post-Treatment Value: Re-Water vs. No Drought
  misc_feature: MA Experiment 20001559 PARAMETER Experiment Name: At_Drought_Soil_Dry_P Parameter: Timepoint (day) Value: 14
  misc_feature: MA Experiment 20001559 PARAMETER Experiment Name: At_Drought_Soil_Dry_P Parameter: Treatment Value: Drought vs. No Drought
  misc_feature: MA Experiment ID: 20001904 Result: Down-regulated in Transcription
  misc_feature: MA Experiment 20001904 PARAMETER Experiment Name: At_Drought_Reproduction_P Parameter: Age (day) Value: 37
  misc_feature: MA Experiment 20001904 PARAMETER Experiment Name: At_Drought_Reproduction_P Parameter: Organism Value: A. thaliana
  misc_feature: MA Experiment 20001904 PARAMETER Experiment Name: At_Drought_Reproduction_P Parameter: Plant Line Value: WS
  misc_feature: MA Experiment 20001904 PARAMETER Experiment Name: At_Drought_Reproduction_P Parameter: Timepoint (day) Value: 7
  misc_feature: MA Experiment 20001904 PARAMETER Experiment Name: At_Drought_Reproduction_P Parameter: Tissue Value: Rosettes
  misc_feature: MA Experiment 20001904 PARAMETER Experiment Name: At_Drought_Reproduction_P Parameter: Treatment Value: Drought vs. No Drought
  misc_feature: MA Experiment ID: 20001905 Result: Down-regulated in Transcription
  misc_feature: MA Experiment 20001905 PARAMETER Experiment Name: At_Drought_Reproduction_P Parameter: Age (day) Value: 40
  misc_feature: MA Experiment 20001905 PARAMETER Experiment Name: At_Drought_Reproduction_P Parameter: Organism Value: A. thaliana
  misc_feature: MA Experiment 20001905 PARAMETER Experiment Name: At_Drought_Reproduction_P Parameter: Plant Line Value: WS
  misc_feature: MA Experiment 20001905 PARAMETER Experiment Name: At_Drought_Reproduction_P Parameter: Timepoint (day) Value: 10
  misc_feature: MA Experiment 20001905 PARAMETER Experiment Name: At_Drought_Reproduction_P Parameter: Tissue Value: Rosettes
  misc_feature: MA Experiment 20001905 PARAMETER Experiment Name: At_Drought_Reproduction_P Parameter: Treatment Value: Drought vs. No Drought
  misc_feature: MA Experiment ID: 20001911 Result: Down-regulated in Transcription
  misc_feature: MA Experiment 20001911 PARAMETER Experiment Name: At_Drought_Reproduction_P Parameter: Age (day) Value: 40
  misc_feature: MA Experiment 20001911 PARAMETER Experiment Name: At_Drought_Reproduction_P Parameter: Organism Value: A. thaliana
  misc_feature: MA Experiment 20001911 PARAMETER Experiment Name: At_Drought_Reproduction_P Parameter: Plant Line Value: WS
  misc_feature: MA Experiment 20001911 PARAMETER Experiment Name: At_Drought_Reproduction_P Parameter: Timepoint (day) Value: 10
  misc_feature: MA Experiment 20001911 PARAMETER Experiment Name: At_Drought_Reproduction_P Parameter: Tissue Value: Flowers
  misc_feature: MA Experiment 20001911 PARAMETER Experiment Name: At_Drought_Reproduction_P Parameter: Treatment Value: Drought vs. No Drought

SEQ ID NO: 31452 - protein, 484 aa, Arabidopsis thaliana; identical to SEQ ID NO: 27862
  peptide (1)..(484): Ceres Seq. ID no. 12332450
  misc_feature (79)..(478): Pfam Name: Eukaryotic aspartyl protease Pfam Description: Eukaryotic aspartyl protease
  misc_feature (14)..(351): Homolog of NCBI NO: 38344196 NR Description: OSJNBa0064G10.12 [Oryza sativa (japonica
  misc_feature (11)..(482): Homolog of NCBI NO: 15238250 NR Description: nucleoid DNA-binding protein cnd41 - like protein
  misc_feature (11)..(482): Homolog of NCBI NO: 24417232 NR Description: unknown [Arabidopsis thaliana]
  misc_feature (66)..(482): Homolog of NCBI NO: 11358588 NR Description: nucleoid DNA-binding protein cnd41-like protein -
  misc_feature (6)..(482): Homolog of NCBI NO: 22326716 NR Description: nucleoid DNA-binding protein cnd41 - like protein
  misc_feature (7)..(482): Homolog of NCBI NO: 7489168 NR Description: nucleoid DNA-binding protein cnd41, chloroplast -
  misc_feature (27)..(482): Homolog of NCBI NO: 24430421 NR Description: 41 kD chloroplast nucleoid DNA binding protein
  misc_feature (57)..(484): Homolog of NCBI NO: 25406599 NR Description: probable aspartyl proteinase, 105611-106921
  misc_feature (1)..(484): Homolog of NCBI NO: 21595063 NR Description: putative aspartyl protease [Arabidopsis thaliana]
  misc_feature (1)..(484): Homolog of NCBI NO: 18412482 NR Description: putative aspartyl protease

SEQ ID NO: 31453 - protein, 415 aa, Arabidopsis thaliana; identical to SEQ ID NO: 27863
  peptide (1)..(415): Ceres Seq. ID no. 12332451
  misc_feature (10)..(409): Pfam Name: Eukaryotic aspartyl protease Pfam Description: Eukaryotic aspartyl protease
  misc_feature (1)..(282): Homolog of NCBI NO: 38344196 NR Description: OSJNBa0064G10.12 [Oryza sativa (japonica
  misc_feature (1)..(413): Homolog of NCBI NO: 15238250 NR Description: nucleoid DNA-binding protein cnd41 - like protein
  misc_feature (1)..(413): Homolog of NCBI NO: 24417232 NR Description: unknown [Arabidopsis thaliana]
  misc_feature (1)..(413): Homolog of NCBI NO: 11358588 NR Description: nucleoid DNA-binding protein cnd41-like protein -
  misc_feature (1)..(413): Homolog of NCBI NO: 22326716 NR Description: nucleoid DNA-binding protein cnd41 - like protein
  misc_feature (1)..(413): Homolog of NCBI NO: 7489168 NR Description: nucleoid DNA-binding protein cnd41, chloroplast -
  misc_feature (1)..(413): Homolog of NCBI NO: 24430421 NR Description: 41 kD chloroplast nucleoid DNA binding protein
  misc_feature (1)..(415): Homolog of NCBI NO: 25406599 NR Description: probable aspartyl proteinase, 105611-106921
  misc_feature (1)..(415): Homolog of NCBI NO: 21595063 NR Description: putative aspartyl protease [Arabidopsis thaliana]
  misc_feature (1)..(415): Homolog of NCBI NO: 18412482 NR Description: putative aspartyl protease

SEQ ID NO: 31454 - protein, 398 aa, Arabidopsis thaliana; identical to SEQ ID NO: 27864
  peptide (1)..(398): Ceres Seq. ID no. 12332452
  misc_feature (1)..(392): Pfam Name: Eukaryotic aspartyl protease Pfam Description: Eukaryotic aspartyl protease
  misc_feature (1)..(265): Homolog of NCBI NO: 38344196 NR Description: OSJNBa0064G10.12 [Oryza sativa (japonica
  misc_feature (1)..(396): Homolog of NCBI NO: 15238250 NR Description: nucleoid DNA-binding protein cnd41 - like protein
  misc_feature (1)..(396): Homolog of NCBI NO: 24417232 NR Description: unknown [Arabidopsis thaliana]
  misc_feature (1)..(396): Homolog of NCBI NO: 11358588 NR Description: nucleoid DNA-binding protein cnd41-like protein -
  misc_feature (1)..(396): Homolog of NCBI NO: 22326716 NR Description: nucleoid DNA-binding protein cnd41 - like protein
  misc_feature (1)..(396): Homolog of NCBI NO: 7489168 NR Description: nucleoid DNA-binding protein cnd41, chloroplast -
  misc_feature (1)..(396): Homolog of NCBI NO: 24430421 NR Description: 41 kD chloroplast nucleoid DNA binding protein
  misc_feature (1)..(398): Homolog of NCBI NO: 25406599 NR Description: probable aspartyl proteinase, 105611-106921
  misc_feature (1)..(398): Homolog of NCBI NO: 21595063 NR Description: putative aspartyl protease [Arabidopsis thaliana]
  misc_feature (1)..(398): Homolog of NCBI NO: 18412482 NR Description: putative aspartyl protease

SEQ ID NO: 31455 - DNA, 1451 bp, Arabidopsis thaliana; identical to SEQ ID NO: 27865
  misc_feature (1)..(1451): Ceres Seq. ID no. 12333516
  misc_feature: MA Experiment ID: 108585 Result: Up-regulated in Transcription
  misc_feature: MA Experiment 108585 PARAMETER Experiment Name: At_5mM_NaNP_cDNA_P Parameter: Timepoint (hr) Value: 6
  misc_feature: MA Experiment 108585 PARAMETER Experiment Name: At_5mM_NaNP_cDNA_P Parameter: Tissue Value: Aerial
  misc_feature: MA Experiment 108585 PARAMETER Experiment Name: At_5mM_NaNP_cDNA_P Parameter: Treatment Value: null
  misc_feature: MA Experiment ID: 108595 Result: Down-regulated in Transcription
  misc_feature: MA Experiment 108595 PARAMETER Experiment Name: At_Ler-pi_Ovule_cDNA_P Parameter: Plant Line Value: null
  misc_feature: MA Experiment ID: 20000090 Result: Up-regulated in Transcription
  misc_feature: MA Experiment ID: 20000182 Result: Up-regulated in Transcription
  misc_feature: MA Experiment 20000182 PARAMETER Experiment Name: At_2mM_SA_P Parameter: Age (day) Value: 14
  misc_feature: MA Experiment 20000182 PARAMETER Experiment Name: At_2mM_SA_P Parameter: Organism Value: A. thaliana
  misc_feature: MA Experiment 20000182 PARAMETER Experiment Name: At_2mM_SA_P Parameter: Plant Line Value: WS
  misc_feature: MA Experiment 20000182 PARAMETER Experiment Name: At_2mM_SA_P Parameter: Timepoint (hr) Value: 6
  misc_feature: MA Experiment 20000182 PARAMETER Experiment Name: At_2mM_SA_P Parameter: Tissue Value: Aerial
  misc_feature: MA Experiment 20000182 PARAMETER Experiment Name: At_2mM_SA_P Parameter: Treatment Value: 2mM SA vs. No Treatment

SEQ ID NO: 31456 - protein, 376 aa, Arabidopsis thaliana; identical to SEQ ID NO: 27866
  peptide (1)..(376): Ceres Seq. ID no. 12333517
  misc_feature (43)..(329): Pfam Name: Protein kinase domain Pfam Description: Protein kinase domain
  misc_feature (1)..(372): Homolog of NCBI NO: 21165527 NR Description: mitogen-activated protein kinase [Solanum
  misc_feature (1)..(373): Homolog of NCBI NO: 27312014 NR Description: mitogen-activated protein kinase [Malus
  misc_feature (13)..(376): Homolog of NCBI NO: 2499613 NR Description: MITOGEN-ACTIVATED PROTEIN KINASE HOMOLOG MMK2
  misc_feature (13)..(376): Homolog of NCBI NO: 2129855 NR Description: mitogen-activated protein kinase MMK2 (EC
  misc_feature (4)..(372): Homolog of NCBI NO: 25052804 NR Description: mitogen-activated protein kinase 4 [Petroselinum
  misc_feature (1)..(372): Homolog of NCBI NO: 18378855 NR Description: MAP kinase, putative; protein id: At1g01560.1
  misc_feature (1)..(40): Homolog of NCBI NO: 2191146 NR Description: MAP Kinase [Arabidopsis thaliana]
  misc_feature (59)..(376): Homolog of NCBI NO: 2191146 NR Description: MAP Kinase [Arabidopsis thaliana]
  misc_feature (1)..(376): Homolog of NCBI NO: 2129645 NR Description: mitogen-activated protein kinase 4 (EC 2.7.1.-) -
  misc_feature (1)..(376): Homolog of NCBI NO: 15234152 NR Description: MAP kinase 4 (MPK4)

SEQ ID NO: 31457 - protein, 280 aa, Arabidopsis thaliana; identical to SEQ ID NO: 27867
  peptide (1)..(280): Ceres Seq. ID no. 12333518
  misc_feature (1)..(233): Pfam Name: Protein kinase domain Pfam Description: Protein kinase domain
  misc_feature (1)..(277): Homolog of NCBI NO: 585454 NR Description: MITOGEN-ACTIVATED PROTEIN KINASE HOMOLOG D5
  misc_feature (1)..(276): Homolog of NCBI NO: 21165527 NR Description: mitogen-activated protein kinase [Solanum
  misc_feature (1)..(277): Homolog of NCBI NO: 27312014 NR Description: mitogen-activated protein kinase [Malus
  misc_feature (1)..(280): Homolog of NCBI NO: 2499613 NR Description: MITOGEN-ACTIVATED PROTEIN KINASE HOMOLOG MMK2
  misc_feature (1)..(280): Homolog of NCBI NO: 2129855 NR Description: mitogen-activated protein kinase MMK2 (EC
  misc_feature (1)..(276): Homolog of NCBI NO: 25052804 NR Description: mitogen-activated protein kinase 4 [Petroselinum
  misc_feature (1)..(276): Homolog of NCBI NO: 18378855 NR Description: MAP kinase, putative; protein id: At1g01560.1
  misc_feature (1)..(280): Homolog of NCBI NO: 2191146 NR Description: MAP Kinase [Arabidopsis thaliana]
  misc_feature (1)..(280): Homolog of NCBI NO: 2129645 NR Description: mitogen-activated protein kinase 4 (EC 2.7.1.-) -
  misc_feature (1)..(280): Homolog of NCBI NO: 15234152 NR Description: MAP kinase 4 (MPK4)

SEQ ID NO: 31458 - protein, 250 aa, Arabidopsis thaliana; identical to SEQ ID NO: 27868
  peptide (1)..(250): Ceres Seq. ID no. 12333519
  misc_feature (1)..(203): Pfam Name: Protein kinase domain Pfam Description: Protein kinase domain
  misc_feature (1)..(247): Homolog of NCBI NO: 585454 NR Description: MITOGEN-ACTIVATED PROTEIN KINASE HOMOLOG D5
  misc_feature (1)..(246): Homolog of NCBI NO: 21165527 NR Description: mitogen-activated protein kinase [Solanum
  misc_feature (1)..(247): Homolog of NCBI NO: 27312014 NR Description: mitogen-activated protein kinase [Malus
  misc_feature (1)..(250): Homolog of NCBI NO: 2499613 NR Description: MITOGEN-ACTIVATED PROTEIN KINASE HOMOLOG MMK2
  misc_feature (1)..(250): Homolog of NCBI NO: 2129855 NR Description: mitogen-activated protein kinase MMK2 (EC
  misc_feature (1)..(246): Homolog of NCBI NO: 25052804 NR Description: mitogen-activated protein kinase 4 [Petroselinum
  misc_feature (1)..(246): Homolog of NCBI NO: 18378855 NR Description: MAP kinase, putative; protein id: At1g01560.1
  misc_feature (1)..(250): Homolog of NCBI NO: 2191146 NR Description: MAP Kinase [Arabidopsis thaliana]
  misc_feature (1)..(250): Homolog of NCBI NO: 2129645 NR Description: mitogen-activated protein kinase 4 (EC 2.7.1.-) -
  misc_feature (1)..(250): Homolog of NCBI NO: 15234152 NR Description: MAP kinase 4 (MPK4)

SEQ ID NO: 31459 - DNA, 1119 bp, Arabidopsis thaliana; identical to SEQ ID NO: 27869
  misc_feature (1)..(1119): Ceres Seq. ID no. 12678920
  misc_feature: MA Experiment ID: 108434 Result: Down-regulated in Transcription
  misc_feature: MA Experiment 108434 PARAMETER Experiment Name: At_Root_Tips_cDNA_P Parameter: Tissue Value: Root Tips
  misc_feature: MA Experiment ID: 108435 Result: Down-regulated in Transcription
  misc_feature: MA Experiment 108435 PARAMETER Experiment Name: At_stm_Mutants_cDNA_P Parameter: Plant Line Value: wt Landsburg vs stm
  misc_feature: MA Experiment 108435 PARAMETER Experiment Name: At_stm_Mutants_cDNA_P Parameter: Tissue Value: Shoot Apical Meristem Region
  misc_feature: MA Experiment ID: 108461 Result: Down-regulated in Transcription
  misc_feature: MA Experiment 108461 PARAMETER Experiment Name: At_Germinating_Seeds_cDNA_P Parameter: Age (day) Value: 1 vs. 0
  misc_feature: MA Experiment 108461 PARAMETER Experiment Name: At_Germinating_Seeds_cDNA_P Parameter: Tissue Value: Germinating Seeds
  misc_feature: MA Experiment ID: 108463 Result: Up-regulated in Transcription
  misc_feature: MA Experiment 108463 PARAMETER Experiment Name: At_Germinating_Seeds_cDNA_P Parameter: Age (day) Value: 3 vs. 0
  misc_feature: MA Experiment 108463 PARAMETER Experiment Name: At_Germinating_Seeds_cDNA_P Parameter: Tissue Value: Germinating Seeds
  misc_feature: MA Experiment ID: 108464 Result: Up-regulated in Transcription
  misc_feature: MA Experiment 108464 PARAMETER Experiment Name: At_Germinating_Seeds_cDNA_P Parameter: Age (day) Value: 4 vs. 0
  misc_feature: MA Experiment 108464 PARAMETER Experiment Name: At_Germinating_Seeds_cDNA_P Parameter: Tissue Value: Germinating Seeds
  misc_feature: MA Experiment ID: 108469 Result: Up-regulated in Transcription
  misc_feature: MA Experiment ID: 108561 Result: Up-regulated in Transcription
  misc_feature: MA Experiment 108561 PARAMETER Experiment Name: At_100uM_ABA_cDNA_P Parameter: Timepoint (hr) Value: 6
  misc_feature: MA Experiment 108561 PARAMETER Experiment Name: At_100uM_ABA_cDNA_P Parameter: Tissue Value: Aerial
  misc_feature: MA Experiment 108561 PARAMETER Experiment Name: At_100uM_ABA_cDNA_P Parameter: Treatment Value: 100uM ABA vs. No Treatment
  misc_feature: MA Experiment ID: 108572 Result: Up-regulated in Transcription
  misc_feature: MA Experiment 108572 PARAMETER Experiment Name: At_Drought_cDNA_P Parameter: Timepoint (hr) Value: 1
  misc_feature: MA Experiment 108572 PARAMETER Experiment Name: At_Drought_cDNA_P Parameter: Tissue Value: Aerial
  misc_feature: MA Experiment 108572 PARAMETER Experiment Name: At_Drought_cDNA_P Parameter: Treatment Value: Drought vs. No Drought
  misc_feature: MA Experiment ID: 108573 Result: Up-regulated in Transcription
  misc_feature: MA Experiment 108573 PARAMETER Experiment Name: At_Drought_cDNA_P Parameter: Timepoint (hr) Value: 6
  misc_feature: MA Experiment 108573 PARAMETER Experiment Name: At_Drought_cDNA_P Parameter: Tissue Value: Aerial
  misc_feature: MA Experiment 108573 PARAMETER Experiment Name: At_Drought_cDNA_P Parameter: Treatment Value: Drought vs. No Drought
  misc_feature: MA Experiment ID: 108605 Result: Up-regulated in Transcription
  misc_feature: MA Experiment 108605 PARAMETER Experiment Name: At_100uM_ABA_cDNA_P Parameter: Timepoint (hr) Value: 6
  misc_feature: MA Experiment 108605 PARAMETER Experiment Name: At_100uM_ABA_cDNA_P Parameter: Tissue Value: Aerial
  misc_feature: MA Experiment 108605 PARAMETER Experiment Name: At_100uM_ABA_cDNA_P Parameter: Treatment Value: 100uM ABA vs. No Treatment
  misc_feature: MA Experiment ID: 108607 Result: Up-regulated in Transcription
  misc_feature: MA Experiment 108607 PARAMETER Experiment Name: At_100uM_ABA_cDNA_P Parameter: Timepoint (hr) Value: 4
  misc_feature: MA Experiment 108607 PARAMETER Experiment Name: At_100uM_ABA_cDNA_P Parameter: Tissue Value: Aerial
  misc_feature: MA Experiment 108607 PARAMETER Experiment Name: At_100uM_ABA_cDNA_P Parameter: Treatment Value: 100uM ABA vs. No Treatment
  misc_feature: MA Experiment ID: 108609 Result: Up-regulated in Transcription
  misc_feature: MA Experiment 108609 PARAMETER Experiment Name: At_100uM_ABA_cDNA_P Parameter: Timepoint (hr) Value: 24
  misc_feature: MA Experiment 108609 PARAMETER Experiment Name: At_100uM_ABA_cDNA_P Parameter: Tissue Value: Aerial
  misc_feature: MA Experiment 108609 PARAMETER Experiment Name: At_100uM_ABA_cDNA_P Parameter: Treatment Value: 100uM ABA vs. No Treatment
  misc_feature: MA Experiment ID: 108668 Result: Up-regulated in Transcription
  misc_feature: MA Experiment 108668 PARAMETER Experiment Name: At_2mM_SA_cDNA_P Parameter: Plant Line Value: WS
  misc_feature: MA Experiment 108668 PARAMETER Experiment Name: At_2mM_SA_cDNA_P Parameter: Timepoint (hr) Value: 6
  misc_feature: MA Experiment 108668 PARAMETER Experiment Name: At_2mM_SA_cDNA_P Parameter: Treatment Value: 2mM SA vs. No Treatment
  misc_feature: MA Experiment ID: 20000069 Result: Up-regulated in Transcription
  misc_feature: MA Experiment 20000069 PARAMETER Experiment Name: At_100uM_ABA_Mutants_cDNA_P Parameter: Plant Line Value: CS23
  misc_feature: MA Experiment 20000069 PARAMETER Experiment Name: At_100uM_ABA_Mutants_cDNA_P Parameter: Timepoint (hr) Value: 6
  misc_feature: MA Experiment 20000069 PARAMETER Experiment Name: At_100uM_ABA_Mutants_cDNA_P Parameter: Tissue Value: Aerial
  misc_feature: MA Experiment 20000069 PARAMETER Experiment Name: At_100uM_ABA_Mutants_cDNA_P Parameter: Treatment Value: 100uM ABA vs. No Treatment
  misc_feature: MA Experiment ID: 20000070 Result: Up-regulated in Transcription
  misc_feature: MA Experiment 20000070 PARAMETER Experiment Name: At_100uM_ABA_Mutants_cDNA_P Parameter: Plant Line Value: CS24
  misc_feature: MA Experiment 20000070 PARAMETER Experiment Name: At_100uM_ABA_Mutants_cDNA_P Parameter: Timepoint (hr) Value: 6
  misc_feature: MA Experiment 20000070 PARAMETER Experiment Name: At_100uM_ABA_Mutants_cDNA_P Parameter: Tissue Value: Aerial
  misc_feature: MA Experiment 20000070 PARAMETER Experiment Name: At_100uM_ABA_Mutants_cDNA_P Parameter: Treatment Value: 100uM ABA vs. No Treatment
  misc_feature: MA Experiment ID: 20000071 Result: Up-regulated in Transcription
  misc_feature: MA Experiment 20000071 PARAMETER Experiment Name: At_100uM_ABA_Mutants_cDNA_P Parameter: Plant Line Value: CS8104
  misc_feature: MA Experiment 20000071 PARAMETER Experiment Name: At_100uM_ABA_Mutants_cDNA_P Parameter: Timepoint (hr) Value: 6
  misc_feature: MA Experiment 20000071 PARAMETER Experiment Name: At_100uM_ABA_Mutants_cDNA_P Parameter: Tissue Value: Aerial
  misc_feature: MA Experiment 20000071 PARAMETER Experiment Name: At_100uM_ABA_Mutants_cDNA_P Parameter: Treatment Value: 100uM ABA vs. No Treatment
  misc_feature: MA Experiment ID: 20000072 Result: Up-regulated in Transcription
  misc_feature: MA Experiment 20000072 PARAMETER Experiment Name: At_100uM_ABA_Mutants_cDNA_P Parameter: Plant Line Value: CS8105
  misc_feature: MA Experiment 20000072 PARAMETER Experiment Name: At_100uM_ABA_Mutants_cDNA_P Parameter: Timepoint (hr) Value: 6
  misc_feature: MA Experiment 20000072 PARAMETER Experiment Name: At_100uM_ABA_Mutants_cDNA_P Parameter: Tissue Value: Aerial
  misc_feature: MA Experiment 20000072 PARAMETER Experiment Name: At_100uM_ABA_Mutants_cDNA_P Parameter: Treatment Value: 100uM ABA vs. No Treatment
  misc_feature: MA Experiment ID: 20000086 Result: Up-regulated in Transcription
  misc_feature: MA Experiment 20000086 PARAMETER Experiment Name: At_100uM_ABA_Mutants_cDNA_P Parameter: Plant Line Value: CS22
  misc_feature: MA Experiment 20000086 PARAMETER Experiment Name: At_100uM_ABA_Mutants_cDNA_P Parameter: Timepoint (hr) Value: 6
  misc_feature: MA Experiment 20000086 PARAMETER Experiment Name: At_100uM_ABA_Mutants_cDNA_P Parameter: Tissue Value: Aerial
  misc_feature: MA Experiment 20000086 PARAMETER Experiment Name: At_100uM_ABA_Mutants_cDNA_P Parameter: Treatment Value: 100uM ABA vs. No Treatment
  misc_feature: MA Experiment ID: 20000087 Result: Up-regulated in Transcription
  misc_feature: MA Experiment 20000087 PARAMETER Experiment Name: At_100uM_ABA_Mutants_cDNA_P Parameter: Plant Line Value: WS
  misc_feature: MA Experiment 20000087 PARAMETER Experiment Name: At_100uM_ABA_Mutants_cDNA_P Parameter: Timepoint (hr) Value: 6
  misc_feature: MA Experiment 20000087 PARAMETER Experiment Name: At_100uM_ABA_Mutants_cDNA_P Parameter: Tissue Value: Aerial
  misc_feature: MA Experiment 20000087 PARAMETER Experiment Name: At_100uM_ABA_Mutants_cDNA_P Parameter: Treatment Value: 100uM ABA vs. No Treatment
  misc_feature: MA Experiment ID: 20000088 Result: Up-regulated in Transcription
  misc_feature: MA Experiment 20000088 PARAMETER Experiment Name: At_100uM_ABA_Mutants_cDNA_P Parameter: Plant Line Value: Landsberg
  misc_feature: MA Experiment 20000088 PARAMETER Experiment Name: At_100uM_ABA_Mutants_cDNA_P Parameter: Timepoint (hr) Value: 6
  misc_feature: MA Experiment 20000088 PARAMETER Experiment Name: At_100uM_ABA_Mutants_cDNA_P Parameter: Tissue Value: Aerial
  misc_feature: MA Experiment 20000088 PARAMETER Experiment Name: At_100uM_ABA_Mutants_cDNA_P Parameter: Treatment Value: 100uM ABA vs. No Treatment
  misc_feature: MA Experiment ID: 20000117 Result: Up-regulated in Transcription
  misc_feature: MA Experiment 20000117 PARAMETER Experiment Name: At_100uM_ABA_Mutants_cDNA_P Parameter: Plant Line Value: Columbia
  misc_feature: MA Experiment 20000117 PARAMETER Experiment Name: At_100uM_ABA_Mutants_cDNA_P Parameter: Timepoint (hr) Value: 6
  misc_feature: MA Experiment 20000117 PARAMETER Experiment Name: At_100uM_ABA_Mutants_cDNA_P Parameter: Tissue Value: Aerial
  misc_feature: MA Experiment 20000117 PARAMETER Experiment Name: At_100uM_ABA_Mutants_cDNA_P Parameter: Treatment Value: 100uM ABA vs. No Treatment
  misc_feature: MA Experiment ID: 20000169 Result: Up-regulated in Transcription
  misc_feature: MA Experiment 20000169 PARAMETER Experiment Name: At_100uM_ABA_P Parameter: Age (day) Value: 14
  misc_feature: MA Experiment 20000169 PARAMETER Experiment Name: At_100uM_ABA_P Parameter: Organism Value: A. thaliana
  misc_feature: MA Experiment 20000169 PARAMETER Experiment Name: At_100uM_ABA_P Parameter: Plant Line Value: WS
  misc_feature: MA Experiment 20000169 PARAMETER Experiment Name: At_100uM_ABA_P Parameter: Timepoint (hr) Value: 6
  misc_feature: MA Experiment 20000169 PARAMETER Experiment Name: At_100uM_ABA_P Parameter: Tissue Value: Aerial
  misc_feature: MA Experiment 20000169 PARAMETER Experiment Name: At_100uM_ABA_P Parameter: Treatment Value: 100uM ABA vs. No Treatment
  misc_feature: MA Experiment ID: 20000182 Result: Up-regulated in Transcription
  misc_feature: MA Experiment 20000182 PARAMETER Experiment Name: At_2mM_SA_P Parameter: Age (day) Value: 14
  misc_feature: MA Experiment 20000182 PARAMETER Experiment Name: At_2mM_SA_P Parameter: Organism Value: A. thaliana
  misc_feature: MA Experiment 20000182 PARAMETER Experiment Name: At_2mM_SA_P Parameter: Plant Line Value: WS
  misc_feature: MA Experiment 20000182 PARAMETER Experiment Name: At_2mM_SA_P Parameter: Timepoint (hr) Value: 6
  misc_feature: MA Experiment 20000182 PARAMETER Experiment Name: At_2mM_SA_P Parameter: Tissue Value: Aerial
  misc_feature: MA Experiment 20000182 PARAMETER Experiment Name: At_2mM_SA_P Parameter: Treatment Value: 2mM SA vs. No Treatment
  misc_feature: MA Experiment ID: 20000268 Result: Up-regulated in Transcription
  misc_feature: MA Experiment 20000268 PARAMETER Experiment Name: At_100mM_NaCl__P Parameter: Age (day) Value: 14
  misc_feature: MA Experiment 20000268 PARAMETER Experiment Name: At_100mM_NaCl__P Parameter: Organism Value: A. thaliana
  misc_feature: MA Experiment 20000268 PARAMETER Experiment Name: At_100mM_NaCl__P Parameter: Plant Line Value: WS
  misc_feature: MA Experiment 20000268 PARAMETER Experiment Name: At_100mM_NaCl__P Parameter: Timepoint (hr) Value: 6
  misc_feature: MA Experiment 20000268 PARAMETER Experiment Name: At_100mM_NaCl__P Parameter: Tissue Value: Whole Plant
  misc_feature: MA Experiment 20000268 PARAMETER Experiment Name: At_100mM_NaCl__P Parameter: Treatment Value: 100mM NaCl vs. No Treatment
  misc_feature: MA Experiment ID: 20000453 Result: Up-regulated in Transcription
  misc_feature: MA Experiment 20000453 PARAMETER Experiment Name: At_100uM_ABA_P Parameter: Age (day) Value: 15
  misc_feature: MA Experiment 20000453 PARAMETER Experiment Name: At_100uM_ABA_P Parameter: Organism Value: A. thaliana
  misc_feature: MA Experiment 20000453 PARAMETER Experiment Name: At_100uM_ABA_P Parameter: Plant Line Value: WS
  misc_feature: MA Experiment 20000453 PARAMETER Experiment Name: At_100uM_ABA_P Parameter: Timepoint (hr) Value: 24
  misc_feature: MA Experiment 20000453 PARAMETER Experiment Name: At_100uM_ABA_P Parameter: Tissue Value: Aerial
  misc_feature: MA Experiment 20000453 PARAMETER Experiment Name: At_100uM_ABA_P Parameter: Treatment Value: 100uM ABA vs. No Treatment
  misc_feature: MA Experiment ID: 20001248 Result: Down-regulated in Transcription
  misc_feature: MA Experiment 20001248 PARAMETER Experiment Name: At_Far-red-induction_P Parameter: Age (day) Value: 7
  misc_feature: MA Experiment 20001248 PARAMETER Experiment Name: At_Far-red-induction_P Parameter: Light Value: Far-red vs. White
  misc_feature: MA Experiment 20001248 PARAMETER Experiment Name: At_Far-red-induction_P Parameter: Organism Value: A. thaliana
  misc_feature: MA Experiment 20001248 PARAMETER Experiment Name: At_Far-red-induction_P Parameter: Plant Line Value: Columbia
  misc_feature: MA Experiment 20001248 PARAMETER Experiment Name: At_Far-red-induction_P Parameter: Timepoint (hr) Value: 4
  misc_feature: MA Experiment 20001248 PARAMETER Experiment Name: At_Far-red-induction_P Parameter: Tissue Value: Whole Plant
  misc_feature: MA Experiment ID: 20001560 Result: Up-regulated in Transcription
  misc_feature: MA Experiment 20001560 PARAMETER Experiment Name: At_Drought_Soil_Dry_P Parameter: Age (day) Value: 28
  misc_feature: MA Experiment 20001560 PARAMETER Experiment Name: At_Drought_Soil_Dry_P Parameter: Organism Value: A. thaliana
  misc_feature: MA Experiment 20001560 PARAMETER Experiment Name: At_Drought_Soil_Dry_P Parameter: Plant Line Value: WS
  misc_feature: MA Experiment 20001560 PARAMETER Experiment Name: At_Drought_Soil_Dry_P Parameter: Post Timepoint (hr) Value: None
  misc_feature: MA Experiment 20001560 PARAMETER Experiment Name: At_Drought_Soil_Dry_P Parameter: Post-Treatment Value: None
  misc_feature: MA Experiment 20001560 PARAMETER Experiment Name: At_Drought_Soil_Dry_P Parameter: Timepoint (day) Value: 14
  misc_feature: MA Experiment 20001560 PARAMETER Experiment Name: At_Drought_Soil_Dry_P Parameter: Treatment Value: Drought vs. No Drought
  misc_feature: MA Experiment ID: 20001904 Result: Up-regulated in Transcription
  misc_feature: MA Experiment 20001904 PARAMETER Experiment Name: At_Drought_Reproduction_P Parameter: Age (day) Value: 37
  misc_feature: MA Experiment 20001904 PARAMETER Experiment Name: At_Drought_Reproduction_P Parameter: Organism Value: A. thaliana
  misc_feature: MA Experiment 20001904 PARAMETER Experiment Name: At_Drought_Reproduction_P Parameter: Plant Line Value: WS
  misc_feature: MA Experiment 20001904 PARAMETER Experiment Name: At_Drought_Reproduction_P Parameter: Timepoint (day) Value: 7
  misc_feature: MA Experiment 20001904 PARAMETER Experiment Name: At_Drought_Reproduction_P Parameter: Tissue Value: Rosettes
  misc_feature: MA Experiment 20001904 PARAMETER Experiment Name: At_Drought_Reproduction_P Parameter: Treatment Value: Drought vs. No Drought

SEQ ID NO: 31460 - protein, 311 aa, Arabidopsis thaliana; identical to SEQ ID NO: 27524
  peptide (1)..(311): Ceres Seq. ID no. 12678921
  misc_feature (8)..(284): Homolog of NCBI NO: 40740252 NR Description: hypothetical protein AN3971.2 [Aspergillus
  misc_feature (1)..(311): Homolog of NCBI NO: 13160399 NR Description: aldose reductase [Digitalis purpurea]
  misc_feature (1)..(311): Homolog of NCBI NO: 13160397 NR Description: aldose reductase [Digitalis purpurea]
  misc_feature (1)..(311): Homolog of NCBI NO: 15232354 NR Description: aldo/keto reductase family
  misc_feature (12)..(311): Homolog of NCBI NO: 28393400 NR Description: putative aldo/keto reductase [Arabidopsis
  misc_feature (1)..(311): Homolog of NCBI NO: 30687247 NR Description: aldo/keto reductase family [Arabidopsis thaliana]
  misc_feature (1)..(311): Homolog of NCBI NO: 30687261 NR Description: aldo/keto reductase family [Arabidopsis thaliana]
  misc_feature (1)..(311): Homolog of NCBI NO: 7431112 NR Description: abscisic acid activated protein - alfalfa
  misc_feature (1)..(283): Homolog of NCBI NO: 7431106 NR Description: probable alcohol dehydrogenase [imported] -
  misc_feature (1)..(311): Homolog of NCBI NO: 18404526 NR Description: aldo/keto reductase family

SEQ ID NO: 31461 - protein, 286 aa, Arabidopsis thaliana; identical to SEQ ID NO: 27525
  peptide (1)..(286): Ceres Seq. ID no. 12678922
  misc_feature (1)..(259): Homolog of NCBI NO: 40740252 NR Description: hypothetical protein AN3971.2 [Aspergillus
  misc_feature (1)..(286): Homolog of NCBI NO: 13160399 NR Description: aldose reductase [Digitalis purpurea]
  misc_feature (1)..(286): Homolog of NCBI NO: 13160397 NR Description: aldose reductase [Digitalis purpurea]
  misc_feature (1)..(286): Homolog of NCBI NO: 15232354 NR Description: aldo/keto reductase family
  misc_feature (1)..(286): Homolog of NCBI NO: 28393400 NR Description: putative aldo/keto reductase [Arabidopsis
  misc_feature (1)..(286): Homolog of NCBI NO: 30687247 NR Description: aldo/keto reductase family [Arabidopsis thaliana]
  misc_feature (1)..(286): Homolog of NCBI NO: 30687261 NR Description: aldo/keto reductase family [Arabidopsis thaliana]
  misc_feature (1)..(286): Homolog of NCBI NO: 7431112 NR Description: abscisic acid activated protein - alfalfa
  misc_feature (1)..(258): Homolog of NCBI NO: 7431106 NR Description: probable alcohol dehydrogenase [imported] -
  misc_feature (1)..(286): Homolog of NCBI NO: 18404526 NR Description: aldo/keto reductase family

SEQ ID NO: 31462 - protein, 191 aa, Arabidopsis thaliana; identical to SEQ ID NO: 27526
  peptide (1)..(191): Ceres Seq. ID no. 12678923
  misc_feature (1)..(164): Homolog of NCBI NO: 40740252 NR Description: hypothetical protein AN3971.2 [Aspergillus
  misc_feature (1)..(191): Homolog of NCBI NO: 13160399 NR Description: aldose reductase [Digitalis purpurea]
  misc_feature (1)..(191): Homolog of NCBI NO: 13160397 NR Description: aldose reductase [Digitalis purpurea]
  misc_feature (1)..(191): Homolog of NCBI NO: 15232354 NR Description: aldo/keto reductase family
  misc_feature (1)..(191): Homolog of NCBI NO: 28393400 NR Description: putative aldo/keto reductase [Arabidopsis
  misc_feature (1)..(191): Homolog of NCBI NO: 30687247 NR Description: aldo/keto reductase family [Arabidopsis thaliana]
  misc_feature (1)..(191): Homolog of NCBI NO: 30687261 NR Description: aldo/keto reductase family [Arabidopsis thaliana]
  misc_feature (1)..(191): Homolog of NCBI NO: 7431112 NR Description: abscisic acid activated protein - alfalfa
  misc_feature (1)..(163): Homolog of NCBI NO: 7431106 NR Description: probable alcohol dehydrogenase [imported] -
  misc_feature (1)..(191): Homolog of NCBI NO: 18404526 NR Description: aldo/keto reductase family

SEQ ID NO: 31463 - DNA, 918 bp, Arabidopsis thaliana; identical to SEQ ID NO: 27873
  misc_feature (1)..(918): Ceres Seq. ID no. 13653925
  misc_feature: MA Experiment ID: 108462 Result: Up-regulated in Transcription
  misc_feature: MA Experiment 108462 PARAMETER Experiment Name: At_Germinating_Seeds_cDNA_P Parameter: Age (day) Value: 2 vs. 0
  misc_feature: MA Experiment 108462 PARAMETER Experiment Name: At_Germinating_Seeds_cDNA_P Parameter: Tissue Value: Germinating Seeds
  misc_feature: MA Experiment ID: 108463 Result: Up-regulated in Transcription
  misc_feature: MA Experiment 108463 PARAMETER Experiment Name: At_Germinating_Seeds_cDNA_P Parameter: Age (day) Value: 3 vs. 0
  misc_feature: MA Experiment 108463 PARAMETER Experiment Name: At_Germinating_Seeds_cDNA_P Parameter: Tissue Value: Germinating Seeds
  misc_feature: MA Experiment ID: 108609 Result: Down-regulated in Transcription
  misc_feature: MA Experiment 108609 PARAMETER Experiment Name: At_100uM_ABA_cDNA_P Parameter: Timepoint (hr) Value: 24
  misc_feature: MA Experiment 108609 PARAMETER Experiment Name: At_100uM_ABA_cDNA_P Parameter: Tissue Value: Aerial
  misc_feature: MA Experiment 108609 PARAMETER Experiment Name: At_100uM_ABA_cDNA_P Parameter: Treatment Value: 100uM ABA vs. No Treatment
  misc_feature: MA Experiment ID: 20000069 Result: Down-regulated in Transcription
  misc_feature: MA Experiment 20000069 PARAMETER Experiment Name: At_100uM_ABA_Mutants_cDNA_P Parameter: Plant Line Value: CS23
  misc_feature: MA Experiment 20000069 PARAMETER Experiment Name: At_100uM_ABA_Mutants_cDNA_P Parameter: Timepoint (hr) Value: 6
  misc_feature: MA Experiment 20000069 PARAMETER Experiment Name: At_100uM_ABA_Mutants_cDNA_P Parameter: Tissue Value: Aerial
  misc_feature: MA Experiment 20000069 PARAMETER Experiment Name: At_100uM_ABA_Mutants_cDNA_P Parameter: Treatment Value: 100uM ABA vs. No Treatment
  misc_feature: MA Experiment ID: 20000070 Result: Down-regulated in Transcription
  misc_feature: MA Experiment 20000070 PARAMETER Experiment Name: At_100uM_ABA_Mutants_cDNA_P Parameter: Plant Line Value: CS24
  misc_feature: MA Experiment 20000070 PARAMETER Experiment Name: At_100uM_ABA_Mutants_cDNA_P Parameter: Timepoint (hr) Value: 6
  misc_feature: MA Experiment 20000070 PARAMETER Experiment Name: At_100uM_ABA_Mutants_cDNA_P Parameter: Tissue Value: Aerial
  misc_feature: MA Experiment 20000070 PARAMETER Experiment Name: At_100uM_ABA_Mutants_cDNA_P Parameter: Treatment Value: 100uM ABA vs. No Treatment
  misc_feature: MA Experiment ID: 20000071 Result: Down-regulated in Transcription
  misc_feature: MA Experiment 20000071 PARAMETER Experiment Name: At_100uM_ABA_Mutants_cDNA_P Parameter: Plant Line Value: CS8104
  misc_feature: MA Experiment 20000071 PARAMETER Experiment Name: At_100uM_ABA_Mutants_cDNA_P Parameter: Timepoint (hr) Value: 6
  misc_feature: MA Experiment 20000071 PARAMETER Experiment Name: At_100uM_ABA_Mutants_cDNA_P Parameter: Tissue Value: Aerial
  misc_feature: MA Experiment 20000071 PARAMETER Experiment Name: At_100uM_ABA_Mutants_cDNA_P Parameter: Treatment Value: 100uM ABA vs. No Treatment
  misc_feature: MA Experiment ID: 20000086 Result: Down-regulated in Transcription
  misc_feature: MA Experiment 20000086 PARAMETER Experiment Name: At_100uM_ABA_Mutants_cDNA_P Parameter: Plant Line Value: CS22
  misc_feature: MA Experiment 20000086 PARAMETER Experiment Name: At_100uM_ABA_Mutants_cDNA_P Parameter: Timepoint (hr) Value: 6
  misc_feature: MA Experiment 20000086 PARAMETER Experiment Name: At_100uM_ABA_Mutants_cDNA_P Parameter: Tissue Value: Aerial
  misc_feature: MA Experiment 20000086 PARAMETER Experiment Name: At_100uM_ABA_Mutants_cDNA_P Parameter: Treatment Value: 100uM ABA vs. No Treatment
  misc_feature: MA Experiment ID: 20000087 Result: Down-regulated in Transcription
  misc_feature: MA Experiment 20000087 PARAMETER Experiment Name: At_100uM_ABA_Mutants_cDNA_P Parameter: Plant Line Value: WS
  misc_feature: MA Experiment 20000087 PARAMETER Experiment Name: At_100uM_ABA_Mutants_cDNA_P Parameter: Timepoint (hr) Value: 6
  misc_feature: MA Experiment 20000087 PARAMETER Experiment Name: At_100uM_ABA_Mutants_cDNA_P Parameter: Tissue Value: Aerial
  misc_feature: MA Experiment 20000087 PARAMETER Experiment Name: At_100uM_ABA_Mutants_cDNA_P Parameter: Treatment Value: 100uM ABA vs. No Treatment
  misc_feature: MA Experiment ID: 20000307 Result: Up-regulated in Transcription
  misc_feature: MA Experiment 20000307 PARAMETER Experiment Name: At_Germinating_Seeds_Sub_P Parameter: Age (hr) Value: 24 vs. 0
  misc_feature: MA Experiment 20000307 PARAMETER Experiment Name: At_Germinating_Seeds_Sub_P Parameter: Organism Value: A. thaliana
  misc_feature: MA Experiment 20000307 PARAMETER Experiment Name: At_Germinating_Seeds_Sub_P Parameter: Plant Line Value: WS
  misc_feature: MA Experiment 20000307 PARAMETER Experiment Name: At_Germinating_Seeds_Sub_P Parameter: Tissue Value: Germinating Seeds
  misc_feature: MA Experiment ID: 20000314 Result: Down-regulated in Transcription
  misc_feature: MA Experiment 20000314 PARAMETER Experiment Name: At_14day_Shoots-Roots_Sub_P Parameter: Age (day) Value: 14
  misc_feature: MA Experiment 20000314 PARAMETER Experiment Name: At_14day_Shoots-Roots_Sub_P Parameter: Organism Value: A. thaliana
  misc_feature: MA Experiment 20000314 PARAMETER Experiment Name: At_14day_Shoots-Roots_Sub_P Parameter: Plant Line Value: WS
  misc_feature: MA Experiment 20000314 PARAMETER Experiment Name: At_14day_Shoots-Roots_Sub_P Parameter: Tissue Value: Roots vs. Whole Plant
  misc_feature: MA Experiment ID: 20000315 Result: Up-regulated in Transcription
  misc_feature: MA Experiment 20000315 PARAMETER Experiment Name: At_14day_Shoots-Roots_Sub_P Parameter: Age (day) Value: 14
  misc_feature: MA Experiment 20000315 PARAMETER Experiment Name: At_14day_Shoots-Roots_Sub_P Parameter: Organism Value: A. thaliana
  misc_feature: MA Experiment 20000315 PARAMETER Experiment Name: At_14day_Shoots-Roots_Sub_P Parameter: Plant Line Value: WS
  misc_feature: MA Experiment 20000315 PARAMETER Experiment Name: At_14day_Shoots-Roots_Sub_P Parameter: Tissue Value: Shoots vs. Whole Plant
  misc_feature: MA Experiment ID: 20000329 Result: Up-regulated in Transcription
  misc_feature: MA Experiment 20000329 PARAMETER Experiment Name: At_4deg_Cold_Sub_P Parameter: Age (day) Value: 14
  misc_feature: MA Experiment 20000329 PARAMETER Experiment Name: At_4deg_Cold_Sub_P Parameter: Organism Value: A. thaliana
  misc_feature: MA Experiment 20000329 PARAMETER Experiment Name: At_4deg_Cold_Sub_P Parameter: Plant Line Value: WS
  misc_feature: MA Experiment 20000329 PARAMETER Experiment Name: At_4deg_Cold_Sub_P Parameter: Temperature (deg C) Value: 4 vs. 22
  misc_feature: MA Experiment 20000329 PARAMETER Experiment Name: At_4deg_Cold_Sub_P Parameter: Timepoint (hr) Value: 6
  misc_feature: MA Experiment 20000329 PARAMETER Experiment Name: At_4deg_Cold_Sub_P Parameter: Tissue Value: Aerial
  misc_feature: MA Experiment ID: 20000347 Result: Down-regulated in Transcription
  misc_feature: MA Experiment 20000347 PARAMETER Experiment Name: At_2mM_SA_Sub_P Parameter: Age (day) Value: 14
  misc_feature: MA Experiment 20000347 PARAMETER Experiment Name: At_2mM_SA_Sub_P Parameter: Organism Value: A. thaliana
  misc_feature: MA Experiment 20000347 PARAMETER Experiment Name: At_2mM_SA_Sub_P Parameter: Plant Line Value: WS
  misc_feature: MA Experiment 20000347 PARAMETER Experiment Name: At_2mM_SA_Sub_P Parameter: Timepoint (hr) Value: 6
  misc_feature: MA Experiment 20000347 PARAMETER Experiment Name: At_2mM_SA_Sub_P Parameter: Tissue Value: Aerial
  misc_feature: MA Experiment 20000347 PARAMETER Experiment Name: At_2mM_SA_Sub_P Parameter: Treatment Value: 2mM SA vs. No Treatment
  misc_feature: MA Experiment ID: 20000355 Result: Up-regulated in Transcription
  misc_feature: MA Experiment 20000355 PARAMETER Experiment Name: At_Siliques_Sub_P Parameter: Age (day) Value: 21
  misc_feature: MA Experiment 20000355 PARAMETER Experiment Name: At_Siliques_Sub_P Parameter: Organism Value: A. thaliana
  misc_feature: MA Experiment 20000355 PARAMETER Experiment Name: At_Siliques_Sub_P Parameter: Plant Line Value: WS
  misc_feature: MA Experiment 20000355 PARAMETER Experiment Name: At_Siliques_Sub_P Parameter: Tissue Value: Less Than 5mm Siliques vs. Whole Plant
  misc_feature: MA Experiment ID: 20000634 Result: Down-regulated in Transcription
  misc_feature: MA Experiment 20000634 PARAMETER Experiment Name: At_10percent_PEG_Sub_P Parameter: Age (day) Value: 12
  misc_feature: MA Experiment 20000634 PARAMETER Experiment Name: At_10percent_PEG_Sub_P Parameter: Organism Value: A. thaliana
  misc_feature: MA Experiment 20000634 PARAMETER Experiment Name: At_10percent_PEG_Sub_P Parameter: Plant Line Value: WS
  misc_feature: MA Experiment 20000634 PARAMETER Experiment Name: At_10percent_PEG_Sub_P Parameter: Timepoint (day) Value: 12
  misc_feature: MA Experiment 20000634 PARAMETER Experiment Name: At_10percent_PEG_Sub_P Parameter: Tissue Value: Whole Plant
  misc_feature: MA Experiment 20000634 PARAMETER Experiment Name: At_10percent_PEG_Sub_P Parameter: Treatment Value: 10% PEG vs. No Treatment

SEQ ID NO: 31464 - protein, 112 aa, Arabidopsis thaliana; identical to SEQ ID NO: 27874
  peptide (1)..(112): Ceres Seq. ID no. 13653926
  misc_feature (17)..(98): Homolog of NCBI NO: 1345698 NR Description: Chlorophyll A-B binding protein 151, chloroplast
  misc_feature (17)..(98): Homolog of NCBI NO: 3560529 NR Description: light harvesting chlorophyll A/B binding protein
  misc_feature (17)..(98): Homolog of NCBI NO: 15224465 NR Description: light-harvesting chlorophyll a/b binding protein
  misc_feature (17)..(98): Homolog of NCBI NO: 15224471 NR Description: light-harvesting chlorophyll a/b binding protein
  misc_feature (17)..(98): Homolog of NCBI NO: 25299022 NR Description: chlorophyll a/b-binding protein Lhcb2
  misc_feature (17)..(98): Homolog of NCBI NO: 25299029 NR Description: chlorophyll a/b-binding protein Lhcb2
  misc_feature (17)..(98): Homolog of NCBI NO: 15232249 NR Description: light harvesting chlorophyll A/B binding protein,

SEQ ID NO: 31465 - protein, 96 aa, Arabidopsis thaliana; identical to SEQ ID NO: 27875
  peptide (1)..(96): Ceres Seq. ID no. 13653927
  misc_feature (1)..(82): Homolog of NCBI NO: 1345698 NR Description: Chlorophyll A-B binding protein 151, chloroplast
  misc_feature (1)..(82): Homolog of NCBI NO: 3560529 NR Description: light harvesting chlorophyll A/B binding protein
  misc_feature (1)..(82): Homolog of NCBI NO: 15224465 NR Description: light-harvesting chlorophyll a/b binding protein
  misc_feature (1)..(82): Homolog of NCBI NO: 15224471 NR Description: light-harvesting chlorophyll a/b binding protein
  misc_feature (1)..(82): Homolog of NCBI NO: 25299022 NR Description: chlorophyll a/b-binding protein Lhcb2
  misc_feature (1)..(82): Homolog of NCBI NO: 25299029 NR Description: chlorophyll a/b-binding protein Lhcb2
  misc_feature (1)..(82): Homolog of NCBI NO: 15232249 NR Description: light harvesting chlorophyll A/B binding protein,

SEQ ID NO: 31466 - protein, 95 aa, Arabidopsis thaliana; identical to SEQ ID NO: 27876
  peptide (1)..(95): Ceres Seq. ID no. 13653928
  misc_feature (1)..(95): Pfam Name: Chlorophyll A-B binding protein Pfam Description: Chlorophyll A-B binding protein
  misc_feature (1)..(95): Homolog of NCBI NO: 1345698 NR Description: Chlorophyll A-B binding protein 151, chloroplast
  misc_feature (1)..(95): Homolog of NCBI NO: 3560529 NR Description: light harvesting chlorophyll A/B binding protein
  misc_feature (1)..(95): Homolog of NCBI NO: 15224465 NR Description: light-harvesting chlorophyll a/b binding protein
  misc_feature (1)..(95): Homolog of NCBI NO: 15224471 NR Description: light-harvesting chlorophyll a/b binding protein
  misc_feature (1)..(95): Homolog of NCBI NO: 25299022 NR Description: chlorophyll a/b-binding protein Lhcb2
  misc_feature (1)..(95): Homolog of NCBI NO: 25299029 NR Description: chlorophyll a/b-binding protein Lhcb2
  misc_feature (1)..(95): Homolog of NCBI NO: 15232249 NR Description: light harvesting chlorophyll A/B binding protein,

SEQ ID NO: 31467 - DNA, 887 bp, Arabidopsis thaliana; identical to SEQ ID NO: 27877
  misc_feature (1)..(887): Ceres Seq. ID no. 12421446
  misc_feature: MA Experiment ID: 20000173 Result: Down-regulated in Transcription
  misc_feature: MA Experiment 20000173 PARAMETER Experiment Name: At_42deg_Heat_P Parameter: Age (day) Value: 14
  misc_feature: MA Experiment 20000173 PARAMETER Experiment Name: At_42deg_Heat_P Parameter: Organism Value: A. thaliana
  misc_feature: MA Experiment 20000173 PARAMETER Experiment Name: At_42deg_Heat_P Parameter: Plant Line Value: WS
  misc_feature: MA Experiment 20000173 PARAMETER Experiment Name: At_42deg_Heat_P Parameter: Temperature (deg C) Value: 42 vs. 22
  misc_feature: MA Experiment 20000173 PARAMETER Experiment Name: At_42deg_Heat_P Parameter: Timepoint (hr) Value: 6
  misc_feature: MA Experiment 20000173 PARAMETER Experiment Name: At_42deg_Heat_P Parameter: Tissue Value: Aerial

SEQ ID NO: 31468 - protein, 255 aa, Arabidopsis thaliana; identical to SEQ ID NO: 27765
  peptide (1)..(255): Ceres Seq. ID no. 12421447
  misc_feature (27)..(255): Pfam Name: HAD superfamily, subfamily IIIB (Acid phosphatase) Pfam Description: HAD superfamily, subfamily IIIB (Acid
  misc_feature (16)..(255): Homolog of NCBI NO: 15224907 NR Description: putative acid phosphatase; protein id:
  misc_feature (43)..(254): Homolog of NCBI NO: 445113 NR Description: acid phosphatase 1
  misc_feature (43)..(254): Homolog of NCBI NO: 130718 NR Description: Acid phosphatase precursor 1
  misc_feature (23)..(255): Homolog of NCBI NO: 15241412 NR Description: acid phosphatase; protein id: At5g51260.1
  misc_feature (42)..(255): Homolog of NCBI NO: 15234949 NR Description: acid phosphatase - like protein
  misc_feature (1)..(254): Homolog of NCBI NO: 15233526 NR Description: acid phosphatase-like protein
  misc_feature (1)..(255): Homolog of NCBI NO: 15233504 NR Description: acid phosphatase-like protein

SEQ ID NO: 31469 - DNA, 791 bp, Arabidopsis thaliana; identical to SEQ ID NO: 27879
  misc_feature (1)..(791): Ceres Seq. ID no. 13490901
  misc_feature: MA Experiment ID: 108462 Result: Up-regulated in Transcription
  misc_feature: MA Experiment 108462 PARAMETER Experiment Name: At_Germinating_Seeds_cDNA_P Parameter: Age (day) Value: 2 vs. 0
  misc_feature: MA Experiment 108462 PARAMETER Experiment Name: At_Germinating_Seeds_cDNA_P Parameter: Tissue Value: Germinating Seeds
  misc_feature: MA Experiment ID: 108463 Result: Up-regulated in Transcription
  misc_feature: MA Experiment 108463 PARAMETER Experiment Name: At_Germinating_Seeds_cDNA_P Parameter: Age (day) Value: 3 vs. 0
  misc_feature: MA Experiment 108463 PARAMETER Experiment Name: At_Germinating_Seeds_cDNA_P Parameter: Tissue Value: Germinating Seeds
  misc_feature: MA Experiment ID: 108464 Result: Up-regulated in Transcription
  misc_feature: MA Experiment 108464 PARAMETER Experiment Name: At_Germinating_Seeds_cDNA_P Parameter: Age (day) Value: 4 vs. 0
  misc_feature: MA Experiment 108464 PARAMETER Experiment Name: At_Germinating_Seeds_cDNA_P Parameter: Tissue Value: Germinating Seeds
  misc_feature: MA Experiment ID: 108501 Result: Up-regulated in Transcription
  misc_feature: MA Experiment 108501 PARAMETER Experiment Name: At_ap2_floral_buds_cDNA_P Parameter: Plant Line Value: ap2 (Ler.)
  misc_feature: MA Experiment 108501 PARAMETER Experiment Name: At_ap2_floral_buds_cDNA_P Parameter: Tissue Value: Closed Flower
  misc_feature: MA Experiment ID: 20000117 Result: Up-regulated in Transcription
  misc_feature: MA Experiment 20000117 PARAMETER Experiment Name: At_100uM_ABA_Mutants_cDNA_P Parameter: Plant Line Value: Columbia
  misc_feature: MA Experiment 20000117 PARAMETER Experiment Name: At_100uM_ABA_Mutants_cDNA_P Parameter: Timepoint (hr) Value: 6
  misc_feature: MA Experiment 20000117 PARAMETER Experiment Name: At_100uM_ABA_Mutants_cDNA_P Parameter: Tissue Value: Aerial
  misc_feature: MA Experiment 20000117 PARAMETER Experiment Name: At_100uM_ABA_Mutants_cDNA_P Parameter: Treatment Value: 100uM ABA vs. No Treatment
  misc_feature: MA Experiment ID: 20000171 Result: Up-regulated in Transcription
  misc_feature: MA Experiment 20000171 PARAMETER Experiment Name: At_42deg_Heat_P Parameter: Age (day) Value: 14
  misc_feature: MA Experiment 20000171 PARAMETER Experiment Name: At_42deg_Heat_P Parameter: Organism Value: A. thaliana
  misc_feature: MA Experiment 20000171 PARAMETER Experiment Name: At_42deg_Heat_P Parameter: Plant Line Value: WS
  misc_feature: MA Experiment 20000171 PARAMETER Experiment Name: At_42deg_Heat_P Parameter: Temperature (deg C) Value: 42 vs. 22
  misc_feature: MA Experiment 20000171 PARAMETER Experiment Name: At_42deg_Heat_P Parameter: Timepoint (hr) Value: 1
  misc_feature: MA Experiment 20000171 PARAMETER Experiment Name: At_42deg_Heat_P Parameter: Tissue Value: Aerial
  misc_feature: MA Experiment ID: 20000184 Result: Up-regulated in Transcription
  misc_feature: MA Experiment 20000184 PARAMETER Experiment Name: At_Shoots__P Parameter: Age (day) Value: 7
  misc_feature: MA Experiment 20000184 PARAMETER Experiment Name: At_Shoots__P Parameter: Tissue Value: Shoots vs. Whole Plant
  misc_feature: MA Experiment ID: 20000224 Result: Down-regulated in Transcription
  misc_feature: MA Experiment ID: 20000438 Result: Up-regulated in Transcription
  misc_feature: MA Experiment 20000438 PARAMETER Experiment Name: At_Shoots__P Parameter: Age (day) Value: 14
  misc_feature: MA Experiment 20000438 PARAMETER Experiment Name: At_Shoots__P Parameter: Tissue Value: Shoots vs. Whole Plant
  misc_feature: MA Experiment ID: 20000445 Result: Down-regulated in Transcription
  misc_feature: MA Experiment 20000445 PARAMETER Experiment Name: At_100uM_NAA__P Parameter: Age (day) Value: 14
  misc_feature: MA Experiment 20000445 PARAMETER Experiment Name: At_100uM_NAA__P Parameter: Organism Value: A. thaliana
  misc_feature: MA Experiment 20000445 PARAMETER Experiment Name: At_100uM_NAA__P Parameter: Plant Line Value: WS
  misc_feature: MA Experiment 20000445 PARAMETER Experiment Name: At_100uM_NAA__P Parameter: Timepoint (hr) Value: 6
  misc_feature: MA Experiment 20000445 PARAMETER Experiment Name: At_100uM_NAA__P Parameter: Tissue Value: Aerial
  misc_feature: MA Experiment 20000445 PARAMETER Experiment Name: At_100uM_NAA__P Parameter: Treatment Value: 100uM NAA vs. No Treatment
  misc_feature: MA Experiment ID: 20000495 Result: Down-regulated in Transcription
  misc_feature: MA Experiment 20000495 PARAMETER Experiment Name: At_Guard_Cells_P Parameter: Harvest Date Value: 8/2/2002
  misc_feature: MA Experiment 20000495 PARAMETER Experiment Name: At_Guard_Cells_P Parameter: Organism Value: A. thaliana
  misc_feature: MA Experiment 20000495 PARAMETER Experiment Name: At_Guard_Cells_P Parameter: Tissue Value: Guard Cells vs. Leaves
  misc_feature: MA Experiment ID: 20001451 Result: Up-regulated in Transcription
  misc_feature: MA Experiment 20001451 PARAMETER Experiment Name: At_Far-red-induction_P Parameter: Age (day) Value: 7
  misc_feature: MA Experiment 20001451 PARAMETER Experiment Name: At_Far-red-induction_P Parameter: Light Value: Far-red vs. White
  misc_feature: MA Experiment 20001451 PARAMETER Experiment Name: At_Far-red-induction_P Parameter: Organism Value: A. thaliana
  misc_feature: MA Experiment 20001451 PARAMETER Experiment Name: At_Far-red-induction_P Parameter: Plant Line Value: Columbia
  misc_feature: MA Experiment 20001451 PARAMETER Experiment Name: At_Far-red-induction_P Parameter: Timepoint (hr) Value: 24
  misc_feature: MA Experiment 20001451 PARAMETER Experiment Name: At_Far-red-induction_P Parameter: Tissue Value: Whole Plant
  misc_feature: MA Experiment ID: 20001768 Result: Down-regulated in Transcription
  misc_feature: MA Experiment 20001768 PARAMETER Experiment Name: At_Far-red-enriched-adult_P Parameter: Age (day) Value: 28
  misc_feature: MA Experiment 20001768 PARAMETER Experiment Name: At_Far-red-enriched-adult_P Parameter: Light Value: Far-red enriched vs. White
  misc_feature: MA Experiment 20001768 PARAMETER Experiment Name: At_Far-red-enriched-adult_P Parameter: Organism Value: A. thaliana
  misc_feature: MA Experiment 20001768 PARAMETER Experiment Name: At_Far-red-enriched-adult_P Parameter: Plant Line Value: Columbia
  misc_feature: MA Experiment 20001768 PARAMETER Experiment Name: At_Far-red-enriched-adult_P Parameter: Timepoint (hr) Value: 1
  misc_feature: MA Experiment 20001768 PARAMETER Experiment Name: At_Far-red-enriched-adult_P Parameter: Tissue Value: Aerial
  misc_feature: MA Experiment ID: 20001911 Result: Down-regulated in Transcription
  misc_feature: MA Experiment 20001911 PARAMETER Experiment Name: At_Drought_Reproduction_P Parameter: Age (day) Value: 40
  misc_feature: MA Experiment 20001911 PARAMETER Experiment Name: At_Drought_Reproduction_P Parameter: Organism Value: A. thaliana
  misc_feature: MA Experiment 20001911 PARAMETER Experiment Name: At_Drought_Reproduction_P Parameter: Plant Line Value: WS
  misc_feature: MA Experiment 20001911 PARAMETER Experiment Name: At_Drought_Reproduction_P Parameter: Timepoint (day) Value: 10
  misc_feature: MA Experiment 20001911 PARAMETER Experiment Name: At_Drought_Reproduction_P Parameter: Tissue Value: Flowers
  misc_feature: MA Experiment 20001911 PARAMETER Experiment Name: At_Drought_Reproduction_P Parameter: Treatment Value: Drought vs. No Drought

SEQ ID NO: 31470 - protein, 169 aa, Arabidopsis thaliana; identical to SEQ ID NO: 27880
  peptide (1)..(169): Ceres Seq. ID no. 13490902
  misc_feature (25)..(92): Homolog of NCBI NO: 34896398 NR Description: hypothetical protein [Oryza sativa (japonica
  misc_feature (1)..(121): Homolog of NCBI NO: 18396990 NR Description: expressed protein [Arabidopsis thaliana]
  misc_feature (3)..(116): Homolog of NCBI NO: 34909702 NR Description: B1131G08.9 [Oryza sativa (japonica
  misc_feature (1)..(167): Homolog of NCBI NO: 34907910 NR Description: P0439E11.22 [Oryza sativa (japonica
  misc_feature (1)..(167): Homolog of NCBI NO: 34896112 NR Description: P0701D05.10 [Oryza sativa (japonica
  misc_feature (1)..(169): Homolog of NCBI NO: 15227725 NR Description: hypothetical protein [Arabidopsis thaliana]
  misc_feature (1)..(169): Homolog of NCBI NO: 18390706 NR Description: expressed protein [Arabidopsis thaliana]

SEQ ID NO: 31471 - DNA, 1109 bp, Arabidopsis thaliana; identical to SEQ ID NO: 27881
  misc_feature (1)..(1109): Ceres Seq. ID no. 12422858
  misc_feature: MA Experiment ID: 108434 Result: Up-regulated in Transcription
  misc_feature: MA Experiment 108434 PARAMETER Experiment Name: At_Root_Tips_cDNA_P Parameter: Tissue Value: Root Tips
  misc_feature: MA Experiment ID: 108461 Result: Up-regulated in Transcription
  misc_feature: MA Experiment 108461 PARAMETER Experiment Name: At_Germinating_Seeds_cDNA_P Parameter: Age (day) Value: 1 vs. 0
  misc_feature: MA Experiment 108461 PARAMETER Experiment Name: At_Germinating_Seeds_cDNA_P Parameter: Tissue Value: Germinating Seeds
  misc_feature: MA Experiment ID: 108462 Result: Up-regulated in Transcription
  misc_feature: MA Experiment 108462 PARAMETER Experiment Name: At_Germinating_Seeds_cDNA_P Parameter: Age (day) Value: 2 vs. 0
  misc_feature: MA Experiment 108462 PARAMETER Experiment Name: At_Germinating_Seeds_cDNA_P Parameter: Tissue Value: Germinating Seeds
  misc_feature: MA Experiment ID: 108463 Result: Up-regulated in Transcription
  misc_feature: MA Experiment 108463 PARAMETER Experiment Name: At_Germinating_Seeds_cDNA_P Parameter: Age (day) Value: 3 vs. 0
  misc_feature: MA Experiment 108463 PARAMETER Experiment Name: At_Germinating_Seeds_cDNA_P Parameter: Tissue Value: Germinating Seeds
  misc_feature: MA Experiment ID: 108464 Result: Up-regulated in Transcription
  misc_feature: MA Experiment 108464 PARAMETER Experiment Name: At_Germinating_Seeds_cDNA_P Parameter: Age (day) Value: 4 vs. 0
  misc_feature: MA Experiment 108464 PARAMETER Experiment Name: At_Germinating_Seeds_cDNA_P Parameter: Tissue Value: Germinating Seeds
  misc_feature: MA Experiment ID: 108473 Result: Down-regulated in Transcription
  misc_feature: MA Experiment 108473 PARAMETER Experiment Name: At_Drought_Flowers_cDNA_P Parameter: Timepoint (hr) Value: 7 d
  misc_feature: MA Experiment 108473 PARAMETER Experiment Name: At_Drought_Flowers_cDNA_P Parameter: Tissue Value: Flower
  misc_feature: MA Experiment 108473 PARAMETER Experiment Name: At_Drought_Flowers_cDNA_P Parameter: Treatment Value: Drought vs. No Drought
  misc_feature: MA Experiment ID: 108474 Result: Down-regulated in Transcription
  misc_feature: MA Experiment 108474 PARAMETER Experiment Name: At_Drought_Flowers_cDNA_P Parameter: Timepoint (hr) Value: null
  misc_feature: MA Experiment 108474 PARAMETER Experiment Name: At_Drought_Flowers_cDNA_P Parameter: Treatment Value: Drought vs. No Drought
  misc_feature: MA Experiment ID: 108561 Result: Down-regulated in Transcription
  misc_feature: MA Experiment 108561 PARAMETER Experiment Name: At_100uM_ABA_cDNA_P Parameter: Timepoint (hr) Value: 6
  misc_feature: MA Experiment 108561 PARAMETER Experiment Name: At_100uM_ABA_cDNA_P Parameter: Tissue Value: Aerial
  misc_feature: MA Experiment 108561 PARAMETER Experiment Name: At_100uM_ABA_cDNA_P Parameter: Treatment Value: 100uM ABA vs. No Treatment
  misc_feature: MA Experiment ID: 108572 Result: Down-regulated in Transcription
  misc_feature: MA Experiment 108572 PARAMETER Experiment Name: At_Drought_cDNA_P Parameter: Timepoint (hr) Value: 1
  misc_feature: MA Experiment 108572 PARAMETER Experiment Name: At_Drought_cDNA_P Parameter: Tissue Value: Aerial
  misc_feature: MA Experiment 108572 PARAMETER Experiment Name: At_Drought_cDNA_P Parameter: Treatment Value: Drought vs. No Drought
  misc_feature: MA Experiment ID: 108573 Result: Down-regulated in Transcription
  misc_feature: MA Experiment 108573 PARAMETER Experiment Name: At_Drought_cDNA_P Parameter: Timepoint (hr) Value: 6
  misc_feature: MA Experiment 108573 PARAMETER Experiment Name: At_Drought_cDNA_P Parameter: Tissue Value: Aerial
  misc_feature: MA Experiment 108573 PARAMETER Experiment Name: At_Drought_cDNA_P Parameter: Treatment Value: Drought vs. No Drought
  misc_feature: MA Experiment ID: 108576 Result: Down-regulated in Transcription
  misc_feature: MA Experiment 108576 PARAMETER Experiment Name: At_42deg_Heat_cDNA_P Parameter: Temperature (deg C) Value: 42 vs. 22
  misc_feature: MA Experiment 108576 PARAMETER Experiment Name: At_42deg_Heat_cDNA_P Parameter: Timepoint (hr) Value: 1
  misc_feature: MA Experiment 108576 PARAMETER Experiment Name: At_42deg_Heat_cDNA_P Parameter: Tissue Value: Aerial
  misc_feature: MA Experiment ID: 108585 Result: Down-regulated in Transcription
  misc_feature: MA Experiment 108585 PARAMETER Experiment Name: At_5mM_NaNP_cDNA_P Parameter: Timepoint (hr) Value: 6
  misc_feature: MA Experiment 108585 PARAMETER Experiment Name: At_5mM_NaNP_cDNA_P Parameter: Tissue Value: Aerial
  misc_feature: MA Experiment 108585 PARAMETER Experiment Name: At_5mM_NaNP_cDNA_P Parameter: Treatment Value: null
  misc_feature: MA Experiment ID: 108594 Result: Down-regulated in Transcription
  misc_feature: MA Experiment 108594 PARAMETER Experiment Name: At_Ler-rhl_Root_cDNA_P Parameter: Plant Line Value: null
  misc_feature: MA Experiment ID: 108595 Result: Down-regulated in Transcription
  misc_feature: MA Experiment 108595 PARAMETER Experiment Name: At_Ler-pi_Ovule_cDNA_P Parameter: Plant Line Value: null
  misc_feature: MA Experiment ID: 108605 Result: Down-regulated in Transcription
  misc_feature: MA Experiment 108605 PARAMETER Experiment Name: At_100uM_ABA_cDNA_P Parameter: Timepoint (hr) Value: 6
  misc_feature: MA Experiment 108605 PARAMETER Experiment Name: At_100uM_ABA_cDNA_P Parameter: Tissue Value: Aerial
  misc_feature: MA Experiment 108605 PARAMETER Experiment Name: At_100uM_ABA_cDNA_P Parameter: Treatment Value: 100uM ABA vs. No Treatment
  misc_feature: MA Experiment ID: 108609 Result: Down-regulated in Transcription
  misc_feature: MA Experiment 108609 PARAMETER Experiment Name: At_100uM_ABA_cDNA_P Parameter: Timepoint (hr) Value: 24
  misc_feature: MA Experiment 108609 PARAMETER Experiment Name: At_100uM_ABA_cDNA_P Parameter: Tissue Value: Aerial
  misc_feature: MA Experiment 108609 PARAMETER Experiment Name: At_100uM_ABA_cDNA_P Parameter: Treatment Value: 100uM ABA vs. No Treatment
  misc_feature: MA Experiment ID: 108668 Result: Down-regulated in Transcription
  misc_feature: MA Experiment 108668 PARAMETER Experiment Name: At_2mM_SA_cDNA_P Parameter: Plant Line Value: WS
  misc_feature: MA Experiment 108668 PARAMETER Experiment Name: At_2mM_SA_cDNA_P Parameter: Timepoint (hr) Value: 6
  misc_feature: MA Experiment 108668 PARAMETER Experiment Name: At_2mM_SA_cDNA_P Parameter: Treatment Value: 2mM SA vs. No Treatment
  misc_feature: MA Experiment ID: 20000070 Result: Down-regulated in Transcription
  misc_feature: MA Experiment 20000070 PARAMETER Experiment Name: At_100uM_ABA_Mutants_cDNA_P Parameter: Plant Line Value: CS24
  misc_feature: MA Experiment 20000070 PARAMETER Experiment Name: At_100uM_ABA_Mutants_cDNA_P Parameter: Timepoint (hr) Value: 6
  misc_feature: MA Experiment 20000070 PARAMETER Experiment Name: At_100uM_ABA_Mutants_cDNA_P Parameter: Tissue Value: Aerial
  misc_feature: MA Experiment 20000070 PARAMETER Experiment Name: At_100uM_ABA_Mutants_cDNA_P Parameter: Treatment Value: 100uM ABA vs. No Treatment
  misc_feature: MA Experiment ID: 20000113 Result: Down-regulated in Transcription
  misc_feature: MA Experiment 20000113 PARAMETER Experiment Name: At_42deg_Heat_cDNA_P Parameter: Temperature (deg C) Value: 42 vs. 22
  misc_feature: MA Experiment 20000113 PARAMETER Experiment Name: At_42deg_Heat_cDNA_P Parameter: Timepoint (hr) Value: 8
  misc_feature: MA Experiment 20000113 PARAMETER Experiment Name: At_42deg_Heat_cDNA_P Parameter: Tissue Value: Aerial
  misc_feature: MA Experiment ID: 20000117 Result: Down-regulated in Transcription
  misc_feature: MA Experiment 20000117 PARAMETER Experiment Name: At_100uM_ABA_Mutants_cDNA_P Parameter: Plant Line Value: Columbia
  misc_feature: MA Experiment 20000117 PARAMETER Experiment Name: At_100uM_ABA_Mutants_cDNA_P Parameter: Timepoint (hr) Value: 6
  misc_feature: MA Experiment 20000117 PARAMETER Experiment Name: At_100uM_ABA_Mutants_cDNA_P Parameter: Tissue Value: Aerial
  misc_feature: MA Experiment 20000117 PARAMETER Experiment Name: At_100uM_ABA_Mutants_cDNA_P Parameter: Treatment Value: 100uM ABA vs. No Treatment
  misc_feature: MA Experiment ID: 20000169 Result: Down-regulated in Transcription
  misc_feature: MA Experiment 20000169 PARAMETER Experiment Name: At_100uM_ABA_P Parameter: Age (day) Value: 14
  misc_feature: MA Experiment 20000169 PARAMETER Experiment Name: At_100uM_ABA_P Parameter: Organism Value: A. thaliana
  misc_feature: MA Experiment 20000169 PARAMETER Experiment Name: At_100uM_ABA_P Parameter: Plant Line Value: WS
  misc_feature: MA Experiment 20000169 PARAMETER Experiment Name: At_100uM_ABA_P Parameter: Timepoint (hr) Value: 6
  misc_feature: MA Experiment 20000169 PARAMETER Experiment Name: At_100uM_ABA_P Parameter: Tissue Value: Aerial
  misc_feature: MA Experiment 20000169 PARAMETER Experiment Name: At_100uM_ABA_P Parameter: Treatment Value: 100uM ABA vs. No Treatment
  misc_feature: MA Experiment ID: 20000171 Result: Down-regulated in Transcription
  misc_feature: MA Experiment 20000171 PARAMETER Experiment Name: At_42deg_Heat_P Parameter: Age (day) Value: 14
  misc_feature: MA Experiment 20000171 PARAMETER Experiment Name: At_42deg_Heat_P Parameter: Organism Value: A. thaliana
  misc_feature: MA Experiment 20000171 PARAMETER Experiment Name: At_42deg_Heat_P Parameter: Plant Line Value: WS
  misc_feature: MA Experiment 20000171 PARAMETER Experiment Name: At_42deg_Heat_P Parameter: Temperature (deg C) Value: 42 vs. 22
  misc_feature: MA Experiment 20000171 PARAMETER Experiment Name: At_42deg_Heat_P Parameter: Timepoint (hr) Value: 1
  misc_feature: MA Experiment 20000171 PARAMETER Experiment Name: At_42deg_Heat_P Parameter: Tissue Value: Aerial
  misc_feature: MA Experiment ID: 20000173 Result: Down-regulated in Transcription
  misc_feature: MA Experiment 20000173 PARAMETER Experiment Name: At_42deg_Heat_P Parameter: Age (day) Value: 14
  misc_feature: MA Experiment 20000173 PARAMETER Experiment Name: At_42deg_Heat_P Parameter: Organism Value: A. thaliana
  misc_feature: MA Experiment 20000173 PARAMETER Experiment Name: At_42deg_Heat_P Parameter: Plant Line Value: WS
  misc_feature: MA Experiment 20000173 PARAMETER Experiment Name: At_42deg_Heat_P Parameter: Temperature (deg C) Value: 42 vs. 22
  misc_feature: MA Experiment 20000173 PARAMETER Experiment Name: At_42deg_Heat_P Parameter: Timepoint (hr) Value: 6
  misc_feature: MA Experiment 20000173 PARAMETER Experiment Name: At_42deg_Heat_P Parameter: Tissue Value: Aerial
  misc_feature: MA Experiment ID: 20000180 Result: Up-regulated in Transcription
  misc_feature: MA Experiment 20000180 PARAMETER Experiment Name: At_Germinating_Seeds_P Parameter: Age (hr) Value: 24 vs. 0
  misc_feature: MA Experiment 20000180 PARAMETER Experiment Name: At_Germinating_Seeds_P Parameter: Tissue Value: Germinating Seeds
  misc_feature: MA Experiment ID: 20000182 Result: Down-regulated in Transcription
  misc_feature: MA Experiment 20000182 PARAMETER Experiment Name: At_2mM_SA_P Parameter: Age (day) Value: 14
  misc_feature: MA Experiment 20000182 PARAMETER Experiment Name: At_2mM_SA_P Parameter: Organism Value: A. thaliana
  misc_feature: MA Experiment 20000182 PARAMETER Experiment Name: At_2mM_SA_P Parameter: Plant Line Value: WS
  misc_feature: MA Experiment 20000182 PARAMETER Experiment Name: At_2mM_SA_P Parameter: Timepoint (hr) Value: 6
  misc_feature: MA Experiment 20000182 PARAMETER Experiment Name: At_2mM_SA_P Parameter: Tissue Value: Aerial
  misc_feature: MA Experiment 20000182 PARAMETER Experiment Name: At_2mM_SA_P Parameter: Treatment Value: 2mM SA vs. No Treatment
  misc_feature: MA Experiment ID: 20000184 Result: Up-regulated in Transcription
  misc_feature: MA Experiment 20000184 PARAMETER Experiment Name: At_Shoots__P Parameter: Age (day) Value: 7
  misc_feature: MA Experiment 20000184 PARAMETER Experiment Name: At_Shoots__P Parameter: Tissue Value: Shoots vs. Whole Plant
  misc_feature: MA Experiment ID: 20000185 Result: Up-regulated in Transcription
  misc_feature: MA Experiment 20000185 PARAMETER Experiment Name: At_Roots__P Parameter: Age (day) Value: 7 vs. 21
  misc_feature: MA Experiment 20000185 PARAMETER Experiment Name: At_Roots__P Parameter: Organism Value: A. thaliana
  misc_feature: MA Experiment 20000185 PARAMETER Experiment Name: At_Roots__P Parameter: Tissue Value: Roots vs. Whole Plant
  misc_feature: MA Experiment ID: 20000224 Result: Down-regulated in Transcription
  misc_feature: MA Experiment ID: 20000227 Result: Up-regulated in Transcription
  misc_feature: MA Experiment 20000227 PARAMETER Experiment Name: At_Root-Tips-vs-Tops_P Parameter: Tissue Value: Root Tips vs. Root Tops
  misc_feature: MA Experiment ID: 20000234 Result: Up-regulated in Transcription
  misc_feature: MA Experiment 20000234 PARAMETER Experiment Name: At_Siliques_P Parameter: Age (day) Value: 21
  misc_feature: MA Experiment 20000234 PARAMETER Experiment Name: At_Siliques_P Parameter: Organism Value: A. thaliana
  misc_feature: MA Experiment 20000234 PARAMETER Experiment Name: At_Siliques_P Parameter: Plant Line Value: WS
  misc_feature: MA Experiment 20000234 PARAMETER Experiment Name: At_Siliques_P Parameter: Tissue Value: Less Than 5mm Siliques vs. Whole Plant
  misc_feature: MA Experiment ID: 20000437 Result: Down-regulated in Transcription
  misc_feature: MA Experiment 20000437 PARAMETER Experiment Name: At_Drought_P Parameter: Age (day) Value: 8
  misc_feature: MA Experiment 20000437 PARAMETER Experiment Name: At_Drought_P Parameter: Organism Value: A. thaliana
  misc_feature: MA Experiment 20000437 PARAMETER Experiment Name: At_Drought_P Parameter: Plant Line Value: WS
  misc_feature: MA Experiment 20000437 PARAMETER Experiment Name: At_Drought_P Parameter: Timepoint (hr) Value: 24
  misc_feature: MA Experiment 20000437 PARAMETER Experiment Name: At_Drought_P Parameter: Tissue Value: Whole Plant
  misc_feature: MA Experiment 20000437 PARAMETER Experiment Name: At_Drought_P Parameter: Treatment Value: Drought vs. No Drought
  misc_feature: MA Experiment ID: 20000438 Result: Up-regulated in Transcription
  misc_feature: MA Experiment 20000438 PARAMETER Experiment Name: At_Shoots__P Parameter: Age (day) Value: 14
  misc_feature: MA Experiment 20000438 PARAMETER Experiment Name: At_Shoots__P Parameter: Tissue Value: Shoots vs. Whole Plant
  misc_feature: MA Experiment ID: 20000439 Result: Up-regulated in Transcription
  misc_feature: MA Experiment 20000439 PARAMETER Experiment Name: At_Roots__P Parameter: Age (day) Value: 14 vs. 21
  misc_feature: MA Experiment 20000439 PARAMETER Experiment Name: At_Roots__P Parameter: Organism Value: A. thaliana
  misc_feature: MA Experiment 20000439 PARAMETER Experiment Name: At_Roots__P Parameter: Tissue Value: Roots vs. Whole Plant
  misc_feature: MA Experiment ID: 20000441 Result: Down-regulated in Transcription
  misc_feature: MA Experiment 20000441 PARAMETER Experiment Name: At_1uM_BR-BRZ__P Parameter: Tissue Value: Shoot Apices
  misc_feature: MA Experiment 20000441 PARAMETER Experiment Name: At_1uM_BR-BRZ__P Parameter: Treatment Value: 1uM BR vs. No Treatment
  misc_feature: MA Experiment ID: 20000453 Result: Down-regulated in Transcription
  misc_feature: MA Experiment 20000453 PARAMETER Experiment Name: At_100uM_ABA_P Parameter: Age (day) Value: 15
  misc_feature: MA Experiment 20000453 PARAMETER Experiment Name: At_100uM_ABA_P Parameter: Organism Value: A. thaliana
  misc_feature: MA Experiment 20000453 PARAMETER Experiment Name: At_100uM_ABA_P Parameter: Plant Line Value: WS
  misc_feature: MA Experiment 20000453 PARAMETER Experiment Name: At_100uM_ABA_P Parameter: Timepoint (hr) Value: 24
  misc_feature: MA Experiment 20000453 PARAMETER Experiment Name: At_100uM_ABA_P Parameter: Tissue Value: Aerial
  misc_feature: MA Experiment 20000453 PARAMETER Experiment Name: At_100uM_ABA_P Parameter: Treatment Value: 100uM ABA vs. No Treatment
  misc_feature: MA Experiment ID: 20000794 Result: Down-regulated in Transcription
  misc_feature: MA Experiment 20000794 PARAMETER Experiment Name: At_Petals_P Parameter: Age (day) Value: 23-25 days
  misc_feature: MA Experiment 20000794 PARAMETER Experiment Name: At_Petals_P Parameter: Plant Line Value: WS
  misc_feature: MA Experiment 20000794 PARAMETER Experiment Name: At_Petals_P Parameter: Tissue Value: Petals vs. Whole plant
  misc_feature: MA Experiment ID: 20001248 Result: Up-regulated in Transcription
  misc_feature: MA Experiment 20001248 PARAMETER Experiment Name: At_Far-red-induction_P Parameter: Age (day) Value: 7
  misc_feature: MA Experiment 20001248 PARAMETER Experiment Name: At_Far-red-induction_P Parameter: Light Value: Far-red vs. White
  misc_feature: MA Experiment 20001248 PARAMETER Experiment Name: At_Far-red-induction_P Parameter: Organism Value: A. thaliana
  misc_feature: MA Experiment 20001248 PARAMETER Experiment Name: At_Far-red-induction_P Parameter: Plant Line Value: Columbia
  misc_feature: MA Experiment 20001248 PARAMETER Experiment Name: At_Far-red-induction_P Parameter: Timepoint (hr) Value: 4
  misc_feature: MA Experiment 20001248 PARAMETER Experiment Name: At_Far-red-induction_P Parameter: Tissue Value: Whole Plant
  misc_feature: MA Experiment ID: 20001450 Result: Up-regulated in Transcription
  misc_feature: MA Experiment 20001450 PARAMETER Experiment Name: At_Far-red-induction_P Parameter: Age (day) Value: 7
  misc_feature: MA Experiment 20001450 PARAMETER Experiment Name: At_Far-red-induction_P Parameter: Light Value: Far-red vs. White
  misc_feature: MA Experiment 20001450 PARAMETER Experiment Name: At_Far-red-induction_P Parameter: Organism Value: A. thaliana
  misc_feature: MA Experiment 20001450 PARAMETER Experiment Name: At_Far-red-induction_P Parameter: Plant Line Value: Columbia
  misc_feature: MA Experiment 20001450 PARAMETER Experiment Name: At_Far-red-induction_P Parameter: Timepoint (hr) Value: 8
  misc_feature: MA Experiment 20001450 PARAMETER Experiment Name: At_Far-red-induction_P Parameter: Tissue Value: Whole Plant
  misc_feature: MA Experiment ID: 20001554 Result: Down-regulated in Transcription
  misc_feature: MA Experiment 20001554 PARAMETER Experiment Name: At_Drought_Soil_Dry_P Parameter: Age (day) Value: 21
  misc_feature: MA Experiment 20001554 PARAMETER Experiment Name: At_Drought_Soil_Dry_P Parameter: Organism Value: A. thaliana
  misc_feature: MA Experiment 20001554 PARAMETER Experiment Name: At_Drought_Soil_Dry_P Parameter: Plant Line Value: WS
  misc_feature: MA Experiment 20001554 PARAMETER Experiment Name: At_Drought_Soil_Dry_P Parameter: Post Timepoint (hr) Value: None
  misc_feature: MA Experiment 20001554 PARAMETER Experiment Name: At_Drought_Soil_Dry_P Parameter: Post-Treatment Value: None
  misc_feature: MA Experiment 20001554 PARAMETER Experiment Name: At_Drought_Soil_Dry_P Parameter: Timepoint (day) Value: 7
  misc_feature: MA Experiment 20001554 PARAMETER Experiment Name: At_Drought_Soil_Dry_P Parameter: Treatment Value: Drought vs. No Drought
  misc_feature: MA Experiment ID: 20001555 Result: Down-regulated in Transcription
  misc_feature: MA Experiment 20001555 PARAMETER Experiment Name: At_Drought_Soil_Dry_P Parameter: Age (day) Value: 24
  misc_feature: MA Experiment 20001555 PARAMETER Experiment Name: At_Drought_Soil_Dry_P Parameter: Organism Value: A. thaliana
  misc_feature: MA Experiment 20001555 PARAMETER Experiment Name: At_Drought_Soil_Dry_P Parameter: Plant Line Value: WS
  misc_feature: MA Experiment 20001555 PARAMETER Experiment Name: At_Drought_Soil_Dry_P Parameter: Post Timepoint (hr) Value: None
  misc_feature: MA Experiment 20001555 PARAMETER Experiment Name: At_Drought_Soil_Dry_P Parameter: Post-Treatment Value: None
  misc_feature: MA Experiment 20001555 PARAMETER Experiment Name: At_Drought_Soil_Dry_P Parameter: Timepoint (day) Value: 10
  misc_feature: MA Experiment 20001555 PARAMETER Experiment Name: At_Drought_Soil_Dry_P Parameter: Treatment Value: Drought vs. No Drought
  misc_feature: MA Experiment ID: 20001556 Result: Down-regulated in Transcription
  misc_feature: MA Experiment 20001556 PARAMETER Experiment Name: At_Drought_Soil_Dry_P Parameter: Age (day) Value: 26
  misc_feature: MA Experiment 20001556 PARAMETER Experiment Name: At_Drought_Soil_Dry_P Parameter: Organism Value: A. thaliana
  misc_feature: MA Experiment 20001556 PARAMETER Experiment Name: At_Drought_Soil_Dry_P Parameter: Plant Line Value: WS
  misc_feature: MA Experiment 20001556 PARAMETER Experiment Name: At_Drought_Soil_Dry_P Parameter: Post Timepoint (hr) Value: None
  misc_feature: MA Experiment 20001556 PARAMETER Experiment Name: At_Drought_Soil_Dry_P Parameter: Post-Treatment Value: None
  misc_feature: MA Experiment 20001556 PARAMETER Experiment Name: At_Drought_Soil_Dry_P Parameter: Timepoint (day) Value: 12
  misc_feature: MA Experiment 20001556 PARAMETER Experiment Name: At_Drought_Soil_Dry_P Parameter: Treatment Value: Drought vs. No Drought
  misc_feature: MA Experiment ID: 20001558 Result: Up-regulated in Transcription
  misc_feature: MA Experiment 20001558 PARAMETER Experiment Name: At_Drought_Soil_Dry_P Parameter: Age (day) Value: 27
  misc_feature: MA Experiment 20001558 PARAMETER Experiment Name: At_Drought_Soil_Dry_P Parameter: Organism Value: A. thaliana
  misc_feature: MA Experiment 20001558 PARAMETER Experiment Name: At_Drought_Soil_Dry_P Parameter: Plant Line Value: WS
  misc_feature: MA Experiment 20001558 PARAMETER Experiment Name: At_Drought_Soil_Dry_P Parameter: Post Timepoint (hr) Value: 6
  misc_feature: MA Experiment 20001558 PARAMETER Experiment Name: At_Drought_Soil_Dry_P Parameter: Post-Treatment Value: Re-Water vs. No Drought
  misc_feature: MA Experiment 20001558 PARAMETER Experiment Name: At_Drought_Soil_Dry_P Parameter: Timepoint (day) Value: 13
  misc_feature: MA Experiment 20001558 PARAMETER Experiment Name: At_Drought_Soil_Dry_P Parameter: Treatment Value: Drought vs. No Drought
  misc_feature: MA Experiment ID: 20001560 Result: Up-regulated in Transcription
  misc_feature: MA Experiment 20001560 PARAMETER Experiment Name: At_Drought_Soil_Dry_P Parameter: Age (day) Value: 28
  misc_feature: MA Experiment 20001560 PARAMETER Experiment Name: At_Drought_Soil_Dry_P Parameter: Organism Value: A. thaliana
  misc_feature: MA Experiment 20001560 PARAMETER Experiment Name: At_Drought_Soil_Dry_P Parameter: Plant Line Value: WS
  misc_feature: MA Experiment 20001560 PARAMETER Experiment Name: At_Drought_Soil_Dry_P Parameter: Post Timepoint (hr) Value: None
  misc_feature: MA Experiment 20001560 PARAMETER Experiment Name: At_Drought_Soil_Dry_P Parameter: Post-Treatment Value: None
  misc_feature: MA Experiment 20001560 PARAMETER Experiment Name: At_Drought_Soil_Dry_P Parameter: Timepoint (day) Value: 14
  misc_feature: MA Experiment 20001560 PARAMETER Experiment Name: At_Drought_Soil_Dry_P Parameter: Treatment Value: Drought vs. No Drought
  misc_feature: MA Experiment ID: 20001770 Result: Up-regulated in Transcription
  misc_feature: MA Experiment 20001770 PARAMETER Experiment Name: At_Far-red-enriched-adult_P Parameter: Age (day) Value: 28
  misc_feature: MA Experiment 20001770 PARAMETER Experiment Name: At_Far-red-enriched-adult_P Parameter: Light Value: Far-red enriched vs. White
  misc_feature: MA Experiment 20001770 PARAMETER Experiment Name: At_Far-red-enriched-adult_P Parameter: Organism Value: A. thaliana
  misc_feature: MA Experiment 20001770 PARAMETER Experiment Name: At_Far-red-enriched-adult_P Parameter: Plant Line Value: Columbia
  misc_feature: MA Experiment 20001770 PARAMETER Experiment Name: At_Far-red-enriched-adult_P Parameter: Timepoint (hr) Value: 8
  misc_feature: MA Experiment 20001770 PARAMETER Experiment Name: At_Far-red-enriched-adult_P Parameter: Tissue Value: Aerial
  misc_feature: MA Experiment ID: 20001906 Result: Down-regulated in Transcription
  misc_feature: MA Experiment 20001906 PARAMETER Experiment Name: At_Drought_Reproduction_P Parameter: Age (day) Value: 35
  misc_feature: MA Experiment 20001906 PARAMETER Experiment Name: At_Drought_Reproduction_P Parameter: Organism Value: A. thaliana
  misc_feature: MA Experiment 20001906 PARAMETER Experiment Name: At_Drought_Reproduction_P Parameter: Plant Line Value: WS
  misc_feature: MA Experiment 20001906 PARAMETER Experiment Name: At_Drought_Reproduction_P Parameter: Timepoint (day) Value: 5
  misc_feature: MA Experiment 20001906 PARAMETER Experiment Name: At_Drought_Reproduction_P Parameter: Tissue Value: Siliques
  misc_feature: MA Experiment 20001906 PARAMETER Experiment Name: At_Drought_Reproduction_P Parameter: Treatment Value: Drought vs. No Drought
  misc_feature: MA Experiment ID: 20001907 Result: Down-regulated in Transcription
  misc_feature: MA Experiment 20001907 PARAMETER Experiment Name: At_Drought_Reproduction_P Parameter: Age (day) Value: 37
  misc_feature: MA Experiment 20001907 PARAMETER Experiment Name: At_Drought_Reproduction_P Parameter: Organism Value: A. thaliana
  misc_feature: MA Experiment 20001907 PARAMETER Experiment Name: At_Drought_Reproduction_P Parameter: Plant Line Value: WS
  misc_feature: MA Experiment 20001907 PARAMETER Experiment Name: At_Drought_Reproduction_P Parameter: Timepoint (day) Value: 7
  misc_feature: MA Experiment 20001907 PARAMETER Experiment Name: At_Drought_Reproduction_P Parameter: Tissue Value: Siliques
  misc_feature: MA Experiment 20001907 PARAMETER Experiment Name: At_Drought_Reproduction_P Parameter: Treatment Value: Drought vs. No Drought
  misc_feature: MA Experiment ID: 20001910 Result: Down-regulated in Transcription
  misc_feature: MA Experiment 20001910 PARAMETER Experiment Name: At_Drought_Reproduction_P Parameter: Age (day) Value: 37
  misc_feature: MA Experiment 20001910 PARAMETER Experiment Name: At_Drought_Reproduction_P Parameter: Organism Value: A. thaliana
  misc_feature: MA Experiment 20001910 PARAMETER Experiment Name: At_Drought_Reproduction_P Parameter: Plant Line Value: WS
  misc_feature: MA Experiment 20001910 PARAMETER Experiment Name: At_Drought_Reproduction_P Parameter: Timepoint (day) Value: 7
  misc_feature: MA Experiment 20001910 PARAMETER Experiment Name: At_Drought_Reproduction_P Parameter: Tissue Value: Flowers
  misc_feature: MA Experiment 20001910 PARAMETER Experiment Name: At_Drought_Reproduction_P Parameter: Treatment Value: Drought vs. No Drought

SEQ ID NO: 31472 - protein, 305 aa, Arabidopsis thaliana; identical to SEQ ID NO: 27882
  peptide (1)..(305): Ceres Seq. ID no. 12422859
  misc_feature (38)..(224): Pfam Name: Glycosyl hydrolases family 16 Pfam Description: Glycosyl hydrolases family 16
  misc_feature (13)..(299): Homolog of NCBI NO: 1885310 NR Description: Endoxyloglucan transferase (EXT) [Hordeum vulgare
  misc_feature (7)..(300): Homolog of NCBI NO: 21553421 NR Description: endo-xyloglucan transferase-like protein
  misc_feature (7)..(300): Homolog of NCBI NO: 15235714 NR Description: xyloglucan endotransglycosylase, putative
  misc_feature (21)..(299): Homolog of NCBI NO: 5070246 NR Description: xyloglucan endo-transglycosylase-like protein
  misc_feature (17)..(299): Homolog of NCBI NO: 30841326 NR Description: xyloglucan endotransglycosylase [Gossypium
  misc_feature (27)..(299): Homolog of NCBI NO: 7447418 NR Description: probable endo-xyloglucan transferase - upland
  misc_feature (14)..(299): Homolog of NCBI NO: 27261026 NR Description: putative xyloglucan endotransglycosylase
  misc_feature (1)..(305): Homolog of NCBI NO: 25313538 NR Description: protein T23J18.21 [imported] - Arabidopsis
  misc_feature (14)..(305): Homolog of NCBI NO: 38605338 NR Description: Probable xyloglucan
  misc_feature (1)..(305): Homolog of NCBI NO: 18391291 NR Description: xyloglucan endotransglycosylase, putative

SEQ ID NO: 31473 - protein, 292 aa, Arabidopsis thaliana; identical to SEQ ID NO: 27883
  peptide (1)..(292): Ceres Seq. ID no. 12422860
  misc_feature (25)..(211): Pfam Name: Glycosyl hydrolases family 16 Pfam Description: Glycosyl hydrolases family 16
  misc_feature (1)..(286): Homolog of NCBI NO: 1885310 NR Description: Endoxyloglucan transferase (EXT) [Hordeum vulgare
  misc_feature (1)..(287): Homolog of NCBI NO: 21553421 NR Description: endo-xyloglucan transferase-like protein
  misc_feature (1)..(287): Homolog of NCBI NO: 15235714 NR Description: xyloglucan endotransglycosylase, putative
  misc_feature (8)..(286): Homolog of NCBI NO: 5070246 NR Description: xyloglucan endo-transglycosylase-like protein
  misc_feature (4)..(286): Homolog of NCBI NO: 30841326 NR Description: xyloglucan endotransglycosylase [Gossypium
  misc_feature (14)..(286): Homolog of NCBI NO: 7447418 NR Description: probable endo-xyloglucan transferase - upland
  misc_feature (1)..(286): Homolog of NCBI NO: 27261026 NR Description: putative xyloglucan endotransglycosylase
  misc_feature (1)..(292): Homolog of NCBI NO: 25313538 NR Description: protein T23J18.21 [imported] - Arabidopsis
  misc_feature (1)..(292): Homolog of NCBI NO: 38605338 NR Description: Probable xyloglucan
  misc_feature (1)..(292): Homolog of NCBI NO: 18391291 NR Description: xyloglucan endotransglycosylase, putative

SEQ ID NO: 31474 - protein, 285 aa, Arabidopsis thaliana; identical to SEQ ID NO: 27884
  peptide (1)..(285): Ceres Seq. ID no. 12422861
  misc_feature (18)..(204): Pfam Name: Glycosyl hydrolases family 16 Pfam Description: Glycosyl hydrolases family 16
  misc_feature (1)..(279): Homolog of NCBI NO: 1885310 NR Description: Endoxyloglucan transferase (EXT) [Hordeum vulgare
  misc_feature (1)..(280): Homolog of NCBI NO: 21553421 NR Description: endo-xyloglucan transferase-like protein
  misc_feature (1)..(280): Homolog of NCBI NO: 15235714 NR Description: xyloglucan endotransglycosylase, putative
  misc_feature (1)..(279): Homolog of NCBI NO: 5070246 NR Description: xyloglucan endo-transglycosylase-like protein
  misc_feature (1)..(279): Homolog of NCBI NO: 30841326 NR Description: xyloglucan endotransglycosylase [Gossypium
  misc_feature (7)..(279): Homolog of NCBI NO: 7447418 NR Description: probable endo-xyloglucan transferase - upland
  misc_feature (1)..(279): Homolog of NCBI NO: 27261026 NR Description: putative xyloglucan endotransglycosylase
  misc_feature (1)..(285): Homolog of NCBI NO: 25313538 NR Description: protein T23J18.21 [imported] - Arabidopsis
  misc_feature (1)..(285): Homolog of NCBI NO: 38605338 NR Description: Probable xyloglucan
  misc_feature (1)..(285): Homolog of NCBI NO: 18391291 NR Description: xyloglucan endotransglycosylase, putative

SEQ ID NO: 31475 - DNA, 673 bp, Arabidopsis thaliana; identical to SEQ ID NO: 27885
  misc_feature (1)..(673): Ceres Seq. ID no. 12331700
  misc_feature: MA Experiment ID: 108434 Result: Down-regulated in Transcription
  misc_feature: MA Experiment 108434 PARAMETER Experiment Name: At_Root_Tips_cDNA_P Parameter: Tissue Value: Root Tips
  misc_feature: MA Experiment ID: 108561 Result: Up-regulated in Transcription
  misc_feature: MA Experiment 108561 PARAMETER Experiment Name: At_100uM_ABA_cDNA_P Parameter: Timepoint (hr) Value: 6
  misc_feature: MA Experiment 108561 PARAMETER Experiment Name: At_100uM_ABA_cDNA_P Parameter: Tissue Value: Aerial
  misc_feature: MA Experiment 108561 PARAMETER Experiment Name: At_100uM_ABA_cDNA_P Parameter: Treatment Value: 100uM ABA vs. No Treatment
  misc_feature: MA Experiment ID: 108576 Result: Up-regulated in Transcription
  misc_feature: MA Experiment 108576 PARAMETER Experiment Name: At_42deg_Heat_cDNA_P Parameter: Temperature (deg C) Value: 42 vs. 22
  misc_feature: MA Experiment 108576 PARAMETER Experiment Name: At_42deg_Heat_cDNA_P Parameter: Timepoint (hr) Value: 1
  misc_feature: MA Experiment 108576 PARAMETER Experiment Name: At_42deg_Heat_cDNA_P Parameter: Tissue Value: Aerial
  misc_feature: MA Experiment ID: 108577 Result: Up-regulated in Transcription
  misc_feature: MA Experiment 108577 PARAMETER Experiment Name: At_42deg_Heat_cDNA_P Parameter: Temperature (deg C) Value: 42 vs. 22
  misc_feature: MA Experiment 108577 PARAMETER Experiment Name: At_42deg_Heat_cDNA_P Parameter: Timepoint (hr) Value: 6
  misc_feature: MA Experiment 108577 PARAMETER Experiment Name: At_42deg_Heat_cDNA_P Parameter: Tissue Value: Aerial
  misc_feature: MA Experiment ID: 108579 Result: Down-regulated in Transcription
  misc_feature: MA Experiment 108579 PARAMETER Experiment Name: At_4deg_Cold_cDNA_P Parameter: Temperature (deg C) Value: 4 vs. 22
  misc_feature: MA Experiment 108579 PARAMETER Experiment Name: At_4deg_Cold_cDNA_P Parameter: Timepoint (hr) Value: 6
  misc_feature: MA Experiment 108579 PARAMETER Experiment Name: At_4deg_Cold_cDNA_P Parameter: Tissue Value: Aerial
  misc_feature: MA Experiment ID: 108595 Result: Up-regulated in Transcription
  misc_feature: MA Experiment 108595 PARAMETER Experiment Name: At_Ler-pi_Ovule_cDNA_P Parameter: Plant Line Value: null
  misc_feature: MA Experiment ID: 20000069 Result: Up-regulated in Transcription
  misc_feature: MA Experiment 20000069 PARAMETER Experiment Name: At_100uM_ABA_Mutants_cDNA_P Parameter: Plant Line Value: CS23
  misc_feature: MA Experiment 20000069 PARAMETER Experiment Name: At_100uM_ABA_Mutants_cDNA_P Parameter: Timepoint (hr) Value: 6
  misc_feature: MA Experiment 20000069 PARAMETER Experiment Name: At_100uM_ABA_Mutants_cDNA_P Parameter: Tissue Value: Aerial
  misc_feature: MA Experiment 20000069 PARAMETER Experiment Name: At_100uM_ABA_Mutants_cDNA_P Parameter: Treatment Value: 100uM ABA vs. No Treatment
  misc_feature: MA Experiment ID: 20000070 Result: Up-regulated in Transcription
  misc_feature: MA Experiment 20000070 PARAMETER Experiment Name: At_100uM_ABA_Mutants_cDNA_P Parameter: Plant Line Value: CS24
  misc_feature: MA Experiment 20000070 PARAMETER Experiment Name: At_100uM_ABA_Mutants_cDNA_P Parameter: Timepoint (hr) Value: 6
  misc_feature: MA Experiment 20000070 PARAMETER Experiment Name: At_100uM_ABA_Mutants_cDNA_P Parameter: Tissue Value: Aerial
  misc_feature: MA Experiment 20000070 PARAMETER Experiment Name: At_100uM_ABA_Mutants_cDNA_P Parameter: Treatment Value: 100uM ABA vs. No Treatment
  misc_feature: MA Experiment ID: 20000071 Result: Up-regulated in Transcription
  misc_feature: MA Experiment 20000071 PARAMETER Experiment Name: At_100uM_ABA_Mutants_cDNA_P Parameter: Plant Line Value: CS8104
  misc_feature: MA Experiment 20000071 PARAMETER Experiment Name: At_100uM_ABA_Mutants_cDNA_P Parameter: Timepoint (hr) Value: 6
  misc_feature: MA Experiment 20000071 PARAMETER Experiment Name: At_100uM_ABA_Mutants_cDNA_P Parameter: Tissue Value: Aerial
  misc_feature: MA Experiment 20000071 PARAMETER Experiment Name: At_100uM_ABA_Mutants_cDNA_P Parameter: Treatment Value: 100uM ABA vs. No Treatment
  misc_feature: MA Experiment ID: 20000072 Result: Up-regulated in Transcription
  misc_feature: MA Experiment 20000072 PARAMETER Experiment Name: At_100uM_ABA_Mutants_cDNA_P Parameter: Plant Line Value: CS8105
  misc_feature: MA Experiment 20000072 PARAMETER Experiment Name: At_100uM_ABA_Mutants_cDNA_P Parameter: Timepoint (hr) Value: 6
  misc_feature: MA Experiment 20000072 PARAMETER Experiment Name: At_100uM_ABA_Mutants_cDNA_P Parameter: Tissue Value: Aerial
  misc_feature: MA Experiment 20000072 PARAMETER Experiment Name: At_100uM_ABA_Mutants_cDNA_P Parameter: Treatment Value: 100uM ABA vs. No Treatment
  misc_feature: MA Experiment ID: 20000086 Result: Up-regulated in Transcription
  misc_feature: MA Experiment 20000086 PARAMETER Experiment Name: At_100uM_ABA_Mutants_cDNA_P Parameter: Plant Line Value: CS22
  misc_feature: MA Experiment 20000086 PARAMETER Experiment Name: At_100uM_ABA_Mutants_cDNA_P Parameter: Timepoint (hr) Value: 6
  misc_feature: MA Experiment 20000086 PARAMETER Experiment Name: At_100uM_ABA_Mutants_cDNA_P Parameter: Tissue Value: Aerial
  misc_feature: MA Experiment 20000086 PARAMETER Experiment Name: At_100uM_ABA_Mutants_cDNA_P Parameter: Treatment Value: 100uM ABA vs. No Treatment
  misc_feature: MA Experiment ID: 20000087 Result: Up-regulated in Transcription
  misc_feature: MA Experiment 20000087 PARAMETER Experiment Name: At_100uM_ABA_Mutants_cDNA_P Parameter: Plant Line Value: WS
  misc_feature: MA Experiment 20000087 PARAMETER Experiment Name: At_100uM_ABA_Mutants_cDNA_P Parameter: Timepoint (hr) Value: 6
  misc_feature: MA Experiment 20000087 PARAMETER Experiment Name: At_100uM_ABA_Mutants_cDNA_P Parameter: Tissue Value: Aerial
  misc_feature: MA Experiment 20000087 PARAMETER Experiment Name: At_100uM_ABA_Mutants_cDNA_P Parameter: Treatment Value: 100uM ABA vs. No Treatment
  misc_feature: MA Experiment ID: 20000088 Result: Up-regulated in Transcription
  misc_feature: MA Experiment 20000088 PARAMETER Experiment Name: At_100uM_ABA_Mutants_cDNA_P Parameter: Plant Line Value: Landsberg
  misc_feature: MA Experiment 20000088 PARAMETER Experiment Name: At_100uM_ABA_Mutants_cDNA_P Parameter: Timepoint (hr) Value: 6
  misc_feature: MA Experiment 20000088 PARAMETER Experiment Name: At_100uM_ABA_Mutants_cDNA_P Parameter: Tissue Value: Aerial
  misc_feature: MA Experiment 20000088 PARAMETER Experiment Name: At_100uM_ABA_Mutants_cDNA_P Parameter: Treatment Value: 100uM ABA vs. No Treatment
  misc_feature: MA Experiment ID: 20000093 Result: Up-regulated in Transcription
  misc_feature: MA Experiment 20000093 PARAMETER Experiment Name: At_42deg_Heat_cDNA_P Parameter: Temperature (deg C) Value: 42 vs. 22
  misc_feature: MA Experiment 20000093 PARAMETER Experiment Name: At_42deg_Heat_cDNA_P Parameter: Timepoint (hr) Value: 0.5
  misc_feature: MA Experiment 20000093 PARAMETER Experiment Name: At_42deg_Heat_cDNA_P Parameter: Tissue Value: Aerial
  misc_feature: MA Experiment ID: 20000111 Result: Up-regulated in Transcription
  misc_feature: MA Experiment 20000111 PARAMETER Experiment Name: At_42deg_Heat_cDNA_P Parameter: Temperature (deg C) Value: 42 vs. 22
  misc_feature: MA Experiment 20000111 PARAMETER Experiment Name: At_42deg_Heat_cDNA_P Parameter: Timepoint (hr) Value: 6
  misc_feature: MA Experiment 20000111 PARAMETER Experiment Name: At_42deg_Heat_cDNA_P Parameter: Tissue Value: Aerial
  misc_feature: MA Experiment ID: 20000112 Result: Up-regulated in Transcription
  misc_feature: MA Experiment 20000112 PARAMETER Experiment Name: At_42deg_Heat_cDNA_P Parameter: Temperature (deg C) Value: 42 vs. 22
  misc_feature: MA Experiment 20000112 PARAMETER Experiment Name: At_42deg_Heat_cDNA_P Parameter: Timepoint (hr) Value: 2
  misc_feature: MA Experiment 20000112 PARAMETER Experiment Name: At_42deg_Heat_cDNA_P Parameter: Tissue Value: Aerial
  misc_feature: MA Experiment ID: 20000113 Result: Up-regulated in Transcription
  misc_feature: MA Experiment 20000113 PARAMETER Experiment Name: At_42deg_Heat_cDNA_P Parameter: Temperature (deg C) Value: 42 vs. 22
  misc_feature: MA Experiment 20000113 PARAMETER Experiment Name: At_42deg_Heat_cDNA_P Parameter: Timepoint (hr) Value: 8
  misc_feature: MA Experiment 20000113 PARAMETER Experiment Name: At_42deg_Heat_cDNA_P Parameter: Tissue Value: Aerial
  misc_feature: MA Experiment ID: 20000117 Result: Up-regulated in Transcription
  misc_feature: MA Experiment 20000117 PARAMETER Experiment Name: At_100uM_ABA_Mutants_cDNA_P Parameter: Plant Line Value: Columbia
  misc_feature: MA Experiment 20000117 PARAMETER Experiment Name: At_100uM_ABA_Mutants_cDNA_P Parameter: Timepoint (hr) Value: 6
  misc_feature: MA Experiment 20000117 PARAMETER Experiment Name: At_100uM_ABA_Mutants_cDNA_P Parameter: Tissue Value: Aerial
  misc_feature: MA Experiment 20000117 PARAMETER Experiment Name: At_100uM_ABA_Mutants_cDNA_P Parameter: Treatment Value: 100uM ABA vs. No Treatment
  misc_feature: MA Experiment ID: 20000144 Result: Up-regulated in Transcription
  misc_feature: MA Experiment 20000144 PARAMETER Experiment Name: At_42deg_Heat_cDNA_P Parameter: Temperature (deg C) Value: 42 vs. 22
  misc_feature: MA Experiment 20000144 PARAMETER Experiment Name: At_42deg_Heat_cDNA_P Parameter: Timepoint (hr) Value: 1
  misc_feature: MA Experiment 20000144 PARAMETER Experiment Name: At_42deg_Heat_cDNA_P Parameter: Tissue Value: Aerial

SEQ ID NO: 31476 - protein, 159 aa, Arabidopsis thaliana; identical to SEQ ID NO: 27886
  peptide (1)..(159): Ceres Seq. ID no. 12331701
  misc_feature (3)..(157): Pfam Name: Universal stress protein family Pfam Description: Universal stress protein family
  misc_feature (2)..(157): Homolog of NCBI NO: 25402657 NR Description: protein T23J18.3 [imported] - Arabidopsis
  misc_feature (1)..(159): Homolog of NCBI NO: 15528707 NR Description: P0583G08.8 [Oryza sativa (japonica
  misc_feature (5)..(159): Homolog of NCBI NO: 18401345 NR Description: expressed protein
  misc_feature (1)..(157): Homolog of NCBI NO: 11602749 NR Description: early nodulin ENOD18 [Vicia faba]
  misc_feature (5)..(157): Homolog of NCBI NO: 11602751 NR Description: ENOD18 protein [Vicia faba]
  misc_feature (1)..(157): Homolog of NCBI NO: 11602747 NR Description: early nodulin ENOD18 [Vicia faba]
  misc_feature (1)..(159): Homolog of NCBI NO: 30693971 NR Description: expressed protein [Arabidopsis thaliana]
  misc_feature (2)..(158): Homolog of NCBI NO: 20160561 NR Description: P0414E03.3 [Oryza sativa (japonica
  misc_feature (1)..(135): Homolog of NCBI NO: 18396497 NR Description: expressed protein
  misc_feature (1)..(159): Homolog of NCBI NO: 30678807 NR Description: expressed protein [Arabidopsis thaliana]

SEQ ID NO: 31477 - protein, 149 aa, Arabidopsis thaliana; identical to SEQ ID NO: 27887
  peptide (1)..(149): Ceres Seq. ID no. 12331702
  misc_feature (1)..(147): Pfam Name: Universal stress protein family Pfam Description: Universal stress protein family
  misc_feature (1)..(147): Homolog of NCBI NO: 25402657 NR Description: protein T23J18.3 [imported] - Arabidopsis
  misc_feature (1)..(149): Homolog of NCBI NO: 15528707 NR Description: P0583G08.8 [Oryza sativa (japonica
  misc_feature (1)..(149): Homolog of NCBI NO: 18401345 NR Description: expressed protein
  misc_feature (1)..(147): Homolog of NCBI NO: 11602749 NR Description: early nodulin ENOD18 [Vicia faba]
  misc_feature (1)..(147): Homolog of NCBI NO: 11602751 NR Description: ENOD18 protein [Vicia faba]
  misc_feature (1)..(147): Homolog of NCBI NO: 11602747 NR Description: early nodulin ENOD18 [Vicia faba]
  misc_feature (1)..(149): Homolog of NCBI NO: 30693971 NR Description: expressed protein [Arabidopsis thaliana]
  misc_feature (1)..(148): Homolog of NCBI NO: 20160561 NR Description: P0414E03.3 [Oryza sativa (japonica
  misc_feature (1)..(125): Homolog of NCBI NO: 18396497 NR Description: expressed protein
  misc_feature (1)..(149): Homolog of NCBI NO: 30678807 NR Description: expressed protein [Arabidopsis thaliana]

SEQ ID NO: 31478 - DNA, 847 bp, Arabidopsis thaliana; identical to SEQ ID NO: 27888
  misc_feature (1)..(847): Ceres Seq. ID no. 12331364
  misc_feature: MA Experiment ID: 108577 Result: Up-regulated in Transcription
  misc_feature: MA Experiment 108577 PARAMETER Experiment Name: At_42deg_Heat_cDNA_P Parameter: Temperature (deg C) Value: 42 vs. 22
  misc_feature: MA Experiment 108577 PARAMETER Experiment Name: At_42deg_Heat_cDNA_P Parameter: Timepoint (hr) Value: 6
  misc_feature: MA Experiment 108577 PARAMETER Experiment Name: At_42deg_Heat_cDNA_P Parameter: Tissue Value: Aerial
  misc_feature: MA Experiment ID: 108595 Result: Up-regulated in Transcription
  misc_feature: MA Experiment 108595 PARAMETER Experiment Name: At_Ler-pi_Ovule_cDNA_P Parameter: Plant Line Value: null
  misc_feature: MA Experiment ID: 20000437 Result: Up-regulated in Transcription
  misc_feature: MA Experiment 20000437 PARAMETER Experiment Name: At_Drought_P Parameter: Age (day) Value: 8
  misc_feature: MA Experiment 20000437 PARAMETER Experiment Name: At_Drought_P Parameter: Organism Value: A. thaliana
  misc_feature: MA Experiment 20000437 PARAMETER Experiment Name: At_Drought_P Parameter: Plant Line Value: WS
  misc_feature: MA Experiment 20000437 PARAMETER Experiment Name: At_Drought_P Parameter: Timepoint (hr) Value: 24
  misc_feature: MA Experiment 20000437 PARAMETER Experiment Name: At_Drought_P Parameter: Tissue Value: Whole Plant
  misc_feature: MA Experiment 20000437 PARAMETER Experiment Name: At_Drought_P Parameter: Treatment Value: Drought vs. No Drought

SEQ ID NO: 31479 - protein, 141 aa, Arabidopsis thaliana; identical to SEQ ID NO: 27889
  peptide (1)..(141): Ceres Seq. ID no. 12331365
  misc_feature (1)..(140): Homolog of NCBI NO: 34908028 NR Description: putative CAAT-box DNA binding protein
  misc_feature (1)..(140): Homolog of NCBI NO: 30409459 NR Description: NF-YB [Oryza sativa (japonica cultivar-group)]
  misc_feature (1)..(136): Homolog of NCBI NO: 17979253 NR Description: At2g37060/T2N18.18 [Arabidopsis thaliana]
  misc_feature (1)..(128): Homolog of NCBI NO: 15231796 NR Description: transcription factor NF-Y, CCAAT-binding - like
  misc_feature (10)..(135): Homolog of NCBI NO: 30409461 NR Description: NF-YB [Oryza sativa (japonica cultivar-group)]
  misc_feature (1)..(133): Homolog of NCBI NO: 115840 NR Description: CCAAT-BINDING TRANSCRIPTION FACTOR SUBUNIT A (NF-Y PROTEIN CHAIN B) (NF-YB) (CAAT-BOX DNA BINDING PROTEIN
  misc_feature (1)..(133): Homolog of NCBI NO: 22380 NR Description: CAAT-box DNA binding protein subunit B (NF-YB)
  misc_feature (1)..(111): Homolog of NCBI NO: 30687688 NR Description: CCAAT-binding transcription factor subunit
  misc_feature (1)..(139): Homolog of NCBI NO: 25299604 NR Description: hypothetical protein At2g38880 [imported] -
  misc_feature (1)..(141): Homolog of NCBI NO: 18404885 NR Description: putative CCAAT-binding transcription factor

SEQ ID NO: 31480 - protein, 107 aa, Arabidopsis thaliana; identical to SEQ ID NO: 27890
  peptide (1)..(107): Ceres Seq. ID no. 12331366
  misc_feature (1)..(106): Homolog of NCBI NO: 34908028 NR Description: putative CAAT-box DNA binding protein
  misc_feature (1)..(106): Homolog of NCBI NO: 30409459 NR Description: NF-YB [Oryza sativa (japonica cultivar-group)]
  misc_feature (1)..(102): Homolog of NCBI NO: 17979253 NR Description: At2g37060/T2N18.18 [Arabidopsis thaliana]
  misc_feature (1)..(94): Homolog of NCBI NO: 15231796 NR Description: transcription factor NF-Y, CCAAT-binding - like
  misc_feature (1)..(101): Homolog of NCBI NO: 30409461 NR Description: NF-YB [Oryza sativa (japonica cultivar-group)]
  misc_feature (1)..(99): Homolog of NCBI NO: 115840 NR Description: CCAAT-BINDING TRANSCRIPTION FACTOR SUBUNIT A (NF-Y PROTEIN CHAIN B) (NF-YB) (CAAT-BOX DNA BINDING PROTEIN
  misc_feature (1)..(99): Homolog of NCBI NO: 22380 NR Description: CAAT-box DNA binding protein subunit B (NF-YB)
  misc_feature (1)..(77): Homolog of NCBI NO: 30687688 NR Description: CCAAT-binding transcription factor subunit
  misc_feature (1)..(105): Homolog of NCBI NO: 25299604 NR Description: hypothetical protein At2g38880 [imported] -
  misc_feature (1)..(107): Homolog of NCBI NO: 18404885 NR Description: putative CCAAT-binding transcription factor

SEQ ID NO: 31481 - DNA, 1149 bp, Arabidopsis thaliana; identical to SEQ ID NO: 27891
  misc_feature (1)..(1149): Ceres Seq. ID no. 13487530
  misc_feature: MA Experiment ID: 20000180 Result: Up-regulated in Transcription
  misc_feature: MA Experiment 20000180 PARAMETER Experiment Name: At_Germinating_Seeds_P Parameter: Age (hr) Value: 24 vs. 0
  misc_feature: MA Experiment 20000180 PARAMETER Experiment Name: At_Germinating_Seeds_P Parameter: Tissue Value: Germinating Seeds
  misc_feature: MA Experiment ID: 20000184 Result: Up-regulated in Transcription
  misc_feature: MA Experiment 20000184 PARAMETER Experiment Name: At_Shoots__P Parameter: Age (day) Value: 7
  misc_feature: MA Experiment 20000184 PARAMETER Experiment Name: At_Shoots__P Parameter: Tissue Value: Shoots vs. Whole Plant
  misc_feature: MA Experiment ID: 20000185 Result: Down-regulated in Transcription
  misc_feature: MA Experiment 20000185 PARAMETER Experiment Name: At_Roots__P Parameter: Age (day) Value: 7 vs. 21
  misc_feature: MA Experiment 20000185 PARAMETER Experiment Name: At_Roots__P Parameter: Organism Value: A. thaliana
  misc_feature: MA Experiment 20000185 PARAMETER Experiment Name: At_Roots__P Parameter: Tissue Value: Roots vs. Whole Plant
  misc_feature: MA Experiment ID: 20000438 Result: Up-regulated in Transcription
  misc_feature: MA Experiment 20000438 PARAMETER Experiment Name: At_Shoots__P Parameter: Age (day) Value: 14
  misc_feature: MA Experiment 20000438 PARAMETER Experiment Name: At_Shoots__P Parameter: Tissue Value: Shoots vs. Whole Plant
  misc_feature: MA Experiment ID: 20000439 Result: Down-regulated in Transcription
  misc_feature: MA Experiment 20000439 PARAMETER Experiment Name: At_Roots__P Parameter: Age (day) Value: 14 vs. 21
  misc_feature: MA Experiment 20000439 PARAMETER Experiment Name: At_Roots__P Parameter: Organism Value: A. thaliana
  misc_feature: MA Experiment 20000439 PARAMETER Experiment Name: At_Roots__P Parameter: Tissue Value: Roots vs. Whole Plant
  misc_feature: MA Experiment ID: 20000573 Result: Down-regulated in Transcription
  misc_feature: MA Experiment 20000573 PARAMETER Experiment Name: At_100uM_ABA_Mutants__P Parameter: Organism Value: A. thaliana
  misc_feature: MA Experiment 20000573 PARAMETER Experiment Name: At_100uM_ABA_Mutants__P Parameter: Plant Line Value: CS22 vs. Ler wt
  misc_feature: MA Experiment 20000573 PARAMETER Experiment Name: At_100uM_ABA_Mutants__P Parameter: Timepoint (hr) Value: N/A
  misc_feature: MA Experiment 20000573 PARAMETER Experiment Name: At_100uM_ABA_Mutants__P Parameter: Tissue Value: Whole Plant
  misc_feature: MA Experiment 20000573 PARAMETER Experiment Name: At_100uM_ABA_Mutants__P Parameter: Treatment Value: None
  misc_feature: MA Experiment ID: 20001248 Result: Down-regulated in Transcription
  misc_feature: MA Experiment 20001248 PARAMETER Experiment Name: At_Far-red-induction_P Parameter: Age (day) Value: 7
  misc_feature: MA Experiment 20001248 PARAMETER Experiment Name: At_Far-red-induction_P Parameter: Light Value: Far-red vs. White
  misc_feature: MA Experiment 20001248 PARAMETER Experiment Name: At_Far-red-induction_P Parameter: Organism Value: A. thaliana
  misc_feature: MA Experiment 20001248 PARAMETER Experiment Name: At_Far-red-induction_P Parameter: Plant Line Value: Columbia
  misc_feature: MA Experiment 20001248 PARAMETER Experiment Name: At_Far-red-induction_P Parameter: Timepoint (hr) Value: 4
  misc_feature: MA Experiment 20001248 PARAMETER Experiment Name: At_Far-red-induction_P Parameter: Tissue Value: Whole Plant
  misc_feature: MA Experiment ID: 20001558 Result: Up-regulated in Transcription
  misc_feature: MA Experiment 20001558 PARAMETER Experiment Name: At_Drought_Soil_Dry_P Parameter: Age (day) Value: 27
  misc_feature: MA Experiment 20001558 PARAMETER Experiment Name: At_Drought_Soil_Dry_P Parameter: Organism Value: A. thaliana
  misc_feature: MA Experiment 20001558 PARAMETER Experiment Name: At_Drought_Soil_Dry_P Parameter: Plant Line Value: WS
  misc_feature: MA Experiment 20001558 PARAMETER Experiment Name: At_Drought_Soil_Dry_P Parameter: Post Timepoint (hr) Value: 6
  misc_feature: MA Experiment 20001558 PARAMETER Experiment Name: At_Drought_Soil_Dry_P Parameter: Post-Treatment Value: Re-Water vs. No Drought
  misc_feature: MA Experiment 20001558 PARAMETER Experiment Name: At_Drought_Soil_Dry_P Parameter: Timepoint (day) Value: 13
  misc_feature: MA Experiment 20001558 PARAMETER Experiment Name: At_Drought_Soil_Dry_P Parameter: Treatment Value: Drought vs. No Drought
  misc_feature: MA Experiment ID: 20001910 Result: Down-regulated in Transcription
  misc_feature: MA Experiment 20001910 PARAMETER Experiment Name: At_Drought_Reproduction_P Parameter: Age (day) Value: 37
  misc_feature: MA Experiment 20001910 PARAMETER Experiment Name: At_Drought_Reproduction_P Parameter: Organism Value: A. thaliana
  misc_feature: MA Experiment 20001910 PARAMETER Experiment Name: At_Drought_Reproduction_P Parameter: Plant Line Value: WS
  misc_feature: MA Experiment 20001910 PARAMETER Experiment Name: At_Drought_Reproduction_P Parameter: Timepoint (day) Value: 7
  misc_feature: MA Experiment 20001910 PARAMETER Experiment Name: At_Drought_Reproduction_P Parameter: Tissue Value: Flowers
  misc_feature: MA Experiment 20001910 PARAMETER Experiment Name: At_Drought_Reproduction_P Parameter: Treatment Value: Drought vs. No Drought

SEQ ID NO: 31482 - protein, 307 aa, Arabidopsis thaliana; identical to SEQ ID NO: 27892
  peptide (1)..(307): Ceres Seq. ID no. 13487531
  misc_feature (51)..(235): Pfam Name: Glycosyl hydrolases family 16 Pfam Description: Glycosyl hydrolases family 16
  misc_feature (50)..(305): Homolog of NCBI NO: 38605153 NR Description: Probable xyloglucan
  misc_feature (114)..(305): Homolog of NCBI NO: 1084391 NR Description: xyloglucan endo-1,4-beta-D-glucanase (EC 3.2.1.-)
  misc_feature (10)..(305): Homolog of NCBI NO: 37536586 NR Description: putative cellulase [Oryza sativa (japonica
  misc_feature (36)..(305): Homolog of NCBI NO: 34901732 NR Description: putative xyloglucan endo-transglycosylase
  misc_feature (14)..(305): Homolog of NCBI NO: 15230574 NR Description: xyloglucan endotransglycosylase, putative
  misc_feature (14)..(305): Homolog of NCBI NO: 1769907 NR Description: xyloglucan endo-transglycosylase [Arabidopsis
  misc_feature (13)..(305): Homolog of NCBI NO: 14029149 NR Description: xyloglucan endo-transglycosylase [Carica papaya]
  misc_feature (22)..(305): Homolog of NCBI NO: 17402583 NR Description: Xyloglucan endo-transglycosylase [Vitis labrusca
  misc_feature (15)..(305): Homolog of NCBI NO: 1362078 NR Description: xyloglucan endo-1,4-beta-D-glucanase (EC 3.2.1.-)
  misc_feature (9)..(307): Homolog of NCBI NO: 15228047 NR Description: xyloglucan endotransglycosylase, putative

SEQ ID NO: 31483 - protein, 299 aa, Arabidopsis thaliana; identical to SEQ ID NO: 27893
  peptide (1)..(299): Ceres Seq. ID no. 13487532
  misc_feature (43)..(227): Pfam Name: Glycosyl hydrolases family 16 Pfam Description: Glycosyl hydrolases family 16
  misc_feature (42)..(297): Homolog of NCBI NO: 38605153 NR Description: Probable xyloglucan
  misc_feature (106)..(297): Homolog of NCBI NO: 1084391 NR Description: xyloglucan endo-1,4-beta-D-glucanase (EC 3.2.1.-)
  misc_feature (2)..(297): Homolog of NCBI NO: 37536586 NR Description: putative cellulase [Oryza sativa (japonica
  misc_feature (28)..(297): Homolog of NCBI NO: 34901732 NR Description: putative xyloglucan endo-transglycosylase
  misc_feature (6)..(297): Homolog of NCBI NO: 15230574 NR Description: xyloglucan endotransglycosylase, putative
  misc_feature (6)..(297): Homolog of NCBI NO: 1769907 NR Description: xyloglucan endo-transglycosylase [Arabidopsis
  misc_feature (5)..(297): Homolog of NCBI NO: 14029149 NR Description: xyloglucan endo-transglycosylase [Carica papaya]
  misc_feature (14)..(297): Homolog of NCBI NO: 17402583 NR Description: Xyloglucan endo-transglycosylase [Vitis labrusca
  misc_feature (7)..(297): Homolog of NCBI NO: 1362078 NR Description: xyloglucan endo-1,4-beta-D-glucanase (EC 3.2.1.-)
  misc_feature (1)..(299): Homolog of NCBI NO: 15228047 NR Description: xyloglucan endotransglycosylase, putative

SEQ ID NO: 31484 - protein, 242 aa, Arabidopsis thaliana; identical to SEQ ID NO: 27894
  peptide (1)..(242): Ceres Seq. ID no. 13487533
  misc_feature (1)..(170): Pfam Name: Glycosyl hydrolases family 16 Pfam Description: Glycosyl hydrolases family 16
  misc_feature (1)..(240): Homolog of NCBI NO: 38605153 NR Description: Probable xyloglucan
  misc_feature (49)..(240): Homolog of NCBI NO: 1084391 NR Description: xyloglucan endo-1,4-beta-D-glucanase (EC 3.2.1.-)
  misc_feature (1)..(240): Homolog of NCBI NO: 37536586 NR Description: putative cellulase [Oryza sativa (japonica
  misc_feature (1)..(240): Homolog of NCBI NO: 34901732 NR Description: putative xyloglucan endo-transglycosylase
  misc_feature (1)..(240): Homolog of NCBI NO: 15230574 NR Description: xyloglucan endotransglycosylase, putative
  misc_feature (1)..(240): Homolog of NCBI NO: 1769907 NR Description: xyloglucan endo-transglycosylase [Arabidopsis
  misc_feature (1)..(240): Homolog of NCBI NO: 14029149 NR Description: xyloglucan endo-transglycosylase [Carica papaya]
  misc_feature (1)..(240): Homolog of NCBI NO: 17402583 NR Description: Xyloglucan endo-transglycosylase [Vitis labrusca
  misc_feature (1)..(240): Homolog of NCBI NO: 1362078 NR Description: xyloglucan endo-1,4-beta-D-glucanase (EC 3.2.1.-)
  misc_feature (1)..(242): Homolog of NCBI NO: 15228047 NR Description: xyloglucan endotransglycosylase, putative

SEQ ID NO: 31485 - DNA, 2320 bp, Arabidopsis thaliana; identical to SEQ ID NO: 27895
  misc_feature (1)..(2320): Ceres Seq. ID no. 13509885
  misc_feature: MA Experiment ID: 20000180 Result: Up-regulated in Transcription
  misc_feature: MA Experiment 20000180 PARAMETER Experiment Name: At_Germinating_Seeds_P Parameter: Age (hr) Value: 24 vs. 0
  misc_feature: MA Experiment 20000180 PARAMETER Experiment Name: At_Germinating_Seeds_P Parameter: Tissue Value: Germinating Seeds
  misc_feature: MA Experiment ID: 20000185 Result: Down-regulated in Transcription
  misc_feature: MA Experiment 20000185 PARAMETER Experiment Name: At_Roots__P Parameter: Age (day) Value: 7 vs. 21
  misc_feature: MA Experiment 20000185 PARAMETER Experiment Name: At_Roots__P Parameter: Organism Value: A. thaliana
  misc_feature: MA Experiment 20000185 PARAMETER Experiment Name: At_Roots__P Parameter: Tissue Value: Roots vs. Whole Plant
  misc_feature: MA Experiment ID: 20000234 Result: Down-regulated in Transcription
  misc_feature: MA Experiment 20000234 PARAMETER Experiment Name: At_Siliques_P Parameter: Age (day) Value: 21
  misc_feature: MA Experiment 20000234 PARAMETER Experiment Name: At_Siliques_P Parameter: Organism Value: A. thaliana
  misc_feature: MA Experiment 20000234 PARAMETER Experiment Name: At_Siliques_P Parameter: Plant Line Value: WS
  misc_feature: MA Experiment 20000234 PARAMETER Experiment Name: At_Siliques_P Parameter: Tissue Value: Less Than 5mm Siliques vs. Whole Plant
  misc_feature: MA Experiment ID: 20000235 Result: Down-regulated in Transcription
  misc_feature: MA Experiment 20000235 PARAMETER Experiment Name: At_Siliques_P Parameter: Age (day) Value: 21
  misc_feature: MA Experiment 20000235 PARAMETER Experiment Name: At_Siliques_P Parameter: Organism Value: A. thaliana
  misc_feature: MA Experiment 20000235 PARAMETER Experiment Name: At_Siliques_P Parameter: Plant Line Value: WS
  misc_feature: MA Experiment 20000235 PARAMETER Experiment Name: At_Siliques_P Parameter: Tissue Value: 5-10mm Siliques vs. Whole Plant
  misc_feature: MA Experiment ID: 20000265 Result: Down-regulated in Transcription
  misc_feature: MA Experiment 20000265 PARAMETER Experiment Name: At_Open_Flower_P Parameter: Age (day) Value: 21
  misc_feature: MA Experiment 20000265 PARAMETER Experiment Name: At_Open_Flower_P Parameter: Plant Line Value: WS
  misc_feature: MA Experiment 20000265 PARAMETER Experiment Name: At_Open_Flower_P Parameter: Tissue Value: Closed Flower vs. Whole Plant
  misc_feature: MA Experiment ID: 20000286 Result: Down-regulated in Transcription
  misc_feature: MA Experiment 20000286 PARAMETER Experiment Name: At_Open_Flower_P Parameter: Age (day) Value: 21
  misc_feature: MA Experiment 20000286 PARAMETER Experiment Name: At_Open_Flower_P Parameter: Plant Line Value: WS
  misc_feature: MA Experiment 20000286 PARAMETER Experiment Name: At_Open_Flower_P Parameter: Tissue Value: Half Open vs. Whole Plant
  misc_feature: MA Experiment ID: 20000439 Result: Down-regulated in Transcription
  misc_feature: MA Experiment 20000439 PARAMETER Experiment Name: At_Roots__P Parameter: Age (day) Value: 14 vs. 21
  misc_feature: MA Experiment 20000439 PARAMETER Experiment Name: At_Roots__P Parameter: Organism Value: A. thaliana
  misc_feature: MA Experiment 20000439 PARAMETER Experiment Name: At_Roots__P Parameter: Tissue Value: Roots vs. Whole Plant
  misc_feature: MA Experiment ID: 20001555 Result: Down-regulated in Transcription
  misc_feature: MA Experiment 20001555 PARAMETER Experiment Name: At_Drought_Soil_Dry_P Parameter: Age (day) Value: 24
  misc_feature: MA Experiment 20001555 PARAMETER Experiment Name: At_Drought_Soil_Dry_P Parameter: Organism Value: A. thaliana
  misc_feature: MA Experiment 20001555 PARAMETER Experiment Name: At_Drought_Soil_Dry_P Parameter: Plant Line Value: WS
  misc_feature: MA Experiment 20001555 PARAMETER Experiment Name: At_Drought_Soil_Dry_P Parameter: Post Timepoint (hr) Value: None
  misc_feature: MA Experiment 20001555 PARAMETER Experiment Name: At_Drought_Soil_Dry_P Parameter: Post-Treatment Value: None
  misc_feature: MA Experiment 20001555 PARAMETER Experiment Name: At_Drought_Soil_Dry_P Parameter: Timepoint (day) Value: 10
  misc_feature: MA Experiment 20001555 PARAMETER Experiment Name: At_Drought_Soil_Dry_P Parameter: Treatment Value: Drought vs. No Drought
  misc_feature: MA Experiment ID: 20001556 Result: Down-regulated in Transcription
  misc_feature: MA Experiment 20001556 PARAMETER Experiment Name: At_Drought_Soil_Dry_P Parameter: Age (day) Value: 26
  misc_feature: MA Experiment 20001556 PARAMETER Experiment Name: At_Drought_Soil_Dry_P Parameter: Organism Value: A. thaliana
  misc_feature: MA Experiment 20001556 PARAMETER Experiment Name: At_Drought_Soil_Dry_P Parameter: Plant Line Value: WS
  misc_feature: MA Experiment 20001556 PARAMETER Experiment Name: At_Drought_Soil_Dry_P Parameter: Post Timepoint (hr) Value: None
  misc_feature: MA Experiment 20001556 PARAMETER Experiment Name: At_Drought_Soil_Dry_P Parameter: Post-Treatment Value: None
  misc_feature: MA Experiment 20001556 PARAMETER Experiment Name: At_Drought_Soil_Dry_P Parameter: Timepoint (day) Value: 12
  misc_feature: MA Experiment 20001556 PARAMETER Experiment Name: At_Drought_Soil_Dry_P Parameter: Treatment Value: Drought vs. No Drought
  misc_feature: MA Experiment ID: 20001557 Result: Down-regulated in Transcription
  misc_feature: MA Experiment 20001557 PARAMETER Experiment Name: At_Drought_Soil_Dry_P Parameter: Age (day) Value: 27
  misc_feature: MA Experiment 20001557 PARAMETER Experiment Name: At_Drought_Soil_Dry_P Parameter: Organism Value: A. thaliana
  misc_feature: MA Experiment 20001557 PARAMETER Experiment Name: At_Drought_Soil_Dry_P Parameter: Plant Line Value: WS
  misc_feature: MA Experiment 20001557 PARAMETER Experiment Name: At_Drought_Soil_Dry_P Parameter: Post Timepoint (hr) Value: 3
  misc_feature: MA Experiment 20001557 PARAMETER Experiment Name: At_Drought_Soil_Dry_P Parameter: Post-Treatment Value: Re-Water vs. No Drought
  misc_feature: MA Experiment 20001557 PARAMETER Experiment Name: At_Drought_Soil_Dry_P Parameter: Timepoint (day) Value: 13
  misc_feature: MA Experiment 20001557 PARAMETER Experiment Name: At_Drought_Soil_Dry_P Parameter: Treatment Value: Drought vs. No Drought
  misc_feature: MA Experiment ID: 20001558 Result: Down-regulated in Transcription
  misc_feature: MA Experiment 20001558 PARAMETER Experiment Name: At_Drought_Soil_Dry_P Parameter: Age (day) Value: 27
  misc_feature: MA Experiment 20001558 PARAMETER Experiment Name: At_Drought_Soil_Dry_P Parameter: Organism Value: A. thaliana
  misc_feature: MA Experiment 20001558 PARAMETER Experiment Name: At_Drought_Soil_Dry_P Parameter: Plant Line Value: WS
  misc_feature: MA Experiment 20001558 PARAMETER Experiment Name: At_Drought_Soil_Dry_P Parameter: Post Timepoint (hr) Value: 6
  misc_feature: MA Experiment 20001558 PARAMETER Experiment Name: At_Drought_Soil_Dry_P Parameter: Post-Treatment Value: Re-Water vs. No Drought
  misc_feature: MA Experiment 20001558 PARAMETER Experiment Name: At_Drought_Soil_Dry_P Parameter: Timepoint (day) Value: 13
  misc_feature: MA Experiment 20001558 PARAMETER Experiment Name: At_Drought_Soil_Dry_P Parameter: Treatment Value: Drought vs. No Drought
  misc_feature: MA Experiment ID: 20001560 Result: Down-regulated in Transcription
  misc_feature: MA Experiment 20001560 PARAMETER Experiment Name: At_Drought_Soil_Dry_P Parameter: Age (day) Value: 28
  misc_feature: MA Experiment 20001560 PARAMETER Experiment Name: At_Drought_Soil_Dry_P Parameter: Organism Value: A. thaliana
  misc_feature: MA Experiment 20001560 PARAMETER Experiment Name: At_Drought_Soil_Dry_P Parameter: Plant Line Value: WS
  misc_feature: MA Experiment 20001560 PARAMETER Experiment Name: At_Drought_Soil_Dry_P Parameter: Post Timepoint (hr) Value: None
  misc_feature: MA Experiment 20001560 PARAMETER Experiment Name: At_Drought_Soil_Dry_P Parameter: Post-Treatment Value: None
  misc_feature: MA Experiment 20001560 PARAMETER Experiment Name: At_Drought_Soil_Dry_P Parameter: Timepoint (day) Value: 14
  misc_feature: MA Experiment 20001560 PARAMETER Experiment Name: At_Drought_Soil_Dry_P Parameter: Treatment Value: Drought vs. No Drought
  misc_feature: MA Experiment ID: 20001905 Result: Down-regulated in Transcription
  misc_feature: MA Experiment 20001905 PARAMETER Experiment Name: At_Drought_Reproduction_P Parameter: Age (day) Value: 40
  misc_feature: MA Experiment 20001905 PARAMETER Experiment Name: At_Drought_Reproduction_P Parameter: Organism Value: A. thaliana
  misc_feature: MA Experiment 20001905 PARAMETER Experiment Name: At_Drought_Reproduction_P Parameter: Plant Line Value: WS
  misc_feature: MA Experiment 20001905 PARAMETER Experiment Name: At_Drought_Reproduction_P Parameter: Timepoint (day) Value: 10
  misc_feature: MA Experiment 20001905 PARAMETER Experiment Name: At_Drought_Reproduction_P Parameter: Tissue Value: Rosettes
  misc_feature: MA Experiment 20001905 PARAMETER Experiment Name: At_Drought_Reproduction_P Parameter: Treatment Value: Drought vs. No Drought
  misc_feature: MA Experiment ID: 20001906 Result: Down-regulated in Transcription
  misc_feature: MA Experiment 20001906 PARAMETER Experiment Name: At_Drought_Reproduction_P Parameter: Age (day) Value: 35
  misc_feature: MA Experiment 20001906 PARAMETER Experiment Name: At_Drought_Reproduction_P Parameter: Organism Value: A. thaliana
  misc_feature: MA Experiment 20001906 PARAMETER Experiment Name: At_Drought_Reproduction_P Parameter: Plant Line Value: WS
  misc_feature: MA Experiment 20001906 PARAMETER Experiment Name: At_Drought_Reproduction_P Parameter: Timepoint (day) Value: 5
  misc_feature: MA Experiment 20001906 PARAMETER Experiment Name: At_Drought_Reproduction_P Parameter: Tissue Value: Siliques
  misc_feature: MA Experiment 20001906 PARAMETER Experiment Name: At_Drought_Reproduction_P Parameter: Treatment Value: Drought vs. No Drought
  misc_feature: MA Experiment ID: 20001908 Result: Down-regulated in Transcription
  misc_feature: MA Experiment 20001908 PARAMETER Experiment Name: At_Drought_Reproduction_P Parameter: Age (day) Value: 40
  misc_feature: MA Experiment 20001908 PARAMETER Experiment Name: At_Drought_Reproduction_P Parameter: Organism Value: A. thaliana
  misc_feature: MA Experiment 20001908 PARAMETER Experiment Name: At_Drought_Reproduction_P Parameter: Plant Line Value: WS
  misc_feature: MA Experiment 20001908 PARAMETER Experiment Name: At_Drought_Reproduction_P Parameter: Timepoint (day) Value: 10
  misc_feature: MA Experiment 20001908 PARAMETER Experiment Name: At_Drought_Reproduction_P Parameter: Tissue Value: Siliques
  misc_feature: MA Experiment 20001908 PARAMETER Experiment Name: At_Drought_Reproduction_P Parameter: Treatment Value: Drought vs. No Drought

SEQ ID NO: 31486 - protein, 298 aa, Arabidopsis thaliana; identical to SEQ ID NO: 27896
  peptide (1)..(298): Ceres Seq. ID no. 13509886
  misc_feature (61)..(298): Pfam Name: Protein of unknown function (DUF923) Pfam Description: Protein of unknown function (DUF923)
  misc_feature (62)..(296): Homolog of NCBI NO: 16759501 NR Description: conserved hypothetical protein
  misc_feature (61)..(296): Homolog of NCBI NO: 23113628 NR Description: hypothetical protein [Desulfitobacterium
  misc_feature (61)..(297): Homolog of NCBI NO: 29377458 NR Description: conserved hypothetical protein [Enterococcus
  misc_feature (59)..(296): Homolog of NCBI NO: 27375364 NR Description: blr0253 [Bradyrhizobium japonicum]
  misc_feature (59)..(298): Homolog of NCBI NO: 15806172 NR Description: conserved hypothetical protein [Deinococcus
  misc_feature (180)..(292): Homolog of NCBI NO: 7485211 NR Description: hypothetical protein - Arabidopsis thaliana
  misc_feature (129)..(234): Homolog of NCBI NO: 34901774 NR Description: OJ1058_B11.16 [Oryza sativa (japonica
  misc_feature (2)..(109): Homolog of NCBI NO: 34901774 NR Description: OJ1058_B11.16 [Oryza sativa (japonica
  misc_feature (2)..(298): Homolog of NCBI NO: 34393580 NR Description: putative glyoxylate induced protein
  misc_feature (1)..(298): Homolog of NCBI NO: 22328740 NR Description: expressed protein [Arabidopsis thaliana]

SEQ ID NO: 31487 - protein, 195 aa, Arabidopsis thaliana; identical to SEQ ID NO: 27897
  peptide (1)..(195): Ceres Seq. ID no. 13509887
  misc_feature (1)..(195): Pfam Name: Protein of unknown function (DUF923) Pfam Description: Protein of unknown function (DUF923)
  misc_feature (1)..(193): Homolog of NCBI NO: 23501251 NR Description: conserved hypothetical protein [Brucella suis
  misc_feature (1)..(193): Homolog of NCBI NO: 16759501 NR Description: conserved hypothetical protein
  misc_feature (1)..(193): Homolog of NCBI NO: 23113628 NR Description: hypothetical protein [Desulfitobacterium
  misc_feature (1)..(194): Homolog of NCBI NO: 29377458 NR Description: conserved hypothetical protein [Enterococcus
  misc_feature (1)..(193): Homolog of NCBI NO: 27375364 NR Description: blr0253 [Bradyrhizobium japonicum]
  misc_feature (1)..(195): Homolog of NCBI NO: 15806172 NR Description: conserved hypothetical protein [Deinococcus
  misc_feature (77)..(189): Homolog of NCBI NO: 7485211 NR Description: hypothetical protein - Arabidopsis thaliana
  misc_feature (26)..(131): Homolog of NCBI NO: 34901774 NR Description: OJ1058_B11.16 [Oryza sativa (japonica
  misc_feature (1)..(195): Homolog of NCBI NO: 34393580 NR Description: putative glyoxylate induced protein
  misc_feature (1)..(195): Homolog of NCBI NO: 22328740 NR Description: expressed protein [Arabidopsis thaliana]

SEQ ID NO: 31488 - protein, 190 aa, Arabidopsis thaliana; identical to SEQ ID NO: 27898
  peptide (1)..(190): Ceres Seq. ID no. 13509888
  misc_feature (1)..(190): Pfam Name: Protein of unknown function (DUF923) Pfam Description: Protein of unknown function (DUF923)
  misc_feature (1)..(188): Homolog of NCBI NO: 23501251 NR Description: conserved hypothetical protein [Brucella suis
  misc_feature (1)..(188): Homolog of NCBI NO: 16759501 NR Description: conserved hypothetical protein
  misc_feature (1)..(188): Homolog of NCBI NO: 23113628 NR Description: hypothetical protein [Desulfitobacterium
  misc_feature (1)..(189): Homolog of NCBI NO: 29377458 NR Description: conserved hypothetical protein [Enterococcus
  misc_feature (1)..(188): Homolog of NCBI NO: 27375364 NR Description: blr0253 [Bradyrhizobium japonicum]
  misc_feature (1)..(190): Homolog of NCBI NO: 15806172 NR Description: conserved hypothetical protein [Deinococcus
  misc_feature (72)..(184): Homolog of NCBI NO: 7485211 NR Description: hypothetical protein - Arabidopsis thaliana
  misc_feature (21)..(126): Homolog of NCBI NO: 34901774 NR Description: OJ1058_B11.16 [Oryza sativa (japonica
  misc_feature (1)..(190): Homolog of NCBI NO: 34393580 NR Description: putative glyoxylate induced protein
  misc_feature (1)..(190): Homolog of NCBI NO: 22328740 NR Description: expressed protein [Arabidopsis thaliana]

SEQ ID NO: 31489 - DNA, 1178 bp, Arabidopsis thaliana; identical to SEQ ID NO: 27899
  misc_feature (1)..(1178): Ceres Seq. ID no. 13490414
  misc_feature: MA Experiment ID: 20000185 Result: Down-regulated in Transcription
  misc_feature: MA Experiment 20000185 PARAMETER Experiment Name: At_Roots__P Parameter: Age (day) Value: 7 vs. 21
  misc_feature: MA Experiment 20000185 PARAMETER Experiment Name: At_Roots__P Parameter: Organism Value: A. thaliana
  misc_feature: MA Experiment 20000185 PARAMETER Experiment Name: At_Roots__P Parameter: Tissue Value: Roots vs. Whole Plant
  misc_feature: MA Experiment ID: 20000439 Result: Down-regulated in Transcription
  misc_feature: MA Experiment 20000439 PARAMETER Experiment Name: At_Roots__P Parameter: Age (day) Value: 14 vs. 21
  misc_feature: MA Experiment 20000439 PARAMETER Experiment Name: At_Roots__P Parameter: Organism Value: A. thaliana
  misc_feature: MA Experiment 20000439 PARAMETER Experiment Name: At_Roots__P Parameter: Tissue Value: Roots vs. Whole Plant

SEQ ID NO: 31490 - protein, 351 aa, Arabidopsis thaliana; identical to SEQ ID NO: 27900
  peptide (1)..(351): Ceres Seq. ID no. 13490415
  misc_feature (154)..(351): Homolog of NCBI NO: 33865786 NR Description: conserved hypothetical protein [Synechococcus sp.
  misc_feature (102)..(317): Homolog of NCBI NO: 37522361 NR Description: hypothetical protein glr2792 [Gloeobacter
  misc_feature (102)..(351): Homolog of NCBI NO: 16329818 NR Description: unknown protein [Synechocystis sp. PCC 6803]
  misc_feature (102)..(351): Homolog of NCBI NO: 23130464 NR Description: hypothetical protein [Nostoc punctiforme]
  misc_feature (102)..(351): Homolog of NCBI NO: 17230608 NR Description: hypothetical protein [Nostoc sp. PCC 7120]
  misc_feature (102)..(319): Homolog of NCBI NO: 23040759 NR Description: hypothetical protein [Trichodesmium erythraeum
  misc_feature (11)..(351): Homolog of NCBI NO: 18421131 NR Description: expressed protein [Arabidopsis thaliana]

SEQ ID NO: 31491 - protein, 341 aa, Arabidopsis thaliana; identical to SEQ ID NO: 27901
  peptide (1)..(341): Ceres Seq. ID no. 13490416
  misc_feature (144)..(341): Homolog of NCBI NO: 33865786 NR Description: conserved hypothetical protein [Synechococcus sp.
  misc_feature (92)..(307): Homolog of NCBI NO: 37522361 NR Description: hypothetical protein glr2792 [Gloeobacter
  misc_feature (92)..(341): Homolog of NCBI NO: 16329818 NR Description: unknown protein [Synechocystis sp. PCC 6803]
  misc_feature (92)..(341): Homolog of NCBI NO: 23130464 NR Description: hypothetical protein [Nostoc punctiforme]
  misc_feature (92)..(341): Homolog of NCBI NO: 17230608 NR Description: hypothetical protein [Nostoc sp. PCC 7120]
  misc_feature (92)..(309): Homolog of NCBI NO: 23040759 NR Description: hypothetical protein [Trichodesmium erythraeum
  misc_feature (1)..(341): Homolog of NCBI NO: 18421131 NR Description: expressed protein [Arabidopsis thaliana]

SEQ ID NO: 31492 - DNA, 1343 bp, Arabidopsis thaliana; identical to SEQ ID NO: 27902
  misc_feature (1)..(1343): Ceres Seq. ID no. 13487498
  misc_feature: MA Experiment ID: 20001905 Result: Up-regulated in Transcription
  misc_feature: MA Experiment 20001905 PARAMETER Experiment Name: At_Drought_Reproduction_P Parameter: Age (day) Value: 40
  misc_feature: MA Experiment 20001905 PARAMETER Experiment Name: At_Drought_Reproduction_P Parameter: Organism Value: A. thaliana
  misc_feature: MA Experiment 20001905 PARAMETER Experiment Name: At_Drought_Reproduction_P Parameter: Plant Line Value: WS
  misc_feature: MA Experiment 20001905 PARAMETER Experiment Name: At_Drought_Reproduction_P Parameter: Timepoint (day) Value: 10
  misc_feature: MA Experiment 20001905 PARAMETER Experiment Name: At_Drought_Reproduction_P Parameter: Tissue Value: Rosettes
  misc_feature: MA Experiment 20001905 PARAMETER Experiment Name: At_Drought_Reproduction_P Parameter: Treatment Value: Drought vs. No Drought

SEQ ID NO: 31493 - protein, 280 aa, Arabidopsis thaliana; identical to SEQ ID NO: 27903
  peptide (1)..(280): Ceres Seq. ID no. 13487499
  misc_feature (6)..(175): Pfam Name: Tetraspanin family Pfam Description: Tetraspanin family
  misc_feature (1)..(280): Homolog of NCBI NO: 18398417 NR Description: senescence-associated protein family [Arabidopsis

SEQ ID NO: 31494 - protein, 256 aa, Arabidopsis thaliana; identical to SEQ ID NO: 27904
  peptide (1)..(256): Ceres Seq. ID no. 13487500
  misc_feature (1)..(151): Pfam Name: Tetraspanin family Pfam Description: Tetraspanin family
  misc_feature (1)..(256): Homolog of NCBI NO: 18398417 NR Description: senescence-associated protein family [Arabidopsis

SEQ ID NO: 31495 - protein, 217 aa, Arabidopsis thaliana; identical to SEQ ID NO: 27905
  peptide (1)..(217): Ceres Seq. ID no. 13487501
  misc_feature (1)..(112): Pfam Name: Tetraspanin family Pfam Description: Tetraspanin family
  misc_feature (1)..(217): Homolog of NCBI NO: 18398417 NR Description: senescence-associated protein family [Arabidopsis

SEQ ID NO: 31496 - DNA, 1672 bp, Arabidopsis thaliana; identical to SEQ ID NO: 27906
  misc_feature (1)..(1672): Ceres Seq. ID no. 12395760
  misc_feature: MA Experiment ID: 20000171 Result: Down-regulated in Transcription
  misc_feature: MA Experiment 20000171 PARAMETER Experiment Name: At_42deg_Heat_P Parameter: Age (day) Value: 14
  misc_feature: MA Experiment 20000171 PARAMETER Experiment Name: At_42deg_Heat_P Parameter: Organism Value: A. thaliana
  misc_feature: MA Experiment 20000171 PARAMETER Experiment Name: At_42deg_Heat_P Parameter: Plant Line Value: WS
  misc_feature: MA Experiment 20000171 PARAMETER Experiment Name: At_42deg_Heat_P Parameter: Temperature (deg C) Value: 42 vs. 22
  misc_feature: MA Experiment 20000171 PARAMETER Experiment Name: At_42deg_Heat_P Parameter: Timepoint (hr) Value: 1
  misc_feature: MA Experiment 20000171 PARAMETER Experiment Name: At_42deg_Heat_P Parameter: Tissue Value: Aerial
  misc_feature: MA Experiment ID: 20000173 Result: Down-regulated in Transcription
  misc_feature: MA Experiment 20000173 PARAMETER Experiment Name: At_42deg_Heat_P Parameter: Age (day) Value: 14
  misc_feature: MA Experiment 20000173 PARAMETER Experiment Name: At_42deg_Heat_P Parameter: Organism Value: A. thaliana
  misc_feature: MA Experiment 20000173 PARAMETER Experiment Name: At_42deg_Heat_P Parameter: Plant Line Value: WS
  misc_feature: MA Experiment 20000173 PARAMETER Experiment Name: At_42deg_Heat_P Parameter: Temperature (deg C) Value: 42 vs. 22
  misc_feature: MA Experiment 20000173 PARAMETER Experiment Name: At_42deg_Heat_P Parameter: Timepoint (hr) Value: 6
  misc_feature: MA Experiment 20000173 PARAMETER Experiment Name: At_42deg_Heat_P Parameter: Tissue Value: Aerial
  misc_feature: MA Experiment ID: 20000180 Result: Down-regulated in Transcription
  misc_feature: MA Experiment 20000180 PARAMETER Experiment Name: At_Germinating_Seeds_P Parameter: Age (hr) Value: 24 vs. 0
  misc_feature: MA Experiment 20000180 PARAMETER Experiment Name: At_Germinating_Seeds_P Parameter: Tissue Value: Germinating Seeds
  misc_feature: MA Experiment ID: 20000185 Result: Down-regulated in Transcription
  misc_feature: MA Experiment 20000185 PARAMETER Experiment Name: At_Roots__P Parameter: Age (day) Value: 7 vs. 21
  misc_feature: MA Experiment 20000185 PARAMETER Experiment Name: At_Roots__P Parameter: Organism Value: A. thaliana
  misc_feature: MA Experiment 20000185 PARAMETER Experiment Name: At_Roots__P Parameter: Tissue Value: Roots vs. Whole Plant
  misc_feature: MA Experiment ID: 20000234 Result: Up-regulated in Transcription
  misc_feature: MA Experiment 20000234 PARAMETER Experiment Name: At_Siliques_P Parameter: Age (day) Value: 21
  misc_feature: MA Experiment 20000234 PARAMETER Experiment Name: At_Siliques_P Parameter: Organism Value: A. thaliana
  misc_feature: MA Experiment 20000234 PARAMETER Experiment Name: At_Siliques_P Parameter: Plant Line Value: WS
  misc_feature: MA Experiment 20000234 PARAMETER Experiment Name: At_Siliques_P Parameter: Tissue Value: Less Than 5mm Siliques vs. Whole Plant
  misc_feature: MA Experiment ID: 20000235 Result: Up-regulated in Transcription
  misc_feature: MA Experiment 20000235 PARAMETER Experiment Name: At_Siliques_P Parameter: Age (day) Value: 21
  misc_feature: MA Experiment 20000235 PARAMETER Experiment Name: At_Siliques_P Parameter: Organism Value: A. thaliana
  misc_feature: MA Experiment 20000235 PARAMETER Experiment Name: At_Siliques_P Parameter: Plant Line Value: WS
  misc_feature: MA Experiment 20000235 PARAMETER Experiment Name: At_Siliques_P Parameter: Tissue Value: 5-10mm Siliques vs. Whole Plant
  misc_feature: MA Experiment ID: 20000264 Result: Up-regulated in Transcription
  misc_feature: MA Experiment 20000264 PARAMETER Experiment Name: At_Open_Flower_P Parameter: Age (day) Value: 21
  misc_feature: MA Experiment 20000264 PARAMETER Experiment Name: At_Open_Flower_P Parameter: Plant Line Value: WS
  misc_feature: MA Experiment 20000264 PARAMETER Experiment Name: At_Open_Flower_P Parameter: Tissue Value: Open Flower vs. Whole Plant
  misc_feature: MA Experiment ID: 20000265 Result: Up-regulated in Transcription
  misc_feature: MA Experiment 20000265 PARAMETER Experiment Name: At_Open_Flower_P Parameter: Age (day) Value: 21
  misc_feature: MA Experiment 20000265 PARAMETER Experiment Name: At_Open_Flower_P Parameter: Plant Line Value: WS
  misc_feature: MA Experiment 20000265 PARAMETER Experiment Name: At_Open_Flower_P Parameter: Tissue Value: Closed Flower vs. Whole Plant
  misc_feature: MA Experiment ID: 20000286 Result: Up-regulated in Transcription
  misc_feature: MA Experiment 20000286 PARAMETER Experiment Name: At_Open_Flower_P Parameter: Age (day) Value: 21
  misc_feature: MA Experiment 20000286 PARAMETER Experiment Name: At_Open_Flower_P Parameter: Plant Line Value: WS
  misc_feature: MA Experiment 20000286 PARAMETER Experiment Name: At_Open_Flower_P Parameter: Tissue Value: Half Open vs. Whole Plant
  misc_feature: MA Experiment ID: 20000436 Result: Up-regulated in Transcription
  misc_feature: MA Experiment 20000436 PARAMETER Experiment Name: At_Drought_P Parameter: Age (day) Value: 7
  misc_feature: MA Experiment 20000436 PARAMETER Experiment Name: At_Drought_P Parameter: Organism Value: A. thaliana
  misc_feature: MA Experiment 20000436 PARAMETER Experiment Name: At_Drought_P Parameter: Plant Line Value: WS
  misc_feature: MA Experiment 20000436 PARAMETER Experiment Name: At_Drought_P Parameter: Timepoint (hr) Value: 12
  misc_feature: MA Experiment 20000436 PARAMETER Experiment Name: At_Drought_P Parameter: Tissue Value: Whole Plant
  misc_feature: MA Experiment 20000436 PARAMETER Experiment Name: At_Drought_P Parameter: Treatment Value: Drought vs. No Drought
  misc_feature: MA Experiment ID: 20000439 Result: Down-regulated in Transcription
  misc_feature: MA Experiment 20000439 PARAMETER Experiment Name: At_Roots__P Parameter: Age (day) Value: 14 vs. 21
  misc_feature: MA Experiment 20000439 PARAMETER Experiment Name: At_Roots__P Parameter: Organism Value: A. thaliana
  misc_feature: MA Experiment 20000439 PARAMETER Experiment Name: At_Roots__P Parameter: Tissue Value: Roots vs. Whole Plant
  misc_feature: MA Experiment ID: 20000573 Result: Down-regulated in Transcription
  misc_feature: MA Experiment 20000573 PARAMETER Experiment Name: At_100uM_ABA_Mutants__P Parameter: Organism Value: A. thaliana
  misc_feature: MA Experiment 20000573 PARAMETER Experiment Name: At_100uM_ABA_Mutants__P Parameter: Plant Line Value: CS22 vs. Ler wt
  misc_feature: MA Experiment 20000573 PARAMETER Experiment Name: At_100uM_ABA_Mutants__P Parameter: Timepoint (hr) Value: N/A
  misc_feature: MA Experiment 20000573 PARAMETER Experiment Name: At_100uM_ABA_Mutants__P Parameter: Tissue Value: Whole Plant
  misc_feature: MA Experiment 20000573 PARAMETER Experiment Name: At_100uM_ABA_Mutants__P Parameter: Treatment Value: None
  misc_feature: MA Experiment ID: 20001248 Result: Down-regulated in Transcription
  misc_feature: MA Experiment 20001248 PARAMETER Experiment Name: At_Far-red-induction_P Parameter: Age (day) Value: 7
  misc_feature: MA Experiment 20001248 PARAMETER Experiment Name: At_Far-red-induction_P Parameter: Light Value: Far-red vs. White
  misc_feature: MA Experiment 20001248 PARAMETER Experiment Name: At_Far-red-induction_P Parameter: Organism Value: A. thaliana
  misc_feature: MA Experiment 20001248 PARAMETER Experiment Name: At_Far-red-induction_P Parameter: Plant Line Value: Columbia
  misc_feature: MA Experiment 20001248 PARAMETER Experiment Name: At_Far-red-induction_P Parameter: Timepoint (hr) Value: 4
  misc_feature: MA Experiment 20001248 PARAMETER Experiment Name: At_Far-red-induction_P Parameter: Tissue Value: Whole Plant

SEQ ID NO: 31497 - protein, 530 aa, Arabidopsis thaliana; identical to SEQ ID NO: 27907
  peptide (1)..(530): Ceres Seq. ID no. 12395761
  misc_feature (60)..(528): Pfam Name: Cytochrome P450 Pfam Description: Cytochrome P450
  misc_feature (32)..(530): Homolog of NCBI NO: 15238242 NR Description: cytochrome p450 monooxygenase, putative; protein
  misc_feature (23)..(530): Homolog of NCBI NO: 15228330 NR Description: cytochrome P450 monooxygenase, putative; protein
  misc_feature (22)..(530): Homolog of NCBI NO: 28393336 NR Description: putative cytochrome p450 [Arabidopsis thaliana]
  misc_feature (22)..(530): Homolog of NCBI NO: 15228331 NR Description: cytochrome p450, putative; protein id:
  misc_feature (19)..(530): Homolog of NCBI NO: 15238249 NR Description: cytochrome p450, putative
  misc_feature (19)..(530): Homolog of NCBI NO: 21595357 NR Description: cytochrom P450-like protein [Arabidopsis thaliana]

SEQ ID NO: 31498 - protein, 512 aa, Arabidopsis thaliana; identical to SEQ ID NO: 27908
  peptide (1)..(512): Ceres Seq. ID no. 12395762
  misc_feature (42)..(510): Pfam Name: Cytochrome P450 Pfam Description: Cytochrome P450
  misc_feature (14)..(512): Homolog of NCBI NO: 15238242 NR Description: cytochrome p450 monooxygenase, putative; protein
  misc_feature (5)..(512): Homolog of NCBI NO: 15228330 NR Description: cytochrome P450 monooxygenase, putative; protein
  misc_feature (4)..(512): Homolog of NCBI NO: 28393336 NR Description: putative cytochrome p450 [Arabidopsis thaliana]
  misc_feature (4)..(512): Homolog of NCBI NO: 15228331 NR Description: cytochrome p450, putative; protein id:
  misc_feature (1)..(512): Homolog of NCBI NO: 15238249 NR Description: cytochrome p450, putative
  misc_feature (1)..(512): Homolog of NCBI NO: 21595357 NR Description: cytochrom P450-like protein [Arabidopsis thaliana]

SEQ ID NO: 31499 - protein, 430 aa, Arabidopsis thaliana; identical to SEQ ID NO: 27909
  peptide (1)..(430): Ceres Seq. ID no. 12395763
  misc_feature (1)..(428): Pfam Name: Cytochrome P450 Pfam Description: Cytochrome P450
  misc_feature (1)..(430): Homolog of NCBI NO: 15238242 NR Description: cytochrome p450 monooxygenase, putative; protein
  misc_feature (1)..(430): Homolog of NCBI NO: 15228330 NR Description: cytochrome P450 monooxygenase, putative; protein
  misc_feature (1)..(430): Homolog of NCBI NO: 28393336 NR Description: putative cytochrome p450 [Arabidopsis thaliana]
  misc_feature (1)..(430): Homolog of NCBI NO: 15228331 NR Description: cytochrome p450, putative; protein id:
  misc_feature (1)..(430): Homolog of NCBI NO: 15238249 NR Description: cytochrome p450, putative
  misc_feature (1)..(430): Homolog of NCBI NO: 21595357 NR Description: cytochrom P450-like protein [Arabidopsis thaliana]

SEQ ID NO: 31500 - DNA, 1324 bp, Arabidopsis thaliana; identical to SEQ ID NO: 27910
  misc_feature (1)..(1324): Ceres Seq. ID no. 12422635
  misc_feature: MA Experiment ID: 108434 Result: Up-regulated in Transcription
  misc_feature: MA Experiment 108434 PARAMETER Experiment Name: At_Root_Tips_cDNA_P Parameter: Tissue Value: Root Tips
  misc_feature: MA Experiment ID: 108461 Result: Down-regulated in Transcription
  misc_feature: MA Experiment 108461 PARAMETER Experiment Name: At_Germinating_Seeds_cDNA_P Parameter: Age (day) Value: 1 vs. 0
  misc_feature: MA Experiment 108461 PARAMETER Experiment Name: At_Germinating_Seeds_cDNA_P Parameter: Tissue Value: Germinating Seeds
  misc_feature: MA Experiment ID: 108462 Result: Down-regulated in Transcription
  misc_feature: MA Experiment 108462 PARAMETER Experiment Name: At_Germinating_Seeds_cDNA_P Parameter: Age (day) Value: 2 vs. 0
  misc_feature: MA Experiment 108462 PARAMETER Experiment Name: At_Germinating_Seeds_cDNA_P Parameter: Tissue Value: Germinating Seeds
  misc_feature: MA Experiment ID: 108463 Result: Down-regulated in Transcription
  misc_feature: MA Experiment 108463 PARAMETER Experiment Name: At_Germinating_Seeds_cDNA_P Parameter: Age (day) Value: 3 vs. 0
  misc_feature: MA Experiment 108463 PARAMETER Experiment Name: At_Germinating_Seeds_cDNA_P Parameter: Tissue Value: Germinating Seeds
  misc_feature: MA Experiment ID: 108464 Result: Down-regulated in Transcription
  misc_feature: MA Experiment 108464 PARAMETER Experiment Name: At_Germinating_Seeds_cDNA_P Parameter: Age (day) Value: 4 vs. 0
  misc_feature: MA Experiment 108464 PARAMETER Experiment Name: At_Germinating_Seeds_cDNA_P Parameter: Tissue Value: Germinating Seeds
  misc_feature: MA Experiment ID: 108572 Result: Down-regulated in Transcription
  misc_feature: MA Experiment 108572 PARAMETER Experiment Name: At_Drought_cDNA_P Parameter: Timepoint (hr) Value: 1
  misc_feature: MA Experiment 108572 PARAMETER Experiment Name: At_Drought_cDNA_P Parameter: Tissue Value: Aerial
  misc_feature: MA Experiment 108572 PARAMETER Experiment Name: At_Drought_cDNA_P Parameter: Treatment Value: Drought vs. No Drought
  misc_feature: MA Experiment ID: 20000180 Result: Down-regulated in Transcription
  misc_feature: MA Experiment 20000180 PARAMETER Experiment Name: At_Germinating_Seeds_P Parameter: Age (hr) Value: 24 vs. 0
  misc_feature: MA Experiment 20000180 PARAMETER Experiment Name: At_Germinating_Seeds_P Parameter: Tissue Value: Germinating Seeds
  misc_feature: MA Experiment ID: 20001557 Result: Up-regulated in Transcription
  misc_feature: MA Experiment 20001557 PARAMETER Experiment Name: At_Drought_Soil_Dry_P Parameter: Age (day) Value: 27
  misc_feature: MA Experiment 20001557 PARAMETER Experiment Name: At_Drought_Soil_Dry_P Parameter: Organism Value: A. thaliana
  misc_feature: MA Experiment 20001557 PARAMETER Experiment Name: At_Drought_Soil_Dry_P Parameter: Plant Line Value: WS
  misc_feature: MA Experiment 20001557 PARAMETER Experiment Name: At_Drought_Soil_Dry_P Parameter: Post Timepoint (hr) Value: 3
  misc_feature: MA Experiment 20001557 PARAMETER Experiment Name: At_Drought_Soil_Dry_P Parameter: Post-Treatment Value: Re-Water vs. No Drought
  misc_feature: MA Experiment 20001557 PARAMETER Experiment Name: At_Drought_Soil_Dry_P Parameter: Timepoint (day) Value: 13
  misc_feature: MA Experiment 20001557 PARAMETER Experiment Name: At_Drought_Soil_Dry_P Parameter: Treatment Value: Drought vs. No Drought
  misc_feature: MA Experiment ID: 20001558 Result: Up-regulated in Transcription
  misc_feature: MA Experiment 20001558 PARAMETER Experiment Name: At_Drought_Soil_Dry_P Parameter: Age (day) Value: 27
  misc_feature: MA Experiment 20001558 PARAMETER Experiment Name: At_Drought_Soil_Dry_P Parameter: Organism Value: A. thaliana
  misc_feature: MA Experiment 20001558 PARAMETER Experiment Name: At_Drought_Soil_Dry_P Parameter: Plant Line Value: WS
  misc_feature: MA Experiment 20001558 PARAMETER Experiment Name: At_Drought_Soil_Dry_P Parameter: Post Timepoint (hr) Value: 6
  misc_feature: MA Experiment 20001558 PARAMETER Experiment Name: At_Drought_Soil_Dry_P Parameter: Post-Treatment Value: Re-Water vs. No Drought
  misc_feature: MA Experiment 20001558 PARAMETER Experiment Name: At_Drought_Soil_Dry_P Parameter: Timepoint (day) Value: 13
  misc_feature: MA Experiment 20001558 PARAMETER Experiment Name: At_Drought_Soil_Dry_P Parameter: Treatment Value: Drought vs. No Drought

SEQ ID NO: 31501 - protein, 232 aa, Arabidopsis thaliana; identical to SEQ ID NO: 27911
  peptide (1)..(232): Ceres Seq. ID no. 12422636
  misc_feature (117)..(205): Pfam Name: RNA polymerase Rpb3/RpoA insert domain Pfam Description: RNA polymerase Rpb3/RpoA insert domain
  misc_feature (29)..(183): Homolog of NCBI NO: 18266895 NR Description: DNA-directed RNA polymerase I 40 kDa polypeptide
  misc_feature (29)..(183): Homolog of NCBI NO: 6677787 NR Description: RNA polymerase 1-1
  misc_feature (29)..(173): Homolog of NCBI NO: 34874462 NR Description: similar to DNA-directed RNA polymerase I 40 kDa
  misc_feature (45)..(183): Homolog of NCBI NO: 14198113 NR Description: Unknown (protein for IMAGE:3448039) [Homo sapiens]
  misc_feature (29)..(183): Homolog of NCBI NO: 3914807 NR Description: DNA-directed RNA polymerase I 40 kDa polypeptide
  misc_feature (45)..(192): Homolog of NCBI NO: 34193909 NR Description: RNA polymerase 1-1 [Danio rerio]
  misc_feature (1)..(205): Homolog of NCBI NO: 15219773 NR Description: RNA polymerase subunit
  misc_feature (1)..(205): Homolog of NCBI NO: 21592304 NR Description: RNA polymerase subunit [Arabidopsis thaliana]
  misc_feature (1)..(205): Homolog of NCBI NO: 514322 NR Description: RNA polymerase subunit
  misc_feature (1)..(205): Homolog of NCBI NO: 15219820 NR Description: RNA polymerase subunit

SEQ ID NO: 31502 - protein, 147 aa, Arabidopsis thaliana; identical to SEQ ID NO: 27912
  peptide (1)..(147): Ceres Seq. ID no. 12422637
  misc_feature (32)..(120): Pfam Name: RNA polymerase Rpb3/RpoA insert domain Pfam Description: RNA polymerase Rpb3/RpoA insert domain
  misc_feature (1)..(98): Homolog of NCBI NO: 18266895 NR Description: DNA-directed RNA polymerase I 40 kDa polypeptide
  misc_feature (1)..(98): Homolog of NCBI NO: 6677787 NR Description: RNA polymerase 1-1
  misc_feature (1)..(88): Homolog of NCBI NO: 34874462 NR Description: similar to DNA-directed RNA polymerase I 40 kDa
  misc_feature (1)..(98): Homolog of NCBI NO: 14198113 NR Description: Unknown (protein for IMAGE:3448039) [Homo sapiens]
  misc_feature (1)..(98): Homolog of NCBI NO: 3914807 NR Description: DNA-directed RNA polymerase I 40 kDa polypeptide
  misc_feature (1)..(107): Homolog of NCBI NO: 34193909 NR Description: RNA polymerase 1-1 [Danio rerio]
  misc_feature (1)..(120): Homolog of NCBI NO: 15219773 NR Description: RNA polymerase subunit
  misc_feature (1)..(120): Homolog of NCBI NO: 21592304 NR Description: RNA polymerase subunit [Arabidopsis thaliana]
  misc_feature (1)..(120): Homolog of NCBI NO: 514322 NR Description: RNA polymerase subunit
  misc_feature (1)..(120): Homolog of NCBI NO: 15219820 NR Description: RNA polymerase subunit

SEQ ID NO: 31503 - protein, 143 aa, Arabidopsis thaliana; identical to SEQ ID NO: 27913
  peptide (1)..(143): Ceres Seq. ID no. 12422638
  misc_feature (28)..(116): Pfam Name: RNA polymerase Rpb3/RpoA insert domain Pfam Description: RNA polymerase Rpb3/RpoA insert domain
  misc_feature (1)..(94): Homolog of NCBI NO: 18266895 NR Description: DNA-directed RNA polymerase I 40 kDa polypeptide
  misc_feature (1)..(94): Homolog of NCBI NO: 6677787 NR Description: RNA polymerase 1-1
  misc_feature (1)..(84): Homolog of NCBI NO: 34874462 NR Description: similar to DNA-directed RNA polymerase I 40 kDa
  misc_feature (1)..(94): Homolog of NCBI NO: 14198113 NR Description: Unknown (protein for IMAGE:3448039) [Homo sapiens]
  misc_feature (1)..(94): Homolog of NCBI NO: 3914807 NR Description: DNA-directed RNA polymerase I 40 kDa polypeptide
  misc_feature (1)..(103): Homolog of NCBI NO: 34193909 NR Description: RNA polymerase 1-1 [Danio rerio]
  misc_feature (1)..(116): Homolog of NCBI NO: 15219773 NR Description: RNA polymerase subunit
  misc_feature (1)..(116): Homolog of NCBI NO: 21592304 NR Description: RNA polymerase subunit [Arabidopsis thaliana]
  misc_feature (1)..(116): Homolog of NCBI NO: 514322 NR Description: RNA polymerase subunit
  misc_feature (1)..(116): Homolog of NCBI NO: 15219820 NR Description: RNA polymerase subunit

SEQ ID NO: 31504 - DNA, 429 bp, Arabidopsis thaliana; identical to SEQ ID NO: 27914
  misc_feature (1)..(429): Ceres Seq. ID no. 12334228
  misc_feature: MA Experiment ID: 20001905 Result: Up-regulated in Transcription
  misc_feature: MA Experiment 20001905 PARAMETER Experiment Name: At_Drought_Reproduction_P Parameter: Age (day) Value: 40
  misc_feature: MA Experiment 20001905 PARAMETER Experiment Name: At_Drought_Reproduction_P Parameter: Organism Value: A. thaliana
  misc_feature: MA Experiment 20001905 PARAMETER Experiment Name: At_Drought_Reproduction_P Parameter: Plant Line Value: WS
  misc_feature: MA Experiment 20001905 PARAMETER Experiment Name: At_Drought_Reproduction_P Parameter: Timepoint (day) Value: 10
  misc_feature: MA Experiment 20001905 PARAMETER Experiment Name: At_Drought_Reproduction_P Parameter: Tissue Value: Rosettes
  misc_feature: MA Experiment 20001905 PARAMETER Experiment Name: At_Drought_Reproduction_P Parameter: Treatment Value: Drought vs. No Drought

SEQ ID NO: 31505 - protein, 91 aa, Arabidopsis thaliana; identical to SEQ ID NO: 27915
  peptide (1)..(91): Ceres Seq. ID no. 12334229
  misc_feature (8)..(91): Homolog of NCBI NO: 18417123 NR Description: Expressed protein

SEQ ID NO: 31506 - protein, 84 aa, Arabidopsis thaliana; identical to SEQ ID NO: 27916
  peptide (1)..(84): Ceres Seq. ID no. 12334230
  misc_feature (1)..(84): Homolog of NCBI NO: 18417123 NR Description: Expressed protein

SEQ ID NO: 31507 - protein, 81 aa, Arabidopsis thaliana; identical to SEQ ID NO: 27917
  peptide (1)..(81): Ceres Seq. ID no. 12334231
  misc_feature (1)..(81): Homolog of NCBI NO: 18417123 NR Description: Expressed protein

SEQ ID NO: 31508 - DNA, 1403 bp, Arabidopsis thaliana; identical to SEQ ID NO: 27918
  misc_feature (1)..(1403): Ceres Seq. ID no. 12335483
  misc_feature: MA Experiment ID: 108573 Result: Up-regulated in Transcription
  misc_feature: MA Experiment 108573 PARAMETER Experiment Name: At_Drought_cDNA_P Parameter: Timepoint (hr) Value: 6
  misc_feature: MA Experiment 108573 PARAMETER Experiment Name: At_Drought_cDNA_P Parameter: Tissue Value: Aerial
  misc_feature: MA Experiment 108573 PARAMETER Experiment Name: At_Drought_cDNA_P Parameter: Treatment Value: Drought vs. No Drought
  misc_feature: MA Experiment ID: 108595 Result: Down-regulated in Transcription
  misc_feature: MA Experiment 108595 PARAMETER Experiment Name: At_Ler-pi_Ovule_cDNA_P Parameter: Plant Line Value: null
  misc_feature: MA Experiment ID: 20000171 Result: Down-regulated in Transcription
  misc_feature: MA Experiment 20000171 PARAMETER Experiment Name: At_42deg_Heat_P Parameter: Age (day) Value: 14
  misc_feature: MA Experiment 20000171 PARAMETER Experiment Name: At_42deg_Heat_P Parameter: Organism Value: A. thaliana
  misc_feature: MA Experiment 20000171 PARAMETER Experiment Name: At_42deg_Heat_P Parameter: Plant Line Value: WS
  misc_feature: MA Experiment 20000171 PARAMETER Experiment Name: At_42deg_Heat_P Parameter: Temperature (deg C) Value: 42 vs. 22
  misc_feature: MA Experiment 20000171 PARAMETER Experiment Name: At_42deg_Heat_P Parameter: Timepoint (hr) Value: 1
  misc_feature: MA Experiment 20000171 PARAMETER Experiment Name: At_42deg_Heat_P Parameter: Tissue Value: Aerial
  misc_feature: MA Experiment ID: 20000184 Result: Down-regulated in Transcription
  misc_feature: MA Experiment 20000184 PARAMETER Experiment Name: At_Shoots__P Parameter: Age (day) Value: 7
  misc_feature: MA Experiment 20000184 PARAMETER Experiment Name: At_Shoots__P Parameter: Tissue Value: Shoots vs. Whole Plant
  misc_feature: MA Experiment ID: 20001248 Result: Up-regulated in Transcription
  misc_feature: MA Experiment 20001248 PARAMETER Experiment Name: At_Far-red-induction_P Parameter: Age (day) Value: 7
  misc_feature: MA Experiment 20001248 PARAMETER Experiment Name: At_Far-red-induction_P Parameter: Light Value: Far-red vs. White
  misc_feature: MA Experiment 20001248 PARAMETER Experiment Name: At_Far-red-induction_P Parameter: Organism Value: A. thaliana
  misc_feature: MA Experiment 20001248 PARAMETER Experiment Name: At_Far-red-induction_P Parameter: Plant Line Value: Columbia
  misc_feature: MA Experiment 20001248 PARAMETER Experiment Name: At_Far-red-induction_P Parameter: Timepoint (hr) Value: 4
  misc_feature: MA Experiment 20001248 PARAMETER Experiment Name: At_Far-red-induction_P Parameter: Tissue Value: Whole Plant
  misc_feature: MA Experiment ID: 20001450 Result: Up-regulated in Transcription
  misc_feature: MA Experiment 20001450 PARAMETER Experiment Name: At_Far-red-induction_P Parameter: Age (day) Value: 7
  misc_feature: MA Experiment 20001450 PARAMETER Experiment Name: At_Far-red-induction_P Parameter: Light Value: Far-red vs. White
  misc_feature: MA Experiment 20001450 PARAMETER Experiment Name: At_Far-red-induction_P Parameter: Organism Value: A. thaliana
  misc_feature: MA Experiment 20001450 PARAMETER Experiment Name: At_Far-red-induction_P Parameter: Plant Line Value: Columbia
  misc_feature: MA Experiment 20001450 PARAMETER Experiment Name: At_Far-red-induction_P Parameter: Timepoint (hr) Value: 8
  misc_feature: MA Experiment 20001450 PARAMETER Experiment Name: At_Far-red-induction_P Parameter: Tissue Value: Whole Plant

SEQ ID NO: 31509 - protein, 419 aa, Arabidopsis thaliana; identical to SEQ ID NO: 27919
  peptide (1)..(419): Ceres Seq. ID no. 12335484
  misc_feature (194)..(419): Homolog of NCBI NO: 26190436 NR Description: barley B recombinant [Hordeum vulgare]
  misc_feature (114)..(165): Homolog of NCBI NO: 6006362 NR Description: Similar to Arabidopsis thaliana chromosome II BAC
  misc_feature (356)..(419): Homolog of NCBI NO: 6006362 NR Description: Similar to Arabidopsis thaliana chromosome II BAC
  misc_feature (78)..(183): Homolog of NCBI NO: 9759488 NR Description: gb|AAF18661.1~gene_id:MDH9.22~similar to unknown
  misc_feature (249)..(419): Homolog of NCBI NO: 18399638 NR Description: expressed protein
  misc_feature (303)..(390): Homolog of NCBI NO: 15234867 NR Description: putative protein; protein id: At4g38910.1
  misc_feature (77)..(171): Homolog of NCBI NO: 15234867 NR Description: putative protein; protein id: At4g38910.1
  misc_feature (142)..(419): Homolog of NCBI NO: 9759488 NR Description: gb|AAF18661.1~gene_id:MDH9.22~similar to unknown
  misc_feature (78)..(419): Homolog of NCBI NO: 18422219 NR Description: putative protein

SEQ ID NO: 31510 - protein, 342 aa, Arabidopsis thaliana; identical to SEQ ID NO: 27920
  peptide (1)..(342): Ceres Seq. ID no. 12335485
  misc_feature (117)..(342): Homolog of NCBI NO: 26190436 NR Description: barley B recombinant [Hordeum vulgare]
  misc_feature (37)..(88): Homolog of NCBI NO: 6006362 NR Description: Similar to Arabidopsis thaliana chromosome II BAC
  misc_feature (279)..(342): Homolog of NCBI NO: 6006362 NR Description: Similar to Arabidopsis thaliana chromosome II BAC
  misc_feature (1)..(106): Homolog of NCBI NO: 9759488 NR Description: gb|AAF18661.1~gene_id:MDH9.22~similar to unknown
  misc_feature (172)..(342): Homolog of NCBI NO: 18399638 NR Description: expressed protein
  misc_feature (226)..(313): Homolog of NCBI NO: 15234867 NR Description: putative protein; protein id: At4g38910.1
  misc_feature (1)..(94): Homolog of NCBI NO: 15234867 NR Description: putative protein; protein id: At4g38910.1
  misc_feature (65)..(342): Homolog of NCBI NO: 9759488 NR Description: gb|AAF18661.1~gene_id:MDH9.22~similar to unknown
  misc_feature (1)..(342): Homolog of NCBI NO: 18422219 NR Description: putative protein

SEQ ID NO: 31511 - protein, 321 aa, Arabidopsis thaliana; identical to SEQ ID NO: 27921
  peptide (1)..(321): Ceres Seq. ID no. 12335486
  misc_feature (96)..(321): Homolog of NCBI NO: 26190436 NR Description: barley B recombinant [Hordeum vulgare]
  misc_feature (16)..(67): Homolog of NCBI NO: 6006362 NR Description: Similar to Arabidopsis thaliana chromosome II BAC
  misc_feature (258)..(321): Homolog of NCBI NO: 6006362 NR Description: Similar to Arabidopsis thaliana chromosome II BAC
  misc_feature (1)..(85): Homolog of NCBI NO: 9759488 NR Description: gb|AAF18661.1~gene_id:MDH9.22~similar to unknown
  misc_feature (151)..(321): Homolog of NCBI NO: 18399638 NR Description: expressed protein
  misc_feature (205)..(292): Homolog of NCBI NO: 15234867 NR Description: putative protein; protein id: At4g38910.1
  misc_feature (1)..(73): Homolog of NCBI NO: 15234867 NR Description: putative protein; protein id: At4g38910.1
  misc_feature (44)..(321): Homolog of NCBI NO: 9759488 NR Description: gb|AAF18661.1~gene_id:MDH9.22~similar to unknown
  misc_feature (1)..(321): Homolog of NCBI NO: 18422219 NR Description: putative protein

SEQ ID NO: 31512 - DNA, 1757 bp, Arabidopsis thaliana; identical to SEQ ID NO: 27922
  misc_feature (1)..(1757): Ceres Seq. ID no. 12327245
  misc_feature: MA Experiment ID: 108434 Result: Up-regulated in Transcription
  misc_feature: MA Experiment 108434 PARAMETER Experiment Name: At_Root_Tips_cDNA_P Parameter: Tissue Value: Root Tips
  misc_feature: MA Experiment ID: 108461 Result: Up-regulated in Transcription
  misc_feature: MA Experiment 108461 PARAMETER Experiment Name: At_Germinating_Seeds_cDNA_P Parameter: Age (day) Value: 1 vs. 0
  misc_feature: MA Experiment 108461 PARAMETER Experiment Name: At_Germinating_Seeds_cDNA_P Parameter: Tissue Value: Germinating Seeds
  misc_feature: MA Experiment ID: 20000111 Result: Down-regulated in Transcription
  misc_feature: MA Experiment 20000111 PARAMETER Experiment Name: At_42deg_Heat_cDNA_P Parameter: Temperature (deg C) Value: 42 vs. 22
  misc_feature: MA Experiment 20000111 PARAMETER Experiment Name: At_42deg_Heat_cDNA_P Parameter: Timepoint (hr) Value: 6
  misc_feature: MA Experiment 20000111 PARAMETER Experiment Name: At_42deg_Heat_cDNA_P Parameter: Tissue Value: Aerial
  misc_feature: MA Experiment ID: 20000112 Result: Down-regulated in Transcription
  misc_feature: MA Experiment 20000112 PARAMETER Experiment Name: At_42deg_Heat_cDNA_P Parameter: Temperature (deg C) Value: 42 vs. 22
  misc_feature: MA Experiment 20000112 PARAMETER Experiment Name: At_42deg_Heat_cDNA_P Parameter: Timepoint (hr) Value: 2
  misc_feature: MA Experiment 20000112 PARAMETER Experiment Name: At_42deg_Heat_cDNA_P Parameter: Tissue Value: Aerial
  misc_feature: MA Experiment ID: 20000180 Result: Up-regulated in Transcription
  misc_feature: MA Experiment 20000180 PARAMETER Experiment Name: At_Germinating_Seeds_P Parameter: Age (hr) Value: 24 vs. 0
  misc_feature: MA Experiment 20000180 PARAMETER Experiment Name: At_Germinating_Seeds_P Parameter: Tissue Value: Germinating Seeds
  misc_feature: MA Experiment ID: 20000184 Result: Down-regulated in Transcription
  misc_feature: MA Experiment 20000184 PARAMETER Experiment Name: At_Shoots__P Parameter: Age (day) Value: 7
  misc_feature: MA Experiment 20000184 PARAMETER Experiment Name: At_Shoots__P Parameter: Tissue Value: Shoots vs. Whole Plant
  misc_feature: MA Experiment ID: 20000224 Result: Up-regulated in Transcription

SEQ ID NO: 31513 - protein, 491 aa, Arabidopsis thaliana; identical to SEQ ID NO: 27923
  peptide (1)..(491): Ceres Seq. ID no. 12327246
  misc_feature (44)..(311): Pfam Name: Protein kinase domain Pfam Description: Protein kinase domain
  misc_feature (43)..(365): Homolog of NCBI NO: 13592023 NR Description: 3-phosphoinositide dependent protein kinase-1
  misc_feature (390)..(486): Homolog of NCBI NO: 4505695 NR Description: 3-phosphoinositide dependent protein kinase-1;
  misc_feature (43)..(376): Homolog of NCBI NO: 4505695 NR Description: 3-phosphoinositide dependent protein kinase-1;
  misc_feature (34)..(486): Homolog of NCBI NO: 38524443 NR Description: phosphoinositide dependent kinase-1 [Asterina
  misc_feature (144)..(489): Homolog of NCBI NO: 5001830 NR Description: 3-phosphoinositide-dependent protein kinase-1
  misc_feature (4)..(489): Homolog of NCBI NO: 34908708 NR Description: putative 3-phosphoinositide-dependent protein
  misc_feature (4)..(491): Homolog of NCBI NO: 8567784 NR Description: 3-phosphoinositide-dependent protein kinase-1,
  misc_feature (1)..(491): Homolog of NCBI NO: 30681369 NR Description: 3-phosphoinositide-dependent protein kinase,
  misc_feature (4)..(491): Homolog of NCBI NO: 11357147 NR Description: 3-phosphoinositide-dependent protein kinase-1
  misc_feature (1)..(491): Homolog of NCBI NO: 18414583 NR Description: 3-phosphoinositide-dependent protein kinase-1 PDK1

SEQ ID NO: 31514 - protein, 488 aa, Arabidopsis thaliana; identical to SEQ ID NO: 27924
  peptide (1)..(488): Ceres Seq. ID no. 12327247
  misc_feature (41)..(308): Pfam Name: Protein kinase domain Pfam Description: Protein kinase domain
  misc_feature (40)..(362): Homolog of NCBI NO: 13592023 NR Description: 3-phosphoinositide dependent protein kinase-1
  misc_feature (387)..(483): Homolog of NCBI NO: 4505695 NR Description: 3-phosphoinositide dependent protein kinase-1;
  misc_feature (40)..(373): Homolog of NCBI NO: 4505695 NR Description: 3-phosphoinositide dependent protein kinase-1;
  misc_feature (31)..(483): Homolog of NCBI NO: 38524443 NR Description: phosphoinositide dependent kinase-1 [Asterina
  misc_feature (141)..(486): Homolog of NCBI NO: 5001830 NR Description: 3-phosphoinositide-dependent protein kinase-1
  misc_feature (1)..(486): Homolog of NCBI NO: 34908708 NR Description: putative 3-phosphoinositide-dependent protein
  misc_feature (1)..(488): Homolog of NCBI NO: 8567784 NR Description: 3-phosphoinositide-dependent protein kinase-1,
  misc_feature (1)..(488): Homolog of NCBI NO: 30681369 NR Description: 3-phosphoinositide-dependent protein kinase,
  misc_feature (1)..(488): Homolog of NCBI NO: 11357147 NR Description: 3-phosphoinositide-dependent protein kinase-1
  misc_feature (1)..(488): Homolog of NCBI NO: 18414583 NR Description: 3-phosphoinositide-dependent protein kinase-1 PDK1

SEQ ID NO: 31515 - protein, 417 aa, Arabidopsis thaliana; identical to SEQ ID NO: 27925
  peptide (1)..(417): Ceres Seq. ID no. 12327248
  misc_feature (1)..(237): Pfam Name: Protein kinase domain Pfam Description: Protein kinase domain
  misc_feature (1)..(291): Homolog of NCBI NO: 13592023 NR Description: 3-phosphoinositide dependent protein kinase-1
  misc_feature (316)..(412): Homolog of NCBI NO: 4505695 NR Description: 3-phosphoinositide dependent protein kinase-1;
  misc_feature (1)..(302): Homolog of NCBI NO: 4505695 NR Description: 3-phosphoinositide dependent protein kinase-1;
  misc_feature (1)..(412): Homolog of NCBI NO: 38524443 NR Description: phosphoinositide dependent kinase-1 [Asterina
  misc_feature (70)..(415): Homolog of NCBI NO: 5001830 NR Description: 3-phosphoinositide-dependent protein kinase-1
  misc_feature (1)..(415): Homolog of NCBI NO: 34908708 NR Description: putative 3-phosphoinositide-dependent protein
  misc_feature (1)..(417): Homolog of NCBI NO: 8567784 NR Description: 3-phosphoinositide-dependent protein kinase-1,
  misc_feature (1)..(417): Homolog of NCBI NO: 30681369 NR Description: 3-phosphoinositide-dependent protein kinase,
  misc_feature (1)..(417): Homolog of NCBI NO: 11357147 NR Description: 3-phosphoinositide-dependent protein kinase-1
  misc_feature (1)..(417): Homolog of NCBI NO: 18414583 NR Description: 3-phosphoinositide-dependent protein kinase-1 PDK1

SEQ ID NO: 31516 - DNA, 1495 bp, Arabidopsis thaliana; identical to SEQ ID NO: 27926
  misc_feature (1)..(1495): Ceres Seq. ID no. 12335145
  misc_feature: MA Experiment ID: 20000496 Result: Down-regulated in Transcription
  misc_feature: MA Experiment 20000496 PARAMETER Experiment Name: At_Guard_Cells_P Parameter: Harvest Date Value: 7/19/2002
  misc_feature: MA Experiment 20000496 PARAMETER Experiment Name: At_Guard_Cells_P Parameter: Organism Value: Canola
  misc_feature: MA Experiment 20000496 PARAMETER Experiment Name: At_Guard_Cells_P Parameter: Tissue Value: Guard Cells vs. Leaves

SEQ ID NO: 31517 - protein, 224 aa, Arabidopsis thaliana; identical to SEQ ID NO: 27927
  peptide (1)..(224): Ceres Seq. ID no. 12335146
  misc_feature (1)..(221): Pfam Name: NPL4 family Pfam Description: NPL4 family
  misc_feature (86)..(140): Homolog of NCBI NO: 34905848 NR Description: P0483G10.28 [Oryza sativa (japonica
  misc_feature (1)..(221): Homolog of NCBI NO: 34914854 NR Description: P0416G11.10 [Oryza sativa (japonica
  misc_feature (1)..(223): Homolog of NCBI NO: 15229360 NR Description: putative protein
  misc_feature (1)..(224): Homolog of NCBI NO: 18407495 NR Description: expressed protein

SEQ ID NO: 31518 - protein, 210 aa, Arabidopsis thaliana; identical to SEQ ID NO: 27928
  peptide (1)..(210): Ceres Seq. ID no. 12335147
  misc_feature (1)..(207): Pfam Name: NPL4 family Pfam Description: NPL4 family
  misc_feature (72)..(126): Homolog of NCBI NO: 34905848 NR Description: P0483G10.28 [Oryza sativa (japonica
  misc_feature (1)..(207): Homolog of NCBI NO: 34914854 NR Description: P0416G11.10 [Oryza sativa (japonica
  misc_feature (1)..(209): Homolog of NCBI NO: 15229360 NR Description: putative protein
  misc_feature (1)..(210): Homolog of NCBI NO: 18407495 NR Description: expressed protein

SEQ ID NO: 31519 - protein, 206 aa, Arabidopsis thaliana; identical to SEQ ID NO: 27929
  peptide (1)..(206): Ceres Seq. ID no. 12335148
  misc_feature (1)..(203): Pfam Name: NPL4 family Pfam Description: NPL4 family
  misc_feature (68)..(122): Homolog of NCBI NO: 34905848 NR Description: P0483G10.28 [Oryza sativa (japonica
  misc_feature (1)..(203): Homolog of NCBI NO: 34914854 NR Description: P0416G11.10 [Oryza sativa (japonica
  misc_feature (1)..(205): Homolog of NCBI NO: 15229360 NR Description: putative protein
  misc_feature (1)..(206): Homolog of NCBI NO: 18407495 NR Description: expressed protein

SEQ ID NO: 31520 - DNA, 1150 bp, Arabidopsis thaliana; identical to SEQ ID NO: 27930
  misc_feature (1)..(1150): Ceres Seq. ID no. 13491427
  misc_feature: MA Experiment ID: 20000180 Result: Up-regulated in Transcription
  misc_feature: MA Experiment 20000180 PARAMETER Experiment Name: At_Germinating_Seeds_P Parameter: Age (hr) Value: 24 vs. 0
  misc_feature: MA Experiment 20000180 PARAMETER Experiment Name: At_Germinating_Seeds_P Parameter: Tissue Value: Germinating Seeds
  misc_feature: MA Experiment ID: 20000185 Result: Down-regulated in Transcription
  misc_feature: MA Experiment 20000185 PARAMETER Experiment Name: At_Roots__P Parameter: Age (day) Value: 7 vs. 21
  misc_feature: MA Experiment 20000185 PARAMETER Experiment Name: At_Roots__P Parameter: Organism Value: A. thaliana
  misc_feature: MA Experiment 20000185 PARAMETER Experiment Name: At_Roots__P Parameter: Tissue Value: Roots vs. Whole Plant
  misc_feature: MA Experiment ID: 20000234 Result: Up-regulated in Transcription
  misc_feature: MA Experiment 20000234 PARAMETER Experiment Name: At_Siliques_P Parameter: Age (day) Value: 21
  misc_feature: MA Experiment 20000234 PARAMETER Experiment Name: At_Siliques_P Parameter: Organism Value: A. thaliana
  misc_feature: MA Experiment 20000234 PARAMETER Experiment Name: At_Siliques_P Parameter: Plant Line Value: WS
  misc_feature: MA Experiment 20000234 PARAMETER Experiment Name: At_Siliques_P Parameter: Tissue Value: Less Than 5mm Siliques vs. Whole Plant
  misc_feature: MA Experiment ID: 20000265 Result: Up-regulated in Transcription
  misc_feature: MA Experiment 20000265 PARAMETER Experiment Name: At_Open_Flower_P Parameter: Age (day) Value: 21
  misc_feature: MA Experiment 20000265 PARAMETER Experiment Name: At_Open_Flower_P Parameter: Plant Line Value: WS
  misc_feature: MA Experiment 20000265 PARAMETER Experiment Name: At_Open_Flower_P Parameter: Tissue Value: Closed Flower vs. Whole Plant
  misc_feature: MA Experiment ID: 20000286 Result: Up-regulated in Transcription
  misc_feature: MA Experiment 20000286 PARAMETER Experiment Name: At_Open_Flower_P Parameter: Age (day) Value: 21
  misc_feature: MA Experiment 20000286 PARAMETER Experiment Name: At_Open_Flower_P Parameter: Plant Line Value: WS
  misc_feature: MA Experiment 20000286 PARAMETER Experiment Name: At_Open_Flower_P Parameter: Tissue Value: Half Open vs. Whole Plant
  misc_feature: MA Experiment ID: 20000437 Result: Down-regulated in Transcription
  misc_feature: MA Experiment 20000437 PARAMETER Experiment Name: At_Drought_P Parameter: Age (day) Value: 8
  misc_feature: MA Experiment 20000437 PARAMETER Experiment Name: At_Drought_P Parameter: Organism Value: A. thaliana
  misc_feature: MA Experiment 20000437 PARAMETER Experiment Name: At_Drought_P Parameter: Plant Line Value: WS
  misc_feature: MA Experiment 20000437 PARAMETER Experiment Name: At_Drought_P Parameter: Timepoint (hr) Value: 24
  misc_feature: MA Experiment 20000437 PARAMETER Experiment Name: At_Drought_P Parameter: Tissue Value: Whole Plant
  misc_feature: MA Experiment 20000437 PARAMETER Experiment Name: At_Drought_P Parameter: Treatment Value: Drought vs. No Drought
  misc_feature: MA Experiment ID: 20000439 Result: Down-regulated in Transcription
  misc_feature: MA Experiment 20000439 PARAMETER Experiment Name: At_Roots__P Parameter: Age (day) Value: 14 vs. 21
  misc_feature: MA Experiment 20000439 PARAMETER Experiment Name: At_Roots__P Parameter: Organism Value: A. thaliana
  misc_feature: MA Experiment 20000439 PARAMETER Experiment Name: At_Roots__P Parameter: Tissue Value: Roots vs. Whole Plant
  misc_feature: MA Experiment ID: 20000495 Result: Up-regulated in Transcription
  misc_feature: MA Experiment 20000495 PARAMETER Experiment Name: At_Guard_Cells_P Parameter: Harvest Date Value: 8/2/2002
  misc_feature: MA Experiment 20000495 PARAMETER Experiment Name: At_Guard_Cells_P Parameter: Organism Value: A. thaliana
  misc_feature: MA Experiment 20000495 PARAMETER Experiment Name: At_Guard_Cells_P Parameter: Tissue Value: Guard Cells vs. Leaves
  misc_feature: MA Experiment ID: 20001248 Result: Down-regulated in Transcription
  misc_feature: MA Experiment 20001248 PARAMETER Experiment Name: At_Far-red-induction_P Parameter: Age (day) Value: 7
  misc_feature: MA Experiment 20001248 PARAMETER Experiment Name: At_Far-red-induction_P Parameter: Light Value: Far-red vs. White
  misc_feature: MA Experiment 20001248 PARAMETER Experiment Name: At_Far-red-induction_P Parameter: Organism Value: A. thaliana
  misc_feature: MA Experiment 20001248 PARAMETER Experiment Name: At_Far-red-induction_P Parameter: Plant Line Value: Columbia
  misc_feature: MA Experiment 20001248 PARAMETER Experiment Name: At_Far-red-induction_P Parameter: Timepoint (hr) Value: 4
  misc_feature: MA Experiment 20001248 PARAMETER Experiment Name: At_Far-red-induction_P Parameter: Tissue Value: Whole Plant
  misc_feature: MA Experiment ID: 20001555 Result: Down-regulated in Transcription
  misc_feature: MA Experiment 20001555 PARAMETER Experiment Name: At_Drought_Soil_Dry_P Parameter: Age (day) Value: 24
  misc_feature: MA Experiment 20001555 PARAMETER Experiment Name: At_Drought_Soil_Dry_P Parameter: Organism Value: A. thaliana
  misc_feature: MA Experiment 20001555 PARAMETER Experiment Name: At_Drought_Soil_Dry_P Parameter: Plant Line Value: WS
  misc_feature: MA Experiment 20001555 PARAMETER Experiment Name: At_Drought_Soil_Dry_P Parameter: Post Timepoint (hr) Value: None
  misc_feature: MA Experiment 20001555 PARAMETER Experiment Name: At_Drought_Soil_Dry_P Parameter: Post-Treatment Value: None
  misc_feature: MA Experiment 20001555 PARAMETER Experiment Name: At_Drought_Soil_Dry_P Parameter: Timepoint (day) Value: 10
  misc_feature: MA Experiment 20001555 PARAMETER Experiment Name: At_Drought_Soil_Dry_P Parameter: Treatment Value: Drought vs. No Drought

SEQ ID NO: 31521 - protein, 234 aa, Arabidopsis thaliana; identical to SEQ ID NO: 27931
  peptide (1)..(234): Ceres Seq. ID no. 13491428
  misc_feature (54)..(217): Pfam Name: alpha/beta hydrolase fold Pfam Description: alpha/beta hydrolase fold
  misc_feature (1)..(217): Homolog of NCBI NO: 15230018 NR Description: epoxide hydrolase, putative [Arabidopsis

SEQ ID NO: 31522 - protein, 227 aa, Arabidopsis thaliana; identical to SEQ ID NO: 27932
  peptide (1)..(227): Ceres Seq. ID no. 13491429
  misc_feature (47)..(210): Pfam Name: alpha/beta hydrolase fold Pfam Description: alpha/beta hydrolase fold
  misc_feature (1)..(210): Homolog of NCBI NO: 15230018 NR Description: epoxide hydrolase, putative [Arabidopsis

SEQ ID NO: 31523 - protein, 219 aa, Arabidopsis thaliana; identical to SEQ ID NO: 27933
  peptide (1)..(219): Ceres Seq. ID no. 13491430
  misc_feature (39)..(202): Pfam Name: alpha/beta hydrolase fold Pfam Description: alpha/beta hydrolase fold
  misc_feature (1)..(202): Homolog of NCBI NO: 15230018 NR Description: epoxide hydrolase, putative [Arabidopsis

SEQ ID NO: 31524 - DNA, 1266 bp, Arabidopsis thaliana; identical to SEQ ID NO: 27934
  misc_feature (1)..(1266): Ceres Seq. ID no. 13490700
  misc_feature: MA Experiment ID: 108434 Result: Down-regulated in Transcription
  misc_feature: MA Experiment 108434 PARAMETER Experiment Name: At_Root_Tips_cDNA_P Parameter: Tissue Value: Root Tips
  misc_feature: MA Experiment ID: 108488 Result: Up-regulated in Transcription
  misc_feature: MA Experiment ID: 108577 Result: Down-regulated in Transcription
  misc_feature: MA Experiment 108577 PARAMETER Experiment Name: At_42deg_Heat_cDNA_P Parameter: Temperature (deg C) Value: 42 vs. 22
  misc_feature: MA Experiment 108577 PARAMETER Experiment Name: At_42deg_Heat_cDNA_P Parameter: Timepoint (hr) Value: 6
  misc_feature: MA Experiment 108577 PARAMETER Experiment Name: At_42deg_Heat_cDNA_P Parameter: Tissue Value: Aerial
  misc_feature: MA Experiment ID: 108595 Result: Down-regulated in Transcription
  misc_feature: MA Experiment 108595 PARAMETER Experiment Name: At_Ler-pi_Ovule_cDNA_P Parameter: Plant Line Value: null
  misc_feature: MA Experiment ID: 20000185 Result: Down-regulated in Transcription
  misc_feature: MA Experiment 20000185 PARAMETER Experiment Name: At_Roots__P Parameter: Age (day) Value: 7 vs. 21
  misc_feature: MA Experiment 20000185 PARAMETER Experiment Name: At_Roots__P Parameter: Organism Value: A. thaliana
  misc_feature: MA Experiment 20000185 PARAMETER Experiment Name: At_Roots__P Parameter: Tissue Value: Roots vs. Whole Plant
  misc_feature: MA Experiment ID: 20000439 Result: Down-regulated in Transcription
  misc_feature: MA Experiment 20000439 PARAMETER Experiment Name: At_Roots__P Parameter: Age (day) Value: 14 vs. 21
  misc_feature: MA Experiment 20000439 PARAMETER Experiment Name: At_Roots__P Parameter: Organism Value: A. thaliana
  misc_feature: MA Experiment 20000439 PARAMETER Experiment Name: At_Roots__P Parameter: Tissue Value: Roots vs. Whole Plant

SEQ ID NO: 31525 - protein, 362 aa, Arabidopsis thaliana; identical to SEQ ID NO: 27935
  peptide (1)..(362): Ceres Seq. ID no. 13490701
  misc_feature (29)..(351): Pfam Name: Protein of unknown function (DUF760) Pfam Description: Protein of unknown function (DUF760)
  misc_feature (57)..(255): Homolog of NCBI NO: 32489097 NR Description: OSJNBa0093F12.3 [Oryza sativa (japonica
  misc_feature (268)..(346): Homolog of NCBI NO: 15221185 NR Description: expressed protein [Arabidopsis thaliana]
  misc_feature (44)..(255): Homolog of NCBI NO: 15221185 NR Description: expressed protein [Arabidopsis thaliana]
  misc_feature (268)..(346): Homolog of NCBI NO: 18401645 NR Description: expressed protein [Arabidopsis thaliana]
  misc_feature (268)..(346): Homolog of NCBI NO: 17064820 NR Description: Unknown protein [Arabidopsis thaliana]
  misc_feature (52)..(255): Homolog of NCBI NO: 18401645 NR Description: expressed protein [Arabidopsis thaliana]
  misc_feature (52)..(255): Homolog of NCBI NO: 17064820 NR Description: Unknown protein [Arabidopsis thaliana]
  misc_feature (267)..(357): Homolog of NCBI NO: 18397912 NR Description: expressed protein [Arabidopsis thaliana]
  misc_feature (19)..(264): Homolog of NCBI NO: 18397912 NR Description: expressed protein [Arabidopsis thaliana]
  misc_feature (19)..(362): Homolog of NCBI NO: 15239021 NR Description: expressed protein [Arabidopsis thaliana]

SEQ ID NO: 31526 - protein, 344 aa, Arabidopsis thaliana; identical to SEQ ID NO: 27936
  peptide (1)..(344): Ceres Seq. ID no. 13490702
  misc_feature (11)..(333): Pfam Name: Protein of unknown function (DUF760) Pfam Description: Protein of unknown function (DUF760)
  misc_feature (39)..(237): Homolog of NCBI NO: 32489097 NR Description: OSJNBa0093F12.3 [Oryza sativa (japonica
  misc_feature (250)..(328): Homolog of NCBI NO: 15221185 NR Description: expressed protein [Arabidopsis thaliana]
  misc_feature (26)..(237): Homolog of NCBI NO: 15221185 NR Description: expressed protein [Arabidopsis thaliana]
  misc_feature (250)..(328): Homolog of NCBI NO: 18401645 NR Description: expressed protein [Arabidopsis thaliana]
  misc_feature (250)..(328): Homolog of NCBI NO: 17064820 NR Description: Unknown protein [Arabidopsis thaliana]
  misc_feature (34)..(237): Homolog of NCBI NO: 18401645 NR Description: expressed protein [Arabidopsis thaliana]
  misc_feature (34)..(237): Homolog of NCBI NO: 17064820 NR Description: Unknown protein [Arabidopsis thaliana]
  misc_feature (249)..(339): Homolog of NCBI NO: 18397912 NR Description: expressed protein [Arabidopsis thaliana]
  misc_feature (1)..(246): Homolog of NCBI NO: 18397912 NR Description: expressed protein [Arabidopsis thaliana]
  misc_feature (1)..(344): Homolog of NCBI NO: 15239021 NR Description: expressed protein [Arabidopsis thaliana]

SEQ ID NO: 31527 - protein, 243 aa, Arabidopsis thaliana; identical to SEQ ID NO: 27937
  peptide (1)..(243): Ceres Seq. ID no. 13490703
  misc_feature (1)..(232): Pfam Name: Protein of unknown function (DUF760) Pfam Description: Protein of unknown function (DUF760)
  misc_feature (1)..(136): Homolog of NCBI NO: 32489097 NR Description: OSJNBa0093F12.3 [Oryza sativa (japonica
  misc_feature (149)..(227): Homolog of NCBI NO: 15221185 NR Description: expressed protein [Arabidopsis thaliana]
  misc_feature (1)..(136): Homolog of NCBI NO: 15221185 NR Description: expressed protein [Arabidopsis thaliana]
  misc_feature (149)..(227): Homolog of NCBI NO: 18401645 NR Description: expressed protein [Arabidopsis thaliana]
  misc_feature (149)..(227): Homolog of NCBI NO: 17064820 NR Description: Unknown protein [Arabidopsis thaliana]
  misc_feature (1)..(136): Homolog of NCBI NO: 18401645 NR Description: expressed protein [Arabidopsis thaliana]
  misc_feature (1)..(136): Homolog of NCBI NO: 17064820 NR Description: Unknown protein [Arabidopsis thaliana]
  misc_feature (148)..(238): Homolog of NCBI NO: 18397912 NR Description: expressed protein [Arabidopsis thaliana]
  misc_feature (1)..(145): Homolog of NCBI NO: 18397912 NR Description: expressed protein [Arabidopsis thaliana]
  misc_feature (1)..(243): Homolog of NCBI NO: 15239021 NR Description: expressed protein [Arabidopsis thaliana]

SEQ ID NO: 31528 - DNA, 1803 bp, Arabidopsis thaliana; identical to SEQ ID NO: 27938
  misc_feature (1)..(1803): Ceres Seq. ID no. 12335487
  misc_feature: MA Experiment ID: 108572 Result: Up-regulated in Transcription
  misc_feature: MA Experiment 108572 PARAMETER Experiment Name: At_Drought_cDNA_P Parameter: Timepoint (hr) Value: 1
  misc_feature: MA Experiment 108572 PARAMETER Experiment Name: At_Drought_cDNA_P Parameter: Tissue Value: Aerial
  misc_feature: MA Experiment 108572 PARAMETER Experiment Name: At_Drought_cDNA_P Parameter: Treatment Value: Drought vs. No Drought
  misc_feature: MA Experiment ID: 108573 Result: Up-regulated in Transcription
  misc_feature: MA Experiment 108573 PARAMETER Experiment Name: At_Drought_cDNA_P Parameter: Timepoint (hr) Value: 6
  misc_feature: MA Experiment 108573 PARAMETER Experiment Name: At_Drought_cDNA_P Parameter: Tissue Value: Aerial
  misc_feature: MA Experiment 108573 PARAMETER Experiment Name: At_Drought_cDNA_P Parameter: Treatment Value: Drought vs. No Drought
  misc_feature: MA Experiment ID: 108577 Result: Down-regulated in Transcription
  misc_feature: MA Experiment 108577 PARAMETER Experiment Name: At_42deg_Heat_cDNA_P Parameter: Temperature (deg C) Value: 42 vs. 22
  misc_feature: MA Experiment 108577 PARAMETER Experiment Name: At_42deg_Heat_cDNA_P Parameter: Timepoint (hr) Value: 6
  misc_feature: MA Experiment 108577 PARAMETER Experiment Name: At_42deg_Heat_cDNA_P Parameter: Tissue Value: Aerial
  misc_feature: MA Experiment ID: 20000179 Result: Up-regulated in Transcription
  misc_feature: MA Experiment 20000179 PARAMETER Experiment Name: At_Germinating_Seeds_P Parameter: Age (hr) Value: 6 vs. 0
  misc_feature: MA Experiment 20000179 PARAMETER Experiment Name: At_Germinating_Seeds_P Parameter: Tissue Value: Germinating Seeds
  misc_feature: MA Experiment ID: 20000180 Result: Up-regulated in Transcription
  misc_feature: MA Experiment 20000180 PARAMETER Experiment Name: At_Germinating_Seeds_P Parameter: Age (hr) Value: 24 vs. 0
  misc_feature: MA Experiment 20000180 PARAMETER Experiment Name: At_Germinating_Seeds_P Parameter: Tissue Value: Germinating Seeds
  misc_feature: MA Experiment ID: 20000185 Result: Down-regulated in Transcription
  misc_feature: MA Experiment 20000185 PARAMETER Experiment Name: At_Roots__P Parameter: Age (day) Value: 7 vs. 21
  misc_feature: MA Experiment 20000185 PARAMETER Experiment Name: At_Roots__P Parameter: Organism Value: A. thaliana
  misc_feature: MA Experiment 20000185 PARAMETER Experiment Name: At_Roots__P Parameter: Tissue Value: Roots vs. Whole Plant
  misc_feature: MA Experiment ID: 20000227 Result: Down-regulated in Transcription
  misc_feature: MA Experiment 20000227 PARAMETER Experiment Name: At_Root-Tips-vs-Tops_P Parameter: Tissue Value: Root Tips vs. Root Tops
  misc_feature: MA Experiment ID: 20000437 Result: Up-regulated in Transcription
  misc_feature: MA Experiment 20000437 PARAMETER Experiment Name: At_Drought_P Parameter: Age (day) Value: 8
  misc_feature: MA Experiment 20000437 PARAMETER Experiment Name: At_Drought_P Parameter: Organism Value: A. thaliana
  misc_feature: MA Experiment 20000437 PARAMETER Experiment Name: At_Drought_P Parameter: Plant Line Value: WS
  misc_feature: MA Experiment 20000437 PARAMETER Experiment Name: At_Drought_P Parameter: Timepoint (hr) Value: 24
  misc_feature: MA Experiment 20000437 PARAMETER Experiment Name: At_Drought_P Parameter: Tissue Value: Whole Plant
  misc_feature: MA Experiment 20000437 PARAMETER Experiment Name: At_Drought_P Parameter: Treatment Value: Drought vs. No Drought
  misc_feature: MA Experiment ID: 20000439 Result: Down-regulated in Transcription
  misc_feature: MA Experiment 20000439 PARAMETER Experiment Name: At_Roots__P Parameter: Age (day) Value: 14 vs. 21
  misc_feature: MA Experiment 20000439 PARAMETER Experiment Name: At_Roots__P Parameter: Organism Value: A. thaliana
  misc_feature: MA Experiment 20000439 PARAMETER Experiment Name: At_Roots__P Parameter: Tissue Value: Roots vs. Whole Plant
  misc_feature: MA Experiment ID: 20000451 Result: Down-regulated in Transcription
  misc_feature: MA Experiment 20000451 PARAMETER Experiment Name: At_CS6879_Shoots-Roots_P Parameter: Age (day) Value: 14
  misc_feature: MA Experiment 20000451 PARAMETER Experiment Name: At_CS6879_Shoots-Roots_P Parameter: Organism Value: A. thaliana
  misc_feature: MA Experiment 20000451 PARAMETER Experiment Name: At_CS6879_Shoots-Roots_P Parameter: Plant Line Value: CS6879 vs. WS
  misc_feature: MA Experiment 20000451 PARAMETER Experiment Name: At_CS6879_Shoots-Roots_P Parameter: Tissue Value: Roots
  misc_feature: MA Experiment ID: 20000496 Result: Up-regulated in Transcription
  misc_feature: MA Experiment 20000496 PARAMETER Experiment Name: At_Guard_Cells_P Parameter: Harvest Date Value: 7/19/2002
  misc_feature: MA Experiment 20000496 PARAMETER Experiment Name: At_Guard_Cells_P Parameter: Organism Value: Canola
  misc_feature: MA Experiment 20000496 PARAMETER Experiment Name: At_Guard_Cells_P Parameter: Tissue Value: Guard Cells vs. Leaves
  misc_feature: MA Experiment ID: 20001558 Result: Down-regulated in Transcription
  misc_feature: MA Experiment 20001558 PARAMETER Experiment Name: At_Drought_Soil_Dry_P Parameter: Age (day) Value: 27
  misc_feature: MA Experiment 20001558 PARAMETER Experiment Name: At_Drought_Soil_Dry_P Parameter: Organism Value: A. thaliana
  misc_feature: MA Experiment 20001558 PARAMETER Experiment Name: At_Drought_Soil_Dry_P Parameter: Plant Line Value: WS
  misc_feature: MA Experiment 20001558 PARAMETER Experiment Name: At_Drought_Soil_Dry_P Parameter: Post Timepoint (hr) Value: 6
  misc_feature: MA Experiment 20001558 PARAMETER Experiment Name: At_Drought_Soil_Dry_P Parameter: Post-Treatment Value: Re-Water vs. No Drought
  misc_feature: MA Experiment 20001558 PARAMETER Experiment Name: At_Drought_Soil_Dry_P Parameter: Timepoint (day) Value: 13
  misc_feature: MA Experiment 20001558 PARAMETER Experiment Name: At_Drought_Soil_Dry_P Parameter: Treatment Value: Drought vs. No Drought
  misc_feature: MA Experiment ID: 20001560 Result: Down-regulated in Transcription
  misc_feature: MA Experiment 20001560 PARAMETER Experiment Name: At_Drought_Soil_Dry_P Parameter: Age (day) Value: 28
  misc_feature: MA Experiment 20001560 PARAMETER Experiment Name: At_Drought_Soil_Dry_P Parameter: Organism Value: A. thaliana
  misc_feature: MA Experiment 20001560 PARAMETER Experiment Name: At_Drought_Soil_Dry_P Parameter: Plant Line Value: WS
  misc_feature: MA Experiment 20001560 PARAMETER Experiment Name: At_Drought_Soil_Dry_P Parameter: Post Timepoint (hr) Value: None
  misc_feature: MA Experiment 20001560 PARAMETER Experiment Name: At_Drought_Soil_Dry_P Parameter: Post-Treatment Value: None
  misc_feature: MA Experiment 20001560 PARAMETER Experiment Name: At_Drought_Soil_Dry_P Parameter: Timepoint (day) Value: 14
  misc_feature: MA Experiment 20001560 PARAMETER Experiment Name: At_Drought_Soil_Dry_P Parameter: Treatment Value: Drought vs. No Drought

SEQ ID NO: 31529 - protein, 539 aa, Arabidopsis thaliana; identical to SEQ ID NO: 27939
  peptide (1)..(539): Ceres Seq. ID no. 12335488
  misc_feature (59)..(499): Pfam Name: Sugar (and other) transporter Pfam Description: Sugar (and other) transporter
  misc_feature (56)..(539): Homolog of NCBI NO: 542020 NR Description: sucrose transport protein - castor bean
  misc_feature (35)..(523): Homolog of NCBI NO: 15225986 NR Description: putative sucrose-proton symporter; protein id:
  misc_feature (34)..(536): Homolog of NCBI NO: 12057172 NR Description: sucrose trasporter [Arabidopsis thaliana]
  misc_feature (34)..(539): Homolog of NCBI NO: 15217602 NR Description: putative sucrose transport protein; protein id:
  misc_feature (28)..(539): Homolog of NCBI NO: 15217601 NR Description: sucrose transport protein SUC1
  misc_feature (34)..(539): Homolog of NCBI NO: 18091779 NR Description: sucrose transporter SUC1 [Brassica oleracea]
  misc_feature (33)..(539): Homolog of NCBI NO: 18091781 NR Description: sucrose transporter SUC2 [Brassica oleracea]
  misc_feature (28)..(539): Homolog of NCBI NO: 20147213 NR Description: At1g22710/T22J18_12 [Arabidopsis thaliana]
  misc_feature (28)..(539): Homolog of NCBI NO: 481131 NR Description: sucrose transport protein SUC2 - Arabidopsis
  misc_feature (28)..(539): Homolog of NCBI NO: 15219938 NR Description: putative sucrose transport protein, SUC2

SEQ ID NO: 31530 - protein, 512 aa, Arabidopsis thaliana; identical to SEQ ID NO: 24986
  peptide (1)..(512): Ceres Seq. ID no. 12335489
  misc_feature (32)..(472): Pfam Name: Sugar (and other) transporter Pfam Description: Sugar (and other) transporter
  misc_feature (29)..(512): Homolog of NCBI NO: 542020 NR Description: sucrose transport protein - castor bean
  misc_feature (8)..(496): Homolog of NCBI NO: 15225986 NR Description: putative sucrose-proton symporter; protein id:
  misc_feature (7)..(509): Homolog of NCBI NO: 12057172 NR Description: sucrose trasporter [Arabidopsis thaliana]
  misc_feature (7)..(512): Homolog of NCBI NO: 15217602 NR Description: putative sucrose transport protein; protein id:
  misc_feature (1)..(512): Homolog of NCBI NO: 15217601 NR Description: sucrose transport protein SUC1
  misc_feature (7)..(512): Homolog of NCBI NO: 18091779 NR Description: sucrose transporter SUC1 [Brassica oleracea]
  misc_feature (6)..(512): Homolog of NCBI NO: 18091781 NR Description: sucrose transporter SUC2 [Brassica oleracea]
  misc_feature (1)..(512): Homolog of NCBI NO: 20147213 NR Description: At1g22710/T22J18_12 [Arabidopsis thaliana]
  misc_feature (1)..(512): Homolog of NCBI NO: 481131 NR Description: sucrose transport protein SUC2 - Arabidopsis
  misc_feature (1)..(512): Homolog of NCBI NO: 15219938 NR Description: putative sucrose transport protein, SUC2

SEQ ID NO: 31531 - protein, 507 aa, Arabidopsis thaliana; identical to SEQ ID NO: 24987
  peptide (1)..(507): Ceres Seq. ID no. 12335490
  misc_feature (27)..(467): Pfam Name: Sugar (and other) transporter Pfam Description: Sugar (and other) transporter
  misc_feature (24)..(507): Homolog of NCBI NO: 542020 NR Description: sucrose transport protein - castor bean
  misc_feature (3)..(491): Homolog of NCBI NO: 15225986 NR Description: putative sucrose-proton symporter; protein id:
  misc_feature (2)..(504): Homolog of NCBI NO: 12057172 NR Description: sucrose trasporter [Arabidopsis thaliana]
  misc_feature (2)..(507): Homolog of NCBI NO: 15217602 NR Description: putative sucrose transport protein; protein id:
  misc_feature (1)..(507): Homolog of NCBI NO: 15217601 NR Description: sucrose transport protein SUC1
  misc_feature (2)..(507): Homolog of NCBI NO: 18091779 NR Description: sucrose transporter SUC1 [Brassica oleracea]
  misc_feature (1)..(507): Homolog of NCBI NO: 18091781 NR Description: sucrose transporter SUC2 [Brassica oleracea]
  misc_feature (1)..(507): Homolog of NCBI NO: 20147213 NR Description: At1g22710/T22J18_12 [Arabidopsis thaliana]
  misc_feature (1)..(507): Homolog of NCBI NO: 481131 NR Description: sucrose transport protein SUC2 - Arabidopsis
  misc_feature (1)..(507): Homolog of NCBI NO: 15219938 NR Description: putative sucrose transport protein, SUC2

SEQ ID NO: 31532 - DNA, 1323 bp, Arabidopsis thaliana; identical to SEQ ID NO: 27942
  misc_feature (1)..(1323): Ceres Seq. ID no. 12335491
  misc_feature: MA Experiment ID: 108461 Result: Down-regulated in Transcription
  misc_feature: MA Experiment 108461 PARAMETER Experiment Name: At_Germinating_Seeds_cDNA_P Parameter: Age (day) Value: 1 vs. 0
  misc_feature: MA Experiment 108461 PARAMETER Experiment Name: At_Germinating_Seeds_cDNA_P Parameter: Tissue Value: Germinating Seeds
  misc_feature: MA Experiment ID: 108473 Result: Down-regulated in Transcription
  misc_feature: MA Experiment 108473 PARAMETER Experiment Name: At_Drought_Flowers_cDNA_P Parameter: Timepoint (hr) Value: 7 d
  misc_feature: MA Experiment 108473 PARAMETER Experiment Name: At_Drought_Flowers_cDNA_P Parameter: Tissue Value: Flower
  misc_feature: MA Experiment 108473 PARAMETER Experiment Name: At_Drought_Flowers_cDNA_P Parameter: Treatment Value: Drought vs. No Drought
  misc_feature: MA Experiment ID: 108501 Result: Down-regulated in Transcription
  misc_feature: MA Experiment 108501 PARAMETER Experiment Name: At_ap2_floral_buds_cDNA_P Parameter: Plant Line Value: ap2 (Ler.)
  misc_feature: MA Experiment 108501 PARAMETER Experiment Name: At_ap2_floral_buds_cDNA_P Parameter: Tissue Value: Closed Flower
  misc_feature: MA Experiment ID: 108574 Result: Up-regulated in Transcription
  misc_feature: MA Experiment 108574 PARAMETER Experiment Name: At_Wounding__cDNA_P Parameter: Timepoint (hr) Value: 1
  misc_feature: MA Experiment 108574 PARAMETER Experiment Name: At_Wounding__cDNA_P Parameter: Tissue Value: Aerial
  misc_feature: MA Experiment 108574 PARAMETER Experiment Name: At_Wounding__cDNA_P Parameter: Treatment Value: Wounding vs. No Wounding
  misc_feature: MA Experiment ID: 108667 Result: Up-regulated in Transcription
  misc_feature: MA Experiment 108667 PARAMETER Experiment Name: At_2mM_SA_cDNA_P Parameter: Plant Line Value: WS
  misc_feature: MA Experiment 108667 PARAMETER Experiment Name: At_2mM_SA_cDNA_P Parameter: Timepoint (hr) Value: 1
  misc_feature: MA Experiment 108667 PARAMETER Experiment Name: At_2mM_SA_cDNA_P Parameter: Treatment Value: 2mM SA vs. No Treatment
  misc_feature: MA Experiment ID: 108668 Result: Up-regulated in Transcription
  misc_feature: MA Experiment 108668 PARAMETER Experiment Name: At_2mM_SA_cDNA_P Parameter: Plant Line Value: WS
  misc_feature: MA Experiment 108668 PARAMETER Experiment Name: At_2mM_SA_cDNA_P Parameter: Timepoint (hr) Value: 6
  misc_feature: MA Experiment 108668 PARAMETER Experiment Name: At_2mM_SA_cDNA_P Parameter: Treatment Value: 2mM SA vs. No Treatment
  misc_feature: MA Experiment ID: 20000179 Result: Down-regulated in Transcription
  misc_feature: MA Experiment 20000179 PARAMETER Experiment Name: At_Germinating_Seeds_P Parameter: Age (hr) Value: 6 vs. 0
  misc_feature: MA Experiment 20000179 PARAMETER Experiment Name: At_Germinating_Seeds_P Parameter: Tissue Value: Germinating Seeds
  misc_feature: MA Experiment ID: 20000180 Result: Down-regulated in Transcription
  misc_feature: MA Experiment 20000180 PARAMETER Experiment Name: At_Germinating_Seeds_P Parameter: Age (hr) Value: 24 vs. 0
  misc_feature: MA Experiment 20000180 PARAMETER Experiment Name: At_Germinating_Seeds_P Parameter: Tissue Value: Germinating Seeds
  misc_feature: MA Experiment ID: 20000182 Result: Up-regulated in Transcription
  misc_feature: MA Experiment 20000182 PARAMETER Experiment Name: At_2mM_SA_P Parameter: Age (day) Value: 14
  misc_feature: MA Experiment 20000182 PARAMETER Experiment Name: At_2mM_SA_P Parameter: Organism Value: A. thaliana
  misc_feature: MA Experiment 20000182 PARAMETER Experiment Name: At_2mM_SA_P Parameter: Plant Line Value: WS
  misc_feature: MA Experiment 20000182 PARAMETER Experiment Name: At_2mM_SA_P Parameter: Timepoint (hr) Value: 6
  misc_feature: MA Experiment 20000182 PARAMETER Experiment Name: At_2mM_SA_P Parameter: Tissue Value: Aerial
  misc_feature: MA Experiment 20000182 PARAMETER Experiment Name: At_2mM_SA_P Parameter: Treatment Value: 2mM SA vs. No Treatment
  misc_feature: MA Experiment ID: 20000265 Result: Up-regulated in Transcription
  misc_feature: MA Experiment 20000265 PARAMETER Experiment Name: At_Open_Flower_P Parameter: Age (day) Value: 21
  misc_feature: MA Experiment 20000265 PARAMETER Experiment Name: At_Open_Flower_P Parameter: Plant Line Value: WS
  misc_feature: MA Experiment 20000265 PARAMETER Experiment Name: At_Open_Flower_P Parameter: Tissue Value: Closed Flower vs. Whole Plant
  misc_feature: MA Experiment ID: 20000286 Result: Up-regulated in Transcription
  misc_feature: MA Experiment 20000286 PARAMETER Experiment Name: At_Open_Flower_P Parameter: Age (day) Value: 21
  misc_feature: MA Experiment 20000286 PARAMETER Experiment Name: At_Open_Flower_P Parameter: Plant Line Value: WS
  misc_feature: MA Experiment 20000286 PARAMETER Experiment Name: At_Open_Flower_P Parameter: Tissue Value: Half Open vs. Whole Plant
  misc_feature: MA Experiment ID: 20000437 Result: Up-regulated in Transcription
  misc_feature: MA Experiment 20000437 PARAMETER Experiment Name: At_Drought_P Parameter: Age (day) Value: 8
  misc_feature: MA Experiment 20000437 PARAMETER Experiment Name: At_Drought_P Parameter: Organism Value: A. thaliana
  misc_feature: MA Experiment 20000437 PARAMETER Experiment Name: At_Drought_P Parameter: Plant Line Value: WS
  misc_feature: MA Experiment 20000437 PARAMETER Experiment Name: At_Drought_P Parameter: Timepoint (hr) Value: 24
  misc_feature: MA Experiment 20000437 PARAMETER Experiment Name: At_Drought_P Parameter: Tissue Value: Whole Plant
  misc_feature: MA Experiment 20000437 PARAMETER Experiment Name: At_Drought_P Parameter: Treatment Value: Drought vs. No Drought
  misc_feature: MA Experiment ID: 20000438 Result: Down-regulated in Transcription
  misc_feature: MA Experiment 20000438 PARAMETER Experiment Name: At_Shoots__P Parameter: Age (day) Value: 14
  misc_feature: MA Experiment 20000438 PARAMETER Experiment Name: At_Shoots__P Parameter: Tissue Value: Shoots vs. Whole Plant
  misc_feature: MA Experiment ID: 20000439 Result: Down-regulated in Transcription
  misc_feature: MA Experiment 20000439 PARAMETER Experiment Name: At_Roots__P Parameter: Age (day) Value: 14 vs. 21
  misc_feature: MA Experiment 20000439 PARAMETER Experiment Name: At_Roots__P Parameter: Organism Value: A. thaliana
  misc_feature: MA Experiment 20000439 PARAMETER Experiment Name: At_Roots__P Parameter: Tissue Value: Roots vs. Whole Plant
  misc_feature: MA Experiment ID: 20000453 Result: Up-regulated in Transcription
  misc_feature: MA Experiment 20000453 PARAMETER Experiment Name: At_100uM_ABA_P Parameter: Age (day) Value: 15
  misc_feature: MA Experiment 20000453 PARAMETER Experiment Name: At_100uM_ABA_P Parameter: Organism Value: A. thaliana
  misc_feature: MA Experiment 20000453 PARAMETER Experiment Name: At_100uM_ABA_P Parameter: Plant Line Value: WS
  misc_feature: MA Experiment 20000453 PARAMETER Experiment Name: At_100uM_ABA_P Parameter: Timepoint (hr) Value: 24
  misc_feature: MA Experiment 20000453 PARAMETER Experiment Name: At_100uM_ABA_P Parameter: Tissue Value: Aerial
  misc_feature: MA Experiment 20000453 PARAMETER Experiment Name: At_100uM_ABA_P Parameter: Treatment Value: 100uM ABA vs. No Treatment
  misc_feature: MA Experiment ID: 20000527 Result: Down-regulated in Transcription
  misc_feature: MA Experiment 20000527 PARAMETER Experiment Name: At_10percent_PEG_P Parameter: Age (day) Value: 20
  misc_feature: MA Experiment 20000527 PARAMETER Experiment Name: At_10percent_PEG_P Parameter: Organism Value: A. thaliana
  misc_feature: MA Experiment 20000527 PARAMETER Experiment Name: At_10percent_PEG_P Parameter: Plant Line Value: WS
  misc_feature: MA Experiment 20000527 PARAMETER Experiment Name: At_10percent_PEG_P Parameter: Timepoint (day) Value: 20
  misc_feature: MA Experiment 20000527 PARAMETER Experiment Name: At_10percent_PEG_P Parameter: Tissue Value: Whole Plant
  misc_feature: MA Experiment 20000527 PARAMETER Experiment Name: At_10percent_PEG_P Parameter: Treatment Value: 10percent PEG vs. No Treatment
  misc_feature: MA Experiment ID: 20000709 Result: Up-regulated in Transcription
  misc_feature: MA Experiment 20000709 PARAMETER Experiment Name: At_15mM_NH4NO3_L-to-H_P Parameter: Age (hr) Value: 14
  misc_feature: MA Experiment 20000709 PARAMETER Experiment Name: At_15mM_NH4NO3_L-to-H_P Parameter: Organism Value: A. thaliana
  misc_feature: MA Experiment 20000709 PARAMETER Experiment Name: At_15mM_NH4NO3_L-to-H_P Parameter: Plant Line Value: WS
  misc_feature: MA Experiment 20000709 PARAMETER Experiment Name: At_15mM_NH4NO3_L-to-H_P Parameter: Timepoint (hr) Value: 4
  misc_feature: MA Experiment 20000709 PARAMETER Experiment Name: At_15mM_NH4NO3_L-to-H_P Parameter: Tissue Value: Aerial
  misc_feature: MA Experiment 20000709 PARAMETER Experiment Name: At_15mM_NH4NO3_L-to-H_P Parameter: Treatment Value: 15mM NH4NO3 vs. 30mM Mannitol
  misc_feature: MA Experiment ID: 20001556 Result: Up-regulated in Transcription
  misc_feature: MA Experiment 20001556 PARAMETER Experiment Name: At_Drought_Soil_Dry_P Parameter: Age (day) Value: 26
  misc_feature: MA Experiment 20001556 PARAMETER Experiment Name: At_Drought_Soil_Dry_P Parameter: Organism Value: A. thaliana
  misc_feature: MA Experiment 20001556 PARAMETER Experiment Name: At_Drought_Soil_Dry_P Parameter: Plant Line Value: WS
  misc_feature: MA Experiment 20001556 PARAMETER Experiment Name: At_Drought_Soil_Dry_P Parameter: Post Timepoint (hr) Value: None
  misc_feature: MA Experiment 20001556 PARAMETER Experiment Name: At_Drought_Soil_Dry_P Parameter: Post-Treatment Value: None
  misc_feature: MA Experiment 20001556 PARAMETER Experiment Name: At_Drought_Soil_Dry_P Parameter: Timepoint (day) Value: 12
  misc_feature: MA Experiment 20001556 PARAMETER Experiment Name: At_Drought_Soil_Dry_P Parameter: Treatment Value: Drought vs. No Drought
  misc_feature: MA Experiment ID: 20001557 Result: Up-regulated in Transcription
  misc_feature: MA Experiment 20001557 PARAMETER Experiment Name: At_Drought_Soil_Dry_P Parameter: Age (day) Value: 27
  misc_feature: MA Experiment 20001557 PARAMETER Experiment Name: At_Drought_Soil_Dry_P Parameter: Organism Value: A. thaliana
  misc_feature: MA Experiment 20001557 PARAMETER Experiment Name: At_Drought_Soil_Dry_P Parameter: Plant Line Value: WS
  misc_feature: MA Experiment 20001557 PARAMETER Experiment Name: At_Drought_Soil_Dry_P Parameter: Post Timepoint (hr) Value: 3
  misc_feature: MA Experiment 20001557 PARAMETER Experiment Name: At_Drought_Soil_Dry_P Parameter: Post-Treatment Value: Re-Water vs. No Drought
  misc_feature: MA Experiment 20001557 PARAMETER Experiment Name: At_Drought_Soil_Dry_P Parameter: Timepoint (day) Value: 13
  misc_feature: MA Experiment 20001557 PARAMETER Experiment Name: At_Drought_Soil_Dry_P Parameter: Treatment Value: Drought vs. No Drought
  misc_feature: MA Experiment ID: 20001560 Result: Up-regulated in Transcription
  misc_feature: MA Experiment 20001560 PARAMETER Experiment Name: At_Drought_Soil_Dry_P Parameter: Age (day) Value: 28
  misc_feature: MA Experiment 20001560 PARAMETER Experiment Name: At_Drought_Soil_Dry_P Parameter: Organism Value: A. thaliana
  misc_feature: MA Experiment 20001560 PARAMETER Experiment Name: At_Drought_Soil_Dry_P Parameter: Plant Line Value: WS
  misc_feature: MA Experiment 20001560 PARAMETER Experiment Name: At_Drought_Soil_Dry_P Parameter: Post Timepoint (hr) Value: None
  misc_feature: MA Experiment 20001560 PARAMETER Experiment Name: At_Drought_Soil_Dry_P Parameter: Post-Treatment Value: None
  misc_feature: MA Experiment 20001560 PARAMETER Experiment Name: At_Drought_Soil_Dry_P Parameter: Timepoint (day) Value: 14
  misc_feature: MA Experiment 20001560 PARAMETER Experiment Name: At_Drought_Soil_Dry_P Parameter: Treatment Value: Drought vs. No Drought
  misc_feature: MA Experiment ID: 20001757 Result: Down-regulated in Transcription
  misc_feature: MA Experiment 20001757 PARAMETER Experiment Name: At_50mM_NH4NO3_L-to-H_P Parameter: Timepoint (hr) Value: 6
  misc_feature: MA Experiment 20001757 PARAMETER Experiment Name: At_50mM_NH4NO3_L-to-H_P Parameter: Tissue Value: Leaf
  misc_feature: MA Experiment 20001757 PARAMETER Experiment Name: At_50mM_NH4NO3_L-to-H_P Parameter: Treatment Value: 50mM NH4NO3 vs 100mM Mannitol
  misc_feature: MA Experiment ID: 20001904 Result: Up-regulated in Transcription
  misc_feature: MA Experiment 20001904 PARAMETER Experiment Name: At_Drought_Reproduction_P Parameter: Age (day) Value: 37
  misc_feature: MA Experiment 20001904 PARAMETER Experiment Name: At_Drought_Reproduction_P Parameter: Organism Value: A. thaliana
  misc_feature: MA Experiment 20001904 PARAMETER Experiment Name: At_Drought_Reproduction_P Parameter: Plant Line Value: WS
  misc_feature: MA Experiment 20001904 PARAMETER Experiment Name: At_Drought_Reproduction_P Parameter: Timepoint (day) Value: 7
  misc_feature: MA Experiment 20001904 PARAMETER Experiment Name: At_Drought_Reproduction_P Parameter: Tissue Value: Rosettes
  misc_feature: MA Experiment 20001904 PARAMETER Experiment Name: At_Drought_Reproduction_P Parameter: Treatment Value: Drought vs. No Drought
  misc_feature: MA Experiment ID: 20001905 Result: Up-regulated in Transcription
  misc_feature: MA Experiment 20001905 PARAMETER Experiment Name: At_Drought_Reproduction_P Parameter: Age (day) Value: 40
  misc_feature: MA Experiment 20001905 PARAMETER Experiment Name: At_Drought_Reproduction_P Parameter: Organism Value: A. thaliana
  misc_feature: MA Experiment 20001905 PARAMETER Experiment Name: At_Drought_Reproduction_P Parameter: Plant Line Value: WS
  misc_feature: MA Experiment 20001905 PARAMETER Experiment Name: At_Drought_Reproduction_P Parameter: Timepoint (day) Value: 10
  misc_feature: MA Experiment 20001905 PARAMETER Experiment Name: At_Drought_Reproduction_P Parameter: Tissue Value: Rosettes
  misc_feature: MA Experiment 20001905 PARAMETER Experiment Name: At_Drought_Reproduction_P Parameter: Treatment Value: Drought vs. No Drought
  misc_feature: MA Experiment ID: 20001911 Result: Down-regulated in Transcription
  misc_feature: MA Experiment 20001911 PARAMETER Experiment Name: At_Drought_Reproduction_P Parameter: Age (day) Value: 40
  misc_feature: MA Experiment 20001911 PARAMETER Experiment Name: At_Drought_Reproduction_P Parameter: Organism Value: A. thaliana
  misc_feature: MA Experiment 20001911 PARAMETER Experiment Name: At_Drought_Reproduction_P Parameter: Plant Line Value: WS
  misc_feature: MA Experiment 20001911 PARAMETER Experiment Name: At_Drought_Reproduction_P Parameter: Timepoint (day) Value: 10
  misc_feature: MA Experiment 20001911 PARAMETER Experiment Name: At_Drought_Reproduction_P Parameter: Tissue Value: Flowers
  misc_feature: MA Experiment 20001911 PARAMETER Experiment Name: At_Drought_Reproduction_P Parameter: Treatment Value: Drought vs. No Drought

SEQ ID NO: 31533 - protein, 346 aa, Arabidopsis thaliana; identical to SEQ ID NO: 27943
  peptide (1)..(346): Ceres Seq. ID no. 12335492
  misc_feature (106)..(343): Pfam Name: Zinc-binding dehydrogenase Pfam Description: Zinc-binding dehydrogenase
  misc_feature (6)..(344): Homolog of NCBI NO: 1362014 NR Description: probable NADPH2:quinone reductase (EC 1.6.5.5) P2
  misc_feature (3)..(344): Homolog of NCBI NO: 15237888 NR Description: quinone oxidoreductase -like protein; protein id:
  misc_feature (6)..(344): Homolog of NCBI NO: 21554121 NR Description: quinone oxidoreductase-like protein [Arabidopsis
  misc_feature (3)..(344): Homolog of NCBI NO: 17529140 NR Description: putative quinone oxidoreductase [Arabidopsis
  misc_feature (1)..(344): Homolog of NCBI NO: 21536967 NR Description: quinone oxidoreductase-like protein [Arabidopsis
  misc_feature (3)..(344): Homolog of NCBI NO: 22326861 NR Description: quinone oxidoreductase - like protein
  misc_feature (6)..(344): Homolog of NCBI NO: 15237890 NR Description: quinone oxidoreductase - like protein
  misc_feature (1)..(344): Homolog of NCBI NO: 15240810 NR Description: quinone oxidoreductase -like protein
  misc_feature (1)..(346): Homolog of NCBI NO: 15237883 NR Description: quinone oxidoreductase -like protein
  misc_feature (1)..(346): Homolog of NCBI NO: 21595408 NR Description: quinone oxidoreductase-like protein [Arabidopsis

SEQ ID NO: 31534 - protein, 307 aa, Arabidopsis thaliana; identical to SEQ ID NO: 27944
  peptide (1)..(307): Ceres Seq. ID no. 12335493
  misc_feature (67)..(304): Pfam Name: Zinc-binding dehydrogenase Pfam Description: Zinc-binding dehydrogenase
  misc_feature (1)..(305): Homolog of NCBI NO: 1362014 NR Description: probable NADPH2:quinone reductase (EC 1.6.5.5) P2
  misc_feature (1)..(305): Homolog of NCBI NO: 15237888 NR Description: quinone oxidoreductase -like protein; protein id:
  misc_feature (1)..(305): Homolog of NCBI NO: 21554121 NR Description: quinone oxidoreductase-like protein [Arabidopsis
  misc_feature (1)..(305): Homolog of NCBI NO: 17529140 NR Description: putative quinone oxidoreductase [Arabidopsis
  misc_feature (1)..(305): Homolog of NCBI NO: 21536967 NR Description: quinone oxidoreductase-like protein [Arabidopsis
  misc_feature (1)..(305): Homolog of NCBI NO: 22326861 NR Description: quinone oxidoreductase - like protein
  misc_feature (1)..(305): Homolog of NCBI NO: 15237890 NR Description: quinone oxidoreductase - like protein
  misc_feature (1)..(305): Homolog of NCBI NO: 15240810 NR Description: quinone oxidoreductase -like protein
  misc_feature (1)..(307): Homolog of NCBI NO: 15237883 NR Description: quinone oxidoreductase -like protein
  misc_feature (1)..(307): Homolog of NCBI NO: 21595408 NR Description: quinone oxidoreductase-like protein [Arabidopsis

SEQ ID NO: 31535 - protein, 292 aa, Arabidopsis thaliana; identical to SEQ ID NO: 27945
  peptide (1)..(292): Ceres Seq. ID no. 12335494
  misc_feature (52)..(289): Pfam Name: Zinc-binding dehydrogenase Pfam Description: Zinc-binding dehydrogenase
  misc_feature (1)..(290): Homolog of NCBI NO: 1362014 NR Description: probable NADPH2:quinone reductase (EC 1.6.5.5) P2
  misc_feature (1)..(290): Homolog of NCBI NO: 15237888 NR Description: quinone oxidoreductase -like protein; protein id:
  misc_feature (1)..(290): Homolog of NCBI NO: 21554121 NR Description: quinone oxidoreductase-like protein [Arabidopsis
  misc_feature (1)..(290): Homolog of NCBI NO: 17529140 NR Description: putative quinone oxidoreductase [Arabidopsis
  misc_feature (1)..(290): Homolog of NCBI NO: 21536967 NR Description: quinone oxidoreductase-like protein [Arabidopsis
  misc_feature (1)..(290): Homolog of NCBI NO: 22326861 NR Description: quinone oxidoreductase - like protein
  misc_feature (1)..(290): Homolog of NCBI NO: 15237890 NR Description: quinone oxidoreductase - like protein
  misc_feature (1)..(290): Homolog of NCBI NO: 15240810 NR Description: quinone oxidoreductase -like protein
  misc_feature (1)..(292): Homolog of NCBI NO: 15237883 NR Description: quinone oxidoreductase -like protein
  misc_feature (1)..(292): Homolog of NCBI NO: 21595408 NR Description: quinone oxidoreductase-like protein [Arabidopsis

SEQ ID NO: 31536 - DNA, 1342 bp, Arabidopsis thaliana; identical to SEQ ID NO: 27946
  misc_feature (1)..(1342): Ceres Seq. ID no. 12562020
  misc_feature: MA Experiment ID: 108461 Result: Up-regulated in Transcription
  misc_feature: MA Experiment 108461 PARAMETER Experiment Name: At_Germinating_Seeds_cDNA_P Parameter: Age (day) Value: 1 vs. 0
  misc_feature: MA Experiment 108461 PARAMETER Experiment Name: At_Germinating_Seeds_cDNA_P Parameter: Tissue Value: Germinating Seeds
  misc_feature: MA Experiment ID: 108462 Result: Up-regulated in Transcription
  misc_feature: MA Experiment 108462 PARAMETER Experiment Name: At_Germinating_Seeds_cDNA_P Parameter: Age (day) Value: 2 vs. 0
  misc_feature: MA Experiment 108462 PARAMETER Experiment Name: At_Germinating_Seeds_cDNA_P Parameter: Tissue Value: Germinating Seeds
  misc_feature: MA Experiment ID: 108463 Result: Up-regulated in Transcription
  misc_feature: MA Experiment 108463 PARAMETER Experiment Name: At_Germinating_Seeds_cDNA_P Parameter: Age (day) Value: 3 vs. 0
  misc_feature: MA Experiment 108463 PARAMETER Experiment Name: At_Germinating_Seeds_cDNA_P Parameter: Tissue Value: Germinating Seeds
  misc_feature: MA Experiment ID: 108464 Result: Up-regulated in Transcription
  misc_feature: MA Experiment 108464 PARAMETER Experiment Name: At_Germinating_Seeds_cDNA_P Parameter: Age (day) Value: 4 vs. 0
  misc_feature: MA Experiment 108464 PARAMETER Experiment Name: At_Germinating_Seeds_cDNA_P Parameter: Tissue Value: Germinating Seeds
  misc_feature: MA Experiment ID: 20000179 Result: Up-regulated in Transcription
  misc_feature: MA Experiment 20000179 PARAMETER Experiment Name: At_Germinating_Seeds_P Parameter: Age (hr) Value: 6 vs. 0
  misc_feature: MA Experiment 20000179 PARAMETER Experiment Name: At_Germinating_Seeds_P Parameter: Tissue Value: Germinating Seeds
  misc_feature: MA Experiment ID: 20000180 Result: Up-regulated in Transcription
  misc_feature: MA Experiment 20000180 PARAMETER Experiment Name: At_Germinating_Seeds_P Parameter: Age (hr) Value: 24 vs. 0
  misc_feature: MA Experiment 20000180 PARAMETER Experiment Name: At_Germinating_Seeds_P Parameter: Tissue Value: Germinating Seeds
  misc_feature: MA Experiment ID: 20000227 Result: Up-regulated in Transcription
  misc_feature: MA Experiment 20000227 PARAMETER Experiment Name: At_Root-Tips-vs-Tops_P Parameter: Tissue Value: Root Tips vs. Root Tops
  misc_feature: MA Experiment ID: 20000264 Result: Down-regulated in Transcription
  misc_feature: MA Experiment 20000264 PARAMETER Experiment Name: At_Open_Flower_P Parameter: Age (day) Value: 21
  misc_feature: MA Experiment 20000264 PARAMETER Experiment Name: At_Open_Flower_P Parameter: Plant Line Value: WS
  misc_feature: MA Experiment 20000264 PARAMETER Experiment Name: At_Open_Flower_P Parameter: Tissue Value: Open Flower vs. Whole Plant
  misc_feature: MA Experiment ID: 20000265 Result: Down-regulated in Transcription
  misc_feature: MA Experiment 20000265 PARAMETER Experiment Name: At_Open_Flower_P Parameter: Age (day) Value: 21
  misc_feature: MA Experiment 20000265 PARAMETER Experiment Name: At_Open_Flower_P Parameter: Plant Line Value: WS
  misc_feature: MA Experiment 20000265 PARAMETER Experiment Name: At_Open_Flower_P Parameter: Tissue Value: Closed Flower vs. Whole Plant
  misc_feature: MA Experiment ID: 20000286 Result: Down-regulated in Transcription
  misc_feature: MA Experiment 20000286 PARAMETER Experiment Name: At_Open_Flower_P Parameter: Age (day) Value: 21
  misc_feature: MA Experiment 20000286 PARAMETER Experiment Name: At_Open_Flower_P Parameter: Plant Line Value: WS
  misc_feature: MA Experiment 20000286 PARAMETER Experiment Name: At_Open_Flower_P Parameter: Tissue Value: Half Open vs. Whole Plant
  misc_feature: MA Experiment ID: 20000438 Result: Down-regulated in Transcription
  misc_feature: MA Experiment 20000438 PARAMETER Experiment Name: At_Shoots__P Parameter: Age (day) Value: 14
  misc_feature: MA Experiment 20000438 PARAMETER Experiment Name: At_Shoots__P Parameter: Tissue Value: Shoots vs. Whole Plant
  misc_feature: MA Experiment ID: 20000794 Result: Down-regulated in Transcription
  misc_feature: MA Experiment 20000794 PARAMETER Experiment Name: At_Petals_P Parameter: Age (day) Value: 23-25 days
  misc_feature: MA Experiment 20000794 PARAMETER Experiment Name: At_Petals_P Parameter: Plant Line Value: WS
  misc_feature: MA Experiment 20000794 PARAMETER Experiment Name: At_Petals_P Parameter: Tissue Value: Petals vs. Whole plant
  misc_feature: MA Experiment ID: 20001556 Result: Down-regulated in Transcription
  misc_feature: MA Experiment 20001556 PARAMETER Experiment Name: At_Drought_Soil_Dry_P Parameter: Age (day) Value: 26
  misc_feature: MA Experiment 20001556 PARAMETER Experiment Name: At_Drought_Soil_Dry_P Parameter: Organism Value: A. thaliana
  misc_feature: MA Experiment 20001556 PARAMETER Experiment Name: At_Drought_Soil_Dry_P Parameter: Plant Line Value: WS
  misc_feature: MA Experiment 20001556 PARAMETER Experiment Name: At_Drought_Soil_Dry_P Parameter: Post Timepoint (hr) Value: None
  misc_feature: MA Experiment 20001556 PARAMETER Experiment Name: At_Drought_Soil_Dry_P Parameter: Post-Treatment Value: None
  misc_feature: MA Experiment 20001556 PARAMETER Experiment Name: At_Drought_Soil_Dry_P Parameter: Timepoint (day) Value: 12
  misc_feature: MA Experiment 20001556 PARAMETER Experiment Name: At_Drought_Soil_Dry_P Parameter: Treatment Value: Drought vs. No Drought
  misc_feature: MA Experiment ID: 20001757 Result: Down-regulated in Transcription
  misc_feature: MA Experiment 20001757 PARAMETER Experiment Name: At_50mM_NH4NO3_L-to-H_P Parameter: Timepoint (hr) Value: 6
  misc_feature: MA Experiment 20001757 PARAMETER Experiment Name: At_50mM_NH4NO3_L-to-H_P Parameter: Tissue Value: Leaf
  misc_feature: MA Experiment 20001757 PARAMETER Experiment Name: At_50mM_NH4NO3_L-to-H_P Parameter: Treatment Value: 50mM NH4NO3 vs 100mM Mannitol
  misc_feature: MA Experiment ID: 20001773 Result: Up-regulated in Transcription
  misc_feature: MA Experiment 20001773 PARAMETER Experiment Name: At_Far-red-enriched-adult_P Parameter: Age (day) Value: 30
  misc_feature: MA Experiment 20001773 PARAMETER Experiment Name: At_Far-red-enriched-adult_P Parameter: Light Value: Far-red enriched vs. White
  misc_feature: MA Experiment 20001773 PARAMETER Experiment Name: At_Far-red-enriched-adult_P Parameter: Organism Value: A. thaliana
  misc_feature: MA Experiment 20001773 PARAMETER Experiment Name: At_Far-red-enriched-adult_P Parameter: Plant Line Value: Columbia
  misc_feature: MA Experiment 20001773 PARAMETER Experiment Name: At_Far-red-enriched-adult_P Parameter: Timepoint (hr) Value: 48
  misc_feature: MA Experiment 20001773 PARAMETER Experiment Name: At_Far-red-enriched-adult_P Parameter: Tissue Value: Aerial
  misc_feature: MA Experiment ID: 20001904 Result: Up-regulated in Transcription
  misc_feature: MA Experiment 20001904 PARAMETER Experiment Name: At_Drought_Reproduction_P Parameter: Age (day) Value: 37
  misc_feature: MA Experiment 20001904 PARAMETER Experiment Name: At_Drought_Reproduction_P Parameter: Organism Value: A. thaliana
  misc_feature: MA Experiment 20001904 PARAMETER Experiment Name: At_Drought_Reproduction_P Parameter: Plant Line Value: WS
  misc_feature: MA Experiment 20001904 PARAMETER Experiment Name: At_Drought_Reproduction_P Parameter: Timepoint (day) Value: 7
  misc_feature: MA Experiment 20001904 PARAMETER Experiment Name: At_Drought_Reproduction_P Parameter: Tissue Value: Rosettes
  misc_feature: MA Experiment 20001904 PARAMETER Experiment Name: At_Drought_Reproduction_P Parameter: Treatment Value: Drought vs. No Drought
  misc_feature: MA Experiment ID: 20001905 Result: Up-regulated in Transcription
  misc_feature: MA Experiment 20001905 PARAMETER Experiment Name: At_Drought_Reproduction_P Parameter: Age (day) Value: 40
  misc_feature: MA Experiment 20001905 PARAMETER Experiment Name: At_Drought_Reproduction_P Parameter: Organism Value: A. thaliana
  misc_feature: MA Experiment 20001905 PARAMETER Experiment Name: At_Drought_Reproduction_P Parameter: Plant Line Value: WS
  misc_feature: MA Experiment 20001905 PARAMETER Experiment Name: At_Drought_Reproduction_P Parameter: Timepoint (day) Value: 10
  misc_feature: MA Experiment 20001905 PARAMETER Experiment Name: At_Drought_Reproduction_P Parameter: Tissue Value: Rosettes
  misc_feature: MA Experiment 20001905 PARAMETER Experiment Name: At_Drought_Reproduction_P Parameter: Treatment Value: Drought vs. No Drought

SEQ ID NO: 31537 - protein, 357 aa, Arabidopsis thaliana; identical to SEQ ID NO: 27947
  peptide (1)..(357): Ceres Seq. ID no. 12562021
  misc_feature (47)..(353): Pfam Name: NAD dependent epimerase/dehydratase family Pfam Description: NAD dependent epimerase/dehydratase family
  misc_feature (45)..(352): Homolog of NCBI NO: 15227109 NR Description: putative dTDP-glucose 4-6-dehydratase; protein
  misc_feature (94)..(357): Homolog of NCBI NO: 2351580 NR Description: thymidine diphospho-glucose 4-6-dehydratase
  misc_feature (12)..(356): Homolog of NCBI NO: 11121508 NR Description: d-TDP-glucose dehydratase [Phragmites australis]
  misc_feature (19)..(356): Homolog of NCBI NO: 18447934 NR Description: UDP-glucuronic acid decarboxylase
  misc_feature (16)..(356): Homolog of NCBI NO: 11270075 NR Description: dTDPglucose 4,6-dehydratase (EC 4.2.1.46)
  misc_feature (16)..(357): Homolog of NCBI NO: 13591616 NR Description: UDP-D-glucuronate carboxy-lyase [Pisum sativum]
  misc_feature (16)..(356): Homolog of NCBI NO: 15226950 NR Description: putative nucleotide-sugar dehydratase
  misc_feature (18)..(357): Homolog of NCBI NO: 15231432 NR Description: dTDP-glucose 4-6-dehydratases-like protein
  misc_feature (16)..(357): Homolog of NCBI NO: 14030703 NR Description: AT5g59290/mnc17_180 [Arabidopsis thaliana]
  misc_feature (16)..(357): Homolog of NCBI NO: 15237853 NR Description: dTDP-glucose 4-6-dehydratase - like protein

SEQ ID NO: 31538 - protein, 342 aa, Arabidopsis thaliana; identical to SEQ ID NO: 27948
  peptide (1)..(342): Ceres Seq. ID no. 12562022
  misc_feature (32)..(338): Pfam Name: NAD dependent epimerase/dehydratase family Pfam Description: NAD dependent epimerase/dehydratase family
  misc_feature (30)..(337): Homolog of NCBI NO: 15227109 NR Description: putative dTDP-glucose 4-6-dehydratase; protein
  misc_feature (79)..(342): Homolog of NCBI NO: 2351580 NR Description: thymidine diphospho-glucose 4-6-dehydratase
  misc_feature (1)..(341): Homolog of NCBI NO: 11121508 NR Description: d-TDP-glucose dehydratase [Phragmites australis]
  misc_feature (4)..(341): Homolog of NCBI NO: 18447934 NR Description: UDP-glucuronic acid decarboxylase
  misc_feature (1)..(341): Homolog of NCBI NO: 11270075 NR Description: dTDPglucose 4,6-dehydratase (EC 4.2.1.46)
  misc_feature (1)..(342): Homolog of NCBI NO: 13591616 NR Description: UDP-D-glucuronate carboxy-lyase [Pisum sativum]
  misc_feature (1)..(341): Homolog of NCBI NO: 15226950 NR Description: putative nucleotide-sugar dehydratase
  misc_feature (3)..(342): Homolog of NCBI NO: 15231432 NR Description: dTDP-glucose 4-6-dehydratases-like protein
  misc_feature (1)..(342): Homolog of NCBI NO: 14030703 NR Description: AT5g59290/mnc17_180 [Arabidopsis thaliana]
  misc_feature (1)..(342): Homolog of NCBI NO: 15237853 NR Description: dTDP-glucose 4-6-dehydratase - like protein

SEQ ID NO: 31539 - protein, 313 aa, Arabidopsis thaliana; identical to SEQ ID NO: 27949
  peptide (1)..(313): Ceres Seq. ID no. 12562023
  misc_feature (3)..(309): Pfam Name: NAD dependent epimerase/dehydratase family Pfam Description: NAD dependent epimerase/dehydratase family
  misc_feature (1)..(308): Homolog of NCBI NO: 15227109 NR Description: putative dTDP-glucose 4-6-dehydratase; protein
  misc_feature (50)..(313): Homolog of NCBI NO: 2351580 NR Description: thymidine diphospho-glucose 4-6-dehydratase
  misc_feature (1)..(312): Homolog of NCBI NO: 11121508 NR Description: d-TDP-glucose dehydratase [Phragmites australis]
  misc_feature (1)..(312): Homolog of NCBI NO: 18447934 NR Description: UDP-glucuronic acid decarboxylase
  misc_feature (1)..(312): Homolog of NCBI NO: 11270075 NR Description: dTDPglucose 4,6-dehydratase (EC 4.2.1.46)
  misc_feature (1)..(313): Homolog of NCBI NO: 13591616 NR Description: UDP-D-glucuronate carboxy-lyase [Pisum sativum]
  misc_feature (1)..(312): Homolog of NCBI NO: 15226950 NR Description: putative nucleotide-sugar dehydratase
  misc_feature (1)..(313): Homolog of NCBI NO: 15231432 NR Description: dTDP-glucose 4-6-dehydratases-like protein
  misc_feature (1)..(313): Homolog of NCBI NO: 14030703 NR Description: AT5g59290/mnc17_180 [Arabidopsis thaliana]
  misc_feature (1)..(313): Homolog of NCBI NO: 15237853 NR Description: dTDP-glucose 4-6-dehydratase - like protein

SEQ ID NO: 31540 - DNA, 1148 bp, Arabidopsis thaliana; identical to SEQ ID NO: 27950
  misc_feature (1)..(1148): Ceres Seq. ID no. 12334358
  misc_feature: MA Experiment ID: 20000171 Result: Up-regulated in Transcription
  misc_feature: MA Experiment 20000171 PARAMETER Experiment Name: At_42deg_Heat_P Parameter: Age (day) Value: 14
  misc_feature: MA Experiment 20000171 PARAMETER Experiment Name: At_42deg_Heat_P Parameter: Organism Value: A. thaliana
  misc_feature: MA Experiment 20000171 PARAMETER Experiment Name: At_42deg_Heat_P Parameter: Plant Line Value: WS
  misc_feature: MA Experiment 20000171 PARAMETER Experiment Name: At_42deg_Heat_P Parameter: Temperature (deg C) Value: 42 vs. 22
  misc_feature: MA Experiment 20000171 PARAMETER Experiment Name: At_42deg_Heat_P Parameter: Timepoint (hr) Value: 1
  misc_feature: MA Experiment 20000171 PARAMETER Experiment Name: At_42deg_Heat_P Parameter: Tissue Value: Aerial
  misc_feature: MA Experiment ID: 20000173 Result: Up-regulated in Transcription
  misc_feature: MA Experiment 20000173 PARAMETER Experiment Name: At_42deg_Heat_P Parameter: Age (day) Value: 14
  misc_feature: MA Experiment 20000173 PARAMETER Experiment Name: At_42deg_Heat_P Parameter: Organism Value: A. thaliana
  misc_feature: MA Experiment 20000173 PARAMETER Experiment Name: At_42deg_Heat_P Parameter: Plant Line Value: WS
  misc_feature: MA Experiment 20000173 PARAMETER Experiment Name: At_42deg_Heat_P Parameter: Temperature (deg C) Value: 42 vs. 22
  misc_feature: MA Experiment 20000173 PARAMETER Experiment Name: At_42deg_Heat_P Parameter: Timepoint (hr) Value: 6
  misc_feature: MA Experiment 20000173 PARAMETER Experiment Name: At_42deg_Heat_P Parameter: Tissue Value: Aerial

SEQ ID NO: 31541 - protein, 307 aa, Arabidopsis thaliana; identical to SEQ ID NO: 27951
  peptide (1)..(307): Ceres Seq. ID no. 12334359
  misc_feature (9)..(286): Homolog of NCBI NO: 34913064 NR Description: P0013G02.24 [Oryza sativa (japonica
  misc_feature (32)..(277): Homolog of NCBI NO: 21554728 NR Description: putative esterase [Arabidopsis thaliana]
  misc_feature (32)..(285): Homolog of NCBI NO: 22135864 NR Description: putative protein [Arabidopsis thaliana]
  misc_feature (27)..(277): Homolog of NCBI NO: 15220578 NR Description: hypothetical protein; protein id: At1g29840.1
  misc_feature (32)..(285): Homolog of NCBI NO: 15232826 NR Description: putative protein
  misc_feature (17)..(277): Homolog of NCBI NO: 15228202 NR Description: putative protein; protein id: At3g47590.1
  misc_feature (11)..(27): Homolog of NCBI NO: 11358640 NR Description: probable esterase-like protein - Arabidopsis
  misc_feature (27)..(292): Homolog of NCBI NO: 11358640 NR Description: probable esterase-like protein - Arabidopsis
  misc_feature (11)..(307): Homolog of NCBI NO: 18416707 NR Description: putative esterase - like protein
  misc_feature (11)..(307): Homolog of NCBI NO: 21595418 NR Description: putative esterase-like protein [Arabidopsis

SEQ ID NO: 31542 - protein, 297 aa, Arabidopsis thaliana; identical to SEQ ID NO: 27952
  peptide (1)..(297): Ceres Seq. ID no. 12334360
  misc_feature (1)..(276): Homolog of NCBI NO: 34913064 NR Description: P0013G02.24 [Oryza sativa (japonica
  misc_feature (22)..(267): Homolog of NCBI NO: 21554728 NR Description: putative esterase [Arabidopsis thaliana]
  misc_feature (22)..(275): Homolog of NCBI NO: 22135864 NR Description: putative protein [Arabidopsis thaliana]
  misc_feature (17)..(267): Homolog of NCBI NO: 15220578 NR Description: hypothetical protein; protein id: At1g29840.1
  misc_feature (22)..(275): Homolog of NCBI NO: 15232826 NR Description: putative protein
  misc_feature (7)..(267): Homolog of NCBI NO: 15228202 NR Description: putative protein; protein id: At3g47590.1
  misc_feature (1)..(17): Homolog of NCBI NO: 11358640 NR Description: probable esterase-like protein - Arabidopsis
  misc_feature (17)..(282): Homolog of NCBI NO: 11358640 NR Description: probable esterase-like protein - Arabidopsis
  misc_feature (1)..(297): Homolog of NCBI NO: 18416707 NR Description: putative esterase - like protein
  misc_feature (1)..(297): Homolog of NCBI NO: 21595418 NR Description: putative esterase-like protein [Arabidopsis

SEQ ID NO: 31543 - protein, 236 aa, Arabidopsis thaliana; identical to SEQ ID NO: 27953
  peptide (1)..(236): Ceres Seq. ID no. 12334361
  misc_feature (1)..(206): Homolog of NCBI NO: 15224799 NR Description: putative esterase; protein id: At2g19550.1
  misc_feature (1)..(215): Homolog of NCBI NO: 34913064 NR Description: P0013G02.24 [Oryza sativa (japonica
  misc_feature (1)..(206): Homolog of NCBI NO: 21554728 NR Description: putative esterase [Arabidopsis thaliana]
  misc_feature (1)..(214): Homolog of NCBI NO: 22135864 NR Description: putative protein [Arabidopsis thaliana]
  misc_feature (1)..(206): Homolog of NCBI NO: 15220578 NR Description: hypothetical protein; protein id: At1g29840.1
  misc_feature (1)..(214): Homolog of NCBI NO: 15232826 NR Description: putative protein
  misc_feature (1)..(206): Homolog of NCBI NO: 15228202 NR Description: putative protein; protein id: At3g47590.1
  misc_feature (1)..(221): Homolog of NCBI NO: 11358640 NR Description: probable esterase-like protein - Arabidopsis
  misc_feature (1)..(236): Homolog of NCBI NO: 18416707 NR Description: putative esterase - like protein
  misc_feature (1)..(236): Homolog of NCBI NO: 21595418 NR Description: putative esterase-like protein [Arabidopsis

SEQ ID NO: 31544 - DNA, 1458 bp, Arabidopsis thaliana; identical to SEQ ID NO: 27954
  misc_feature (1)..(1458): Ceres Seq. ID no. 12325068
  misc_feature: MA Experiment ID: 108434 Result: Down-regulated in Transcription
  misc_feature: MA Experiment 108434 PARAMETER Experiment Name: At_Root_Tips_cDNA_P Parameter: Tissue Value: Root Tips
  misc_feature: MA Experiment ID: 108577 Result: Down-regulated in Transcription
  misc_feature: MA Experiment 108577 PARAMETER Experiment Name: At_42deg_Heat_cDNA_P Parameter: Temperature (deg C) Value: 42 vs. 22
  misc_feature: MA Experiment 108577 PARAMETER Experiment Name: At_42deg_Heat_cDNA_P Parameter: Timepoint (hr) Value: 6
  misc_feature: MA Experiment 108577 PARAMETER Experiment Name: At_42deg_Heat_cDNA_P Parameter: Tissue Value: Aerial
  misc_feature: MA Experiment ID: 20000069 Result: Up-regulated in Transcription
  misc_feature: MA Experiment 20000069 PARAMETER Experiment Name: At_100uM_ABA_Mutants_cDNA_P Parameter: Plant Line Value: CS23
  misc_feature: MA Experiment 20000069 PARAMETER Experiment Name: At_100uM_ABA_Mutants_cDNA_P Parameter: Timepoint (hr) Value: 6
  misc_feature: MA Experiment 20000069 PARAMETER Experiment Name: At_100uM_ABA_Mutants_cDNA_P Parameter: Tissue Value: Aerial
  misc_feature: MA Experiment 20000069 PARAMETER Experiment Name: At_100uM_ABA_Mutants_cDNA_P Parameter: Treatment Value: 100uM ABA vs. No Treatment
  misc_feature: MA Experiment ID: 20000070 Result: Up-regulated in Transcription
  misc_feature: MA Experiment 20000070 PARAMETER Experiment Name: At_100uM_ABA_Mutants_cDNA_P Parameter: Plant Line Value: CS24
  misc_feature: MA Experiment 20000070 PARAMETER Experiment Name: At_100uM_ABA_Mutants_cDNA_P Parameter: Timepoint (hr) Value: 6
  misc_feature: MA Experiment 20000070 PARAMETER Experiment Name: At_100uM_ABA_Mutants_cDNA_P Parameter: Tissue Value: Aerial
  misc_feature: MA Experiment 20000070 PARAMETER Experiment Name: At_100uM_ABA_Mutants_cDNA_P Parameter: Treatment Value: 100uM ABA vs. No Treatment
  misc_feature: MA Experiment ID: 20000071 Result: Up-regulated in Transcription
  misc_feature: MA Experiment 20000071 PARAMETER Experiment Name: At_100uM_ABA_Mutants_cDNA_P Parameter: Plant Line Value: CS8104
  misc_feature: MA Experiment 20000071 PARAMETER Experiment Name: At_100uM_ABA_Mutants_cDNA_P Parameter: Timepoint (hr) Value: 6
  misc_feature: MA Experiment 20000071 PARAMETER Experiment Name: At_100uM_ABA_Mutants_cDNA_P Parameter: Tissue Value: Aerial
  misc_feature: MA Experiment 20000071 PARAMETER Experiment Name: At_100uM_ABA_Mutants_cDNA_P Parameter: Treatment Value: 100uM ABA vs. No Treatment
  misc_feature: MA Experiment ID: 20000072 Result: Up-regulated in Transcription
  misc_feature: MA Experiment 20000072 PARAMETER Experiment Name: At_100uM_ABA_Mutants_cDNA_P Parameter: Plant Line Value: CS8105
  misc_feature: MA Experiment 20000072 PARAMETER Experiment Name: At_100uM_ABA_Mutants_cDNA_P Parameter: Timepoint (hr) Value: 6
  misc_feature: MA Experiment 20000072 PARAMETER Experiment Name: At_100uM_ABA_Mutants_cDNA_P Parameter: Tissue Value: Aerial
  misc_feature: MA Experiment 20000072 PARAMETER Experiment Name: At_100uM_ABA_Mutants_cDNA_P Parameter: Treatment Value: 100uM ABA vs. No Treatment
  misc_feature: MA Experiment ID: 20000086 Result: Up-regulated in Transcription
  misc_feature: MA Experiment 20000086 PARAMETER Experiment Name: At_100uM_ABA_Mutants_cDNA_P Parameter: Plant Line Value: CS22
  misc_feature: MA Experiment 20000086 PARAMETER Experiment Name: At_100uM_ABA_Mutants_cDNA_P Parameter: Timepoint (hr) Value: 6
  misc_feature: MA Experiment 20000086 PARAMETER Experiment Name: At_100uM_ABA_Mutants_cDNA_P Parameter: Tissue Value: Aerial
  misc_feature: MA Experiment 20000086 PARAMETER Experiment Name: At_100uM_ABA_Mutants_cDNA_P Parameter: Treatment Value: 100uM ABA vs. No Treatment
  misc_feature: MA Experiment ID: 20000087 Result: Up-regulated in Transcription
  misc_feature: MA Experiment 20000087 PARAMETER Experiment Name: At_100uM_ABA_Mutants_cDNA_P Parameter: Plant Line Value: WS
  misc_feature: MA Experiment 20000087 PARAMETER Experiment Name: At_100uM_ABA_Mutants_cDNA_P Parameter: Timepoint (hr) Value: 6
  misc_feature: MA Experiment 20000087 PARAMETER Experiment Name: At_100uM_ABA_Mutants_cDNA_P Parameter: Tissue Value: Aerial
  misc_feature: MA Experiment 20000087 PARAMETER Experiment Name: At_100uM_ABA_Mutants_cDNA_P Parameter: Treatment Value: 100uM ABA vs. No Treatment
  misc_feature: MA Experiment ID: 20000088 Result: Up-regulated in Transcription
  misc_feature: MA Experiment 20000088 PARAMETER Experiment Name: At_100uM_ABA_Mutants_cDNA_P Parameter: Plant Line Value: Landsberg
  misc_feature: MA Experiment 20000088 PARAMETER Experiment Name: At_100uM_ABA_Mutants_cDNA_P Parameter: Timepoint (hr) Value: 6
  misc_feature: MA Experiment 20000088 PARAMETER Experiment Name: At_100uM_ABA_Mutants_cDNA_P Parameter: Tissue Value: Aerial
  misc_feature: MA Experiment 20000088 PARAMETER Experiment Name: At_100uM_ABA_Mutants_cDNA_P Parameter: Treatment Value: 100uM ABA vs. No Treatment
  misc_feature: MA Experiment ID: 20000090 Result: Up-regulated in Transcription
  misc_feature: MA Experiment ID: 20000111 Result: Down-regulated in Transcription
  misc_feature: MA Experiment 20000111 PARAMETER Experiment Name: At_42deg_Heat_cDNA_P Parameter: Temperature (deg C) Value: 42 vs. 22
  misc_feature: MA Experiment 20000111 PARAMETER Experiment Name: At_42deg_Heat_cDNA_P Parameter: Timepoint (hr) Value: 6
  misc_feature: MA Experiment 20000111 PARAMETER Experiment Name: At_42deg_Heat_cDNA_P Parameter: Tissue Value: Aerial
  misc_feature: MA Experiment ID: 20000113 Result: Down-regulated in Transcription
  misc_feature: MA Experiment 20000113 PARAMETER Experiment Name: At_42deg_Heat_cDNA_P Parameter: Temperature (deg C) Value: 42 vs. 22
  misc_feature: MA Experiment 20000113 PARAMETER Experiment Name: At_42deg_Heat_cDNA_P Parameter: Timepoint (hr) Value: 8
  misc_feature: MA Experiment 20000113 PARAMETER Experiment Name: At_42deg_Heat_cDNA_P Parameter: Tissue Value: Aerial
  misc_feature: MA Experiment ID: 20000117 Result: Up-regulated in Transcription
  misc_feature: MA Experiment 20000117 PARAMETER Experiment Name: At_100uM_ABA_Mutants_cDNA_P Parameter: Plant Line Value: Columbia
  misc_feature: MA Experiment 20000117 PARAMETER Experiment Name: At_100uM_ABA_Mutants_cDNA_P Parameter: Timepoint (hr) Value: 6
  misc_feature: MA Experiment 20000117 PARAMETER Experiment Name: At_100uM_ABA_Mutants_cDNA_P Parameter: Tissue Value: Aerial
  misc_feature: MA Experiment 20000117 PARAMETER Experiment Name: At_100uM_ABA_Mutants_cDNA_P Parameter: Treatment Value: 100uM ABA vs. No Treatment

SEQ ID NO: 31545 - protein, 393 aa, Arabidopsis thaliana; identical to SEQ ID NO: 27955
  peptide (1)..(393): Ceres Seq. ID no. 12325069
  misc_feature (138)..(336): Pfam Name: Galactosyltransferase Pfam Description: Galactosyltransferase
  misc_feature (17)..(390): Homolog of NCBI NO: 15217544 NR Description: elicitor response protein, putative; protein id:
  misc_feature (6)..(390): Homolog of NCBI NO: 15220440 NR Description: putative AVR9 elicitor response protein
  misc_feature (112)..(151): Homolog of NCBI NO: 25370617 NR Description: protein F28K19.2 [imported] - Arabidopsis
  misc_feature (167)..(237): Homolog of NCBI NO: 25370617 NR Description: protein F28K19.2 [imported] - Arabidopsis
  misc_feature (237)..(393): Homolog of NCBI NO: 25370617 NR Description: protein F28K19.2 [imported] - Arabidopsis
  misc_feature (10)..(393): Homolog of NCBI NO: 18395060 NR Description: Expressed protein
  misc_feature (10)..(392): Homolog of NCBI NO: 4138265 NR Description: Avr9 elicitor response protein [Nicotiana tabacum]
  misc_feature (10)..(393): Homolog of NCBI NO: 34365705 NR Description: At1g77810 [Arabidopsis thaliana]
  misc_feature (10)..(393): Homolog of NCBI NO: 12323294 NR Description: putative (Avr9) elicitor response protein;
  misc_feature (10)..(393): Homolog of NCBI NO: 30699558 NR Description: Avr9 elicitor response protein -related

SEQ ID NO: 31546 - protein, 384 aa, Arabidopsis thaliana; identical to SEQ ID NO: 27956
  peptide (1)..(384): Ceres Seq. ID no. 12325070
  misc_feature (129)..(327): Pfam Name: Galactosyltransferase Pfam Description: Galactosyltransferase
  misc_feature (8)..(381): Homolog of NCBI NO: 15217544 NR Description: elicitor response protein, putative; protein id:
  misc_feature (1)..(381): Homolog of NCBI NO: 15220440 NR Description: putative AVR9 elicitor response protein
  misc_feature (103)..(142): Homolog of NCBI NO: 25370617 NR Description: protein F28K19.2 [imported] - Arabidopsis
  misc_feature (158)..(228): Homolog of NCBI NO: 25370617 NR Description: protein F28K19.2 [imported] - Arabidopsis
  misc_feature (228)..(384): Homolog of NCBI NO: 25370617 NR Description: protein F28K19.2 [imported] - Arabidopsis
  misc_feature (1)..(384): Homolog of NCBI NO: 18395060 NR Description: Expressed protein
  misc_feature (1)..(383): Homolog of NCBI NO: 4138265 NR Description: Avr9 elicitor response protein [Nicotiana tabacum]
  misc_feature (1)..(384): Homolog of NCBI NO: 34365705 NR Description: At1g77810 [Arabidopsis thaliana]
  misc_feature (1)..(384): Homolog of NCBI NO: 12323294 NR Description: putative (Avr9) elicitor response protein;
  misc_feature (1)..(384): Homolog of NCBI NO: 30699558 NR Description: Avr9 elicitor response protein -related

SEQ ID NO: 31547 - protein, 282 aa, Arabidopsis thaliana; identical to SEQ ID NO: 27957
  peptide (1)..(282): Ceres Seq. ID no. 12325071
  misc_feature (27)..(225): Pfam Name: Galactosyltransferase Pfam Description: Galactosyltransferase
  misc_feature (1)..(279): Homolog of NCBI NO: 15217544 NR Description: elicitor response protein, putative; protein id:
  misc_feature (1)..(279): Homolog of NCBI NO: 15220440 NR Description: putative AVR9 elicitor response protein
  misc_feature (1)..(40): Homolog of NCBI NO: 25370617 NR Description: protein F28K19.2 [imported] - Arabidopsis
  misc_feature (56)..(126): Homolog of NCBI NO: 25370617 NR Description: protein F28K19.2 [imported] - Arabidopsis
  misc_feature (126)..(282): Homolog of NCBI NO: 25370617 NR Description: protein F28K19.2 [imported] - Arabidopsis
  misc_feature (1)..(282): Homolog of NCBI NO: 18395060 NR Description: Expressed protein
  misc_feature (1)..(281): Homolog of NCBI NO: 4138265 NR Description: Avr9 elicitor response protein [Nicotiana tabacum]
  misc_feature (1)..(282): Homolog of NCBI NO: 34365705 NR Description: At1g77810 [Arabidopsis thaliana]
  misc_feature (1)..(282): Homolog of NCBI NO: 12323294 NR Description: putative (Avr9) elicitor response protein;
  misc_feature (1)..(282): Homolog of NCBI NO: 30699558 NR Description: Avr9 elicitor response protein -related

SEQ ID NO: 31548 - DNA, 1306 bp, Arabidopsis thaliana; identical to SEQ ID NO: 27958
  misc_feature (1)..(1306): Ceres Seq. ID no. 12421637
  misc_feature: MA Experiment ID: 108595 Result: Down-regulated in Transcription
  misc_feature: MA Experiment 108595 PARAMETER Experiment Name: At_Ler-pi_Ovule_cDNA_P Parameter: Plant Line Value: null

SEQ ID NO: 31549 - protein, 350 aa, Arabidopsis thaliana; identical to SEQ ID NO: 27959
  peptide (1)..(350): Ceres Seq. ID no. 12421638
  misc_feature (50)..(171): Pfam Name: Eukaryotic protein of unknown function, DUF292 Pfam Description: Eukaryotic protein of unknown function, DUF292
  misc_feature (31)..(289): Homolog of NCBI NO: 30688332 NR Description: expressed protein [Arabidopsis thaliana]
  misc_feature (21)..(227): Homolog of NCBI NO: 34910388 NR Description: P0692C11.15 [Oryza sativa (japonica
  misc_feature (50)..(232): Homolog of NCBI NO: 15237108 NR Description: putative protein; protein id: At4g35730.1
  misc_feature (181)..(232): Homolog of NCBI NO: 33589706 NR Description: At1g34220 [Arabidopsis thaliana]
  misc_feature (28)..(179): Homolog of NCBI NO: 33589706 NR Description: At1g34220 [Arabidopsis thaliana]
  misc_feature (38)..(229): Homolog of NCBI NO: 40253290 NR Description: unknown protein [Oryza sativa (japonica
  misc_feature (28)..(331): Homolog of NCBI NO: 34911298 NR Description: P0519D04.18 [Oryza sativa (japonica
  misc_feature (28)..(232): Homolog of NCBI NO: 15218545 NR Description: hypothetical protein; protein id: At1g34220.1
  misc_feature (28)..(350): Homolog of NCBI NO: 21595428 NR Description: unknown [Arabidopsis thaliana]
  misc_feature (28)..(350): Homolog of NCBI NO: 18395668 NR Description: expressed protein

SEQ ID NO: 31550 - protein, 323 aa, Arabidopsis thaliana; identical to SEQ ID NO: 27960
  peptide (1)..(323): Ceres Seq. ID no. 12421639
  misc_feature (23)..(144): Pfam Name: Eukaryotic protein of unknown function, DUF292 Pfam Description: Eukaryotic protein of unknown function, DUF292
  misc_feature (4)..(262): Homolog of NCBI NO: 30688332 NR Description: expressed protein [Arabidopsis thaliana]
  misc_feature (1)..(200): Homolog of NCBI NO: 34910388 NR Description: P0692C11.15 [Oryza sativa (japonica
  misc_feature (23)..(205): Homolog of NCBI NO: 15237108 NR Description: putative protein; protein id: At4g35730.1
  misc_feature (154)..(205): Homolog of NCBI NO: 33589706 NR Description: At1g34220 [Arabidopsis thaliana]
  misc_feature (1)..(152): Homolog of NCBI NO: 33589706 NR Description: At1g34220 [Arabidopsis thaliana]
  misc_feature (11)..(202): Homolog of NCBI NO: 40253290 NR Description: unknown protein [Oryza sativa (japonica
  misc_feature (1)..(304): Homolog of NCBI NO: 34911298 NR Description: P0519D04.18 [Oryza sativa (japonica
  misc_feature (1)..(205): Homolog of NCBI NO: 15218545 NR Description: hypothetical protein; protein id: At1g34220.1
  misc_feature (1)..(323): Homolog of NCBI NO: 21595428 NR Description: unknown [Arabidopsis thaliana]
  misc_feature (1)..(323): Homolog of NCBI NO: 18395668 NR Description: expressed protein

SEQ ID NO: 31551 - protein, 296 aa, Arabidopsis thaliana; identical to SEQ ID NO: 27961
  peptide (1)..(296): Ceres Seq. ID no. 12421640
  misc_feature (1)..(117): Pfam Name: Eukaryotic protein of unknown function, DUF292 Pfam Description: Eukaryotic protein of unknown function, DUF292
  misc_feature (1)..(235): Homolog of NCBI NO: 30688332 NR Description: expressed protein [Arabidopsis thaliana]
  misc_feature (1)..(173): Homolog of NCBI NO: 34910388 NR Description: P0692C11.15 [Oryza sativa (japonica
  misc_feature (1)..(178): Homolog of NCBI NO: 15237108 NR Description: putative protein; protein id: At4g35730.1
  misc_feature (127)..(178): Homolog of NCBI NO: 33589706 NR Description: At1g34220 [Arabidopsis thaliana]
  misc_feature (1)..(125): Homolog of NCBI NO: 33589706 NR Description: At1g34220 [Arabidopsis thaliana]
  misc_feature (1)..(175): Homolog of NCBI NO: 40253290 NR Description: unknown protein [Oryza sativa (japonica
  misc_feature (1)..(277): Homolog of NCBI NO: 34911298 NR Description: P0519D04.18 [Oryza sativa (japonica
  misc_feature (1)..(178): Homolog of NCBI NO: 15218545 NR Description: hypothetical protein; protein id: At1g34220.1
  misc_feature (1)..(296): Homolog of NCBI NO: 21595428 NR Description: unknown [Arabidopsis thaliana]
  misc_feature (1)..(296): Homolog of NCBI NO: 18395668 NR Description: expressed protein

SEQ ID NO: 31552 - DNA, 1935 bp, Arabidopsis thaliana; identical to SEQ ID NO: 27962
  misc_feature (1)..(1935): Ceres Seq. ID no. 12371338
  misc_feature: MA Experiment ID: 108434 Result: Up-regulated in Transcription
  misc_feature: MA Experiment 108434 PARAMETER Experiment Name: At_Root_Tips_cDNA_P Parameter: Tissue Value: Root Tips
  misc_feature: MA Experiment ID: 108461 Result: Down-regulated in Transcription
  misc_feature: MA Experiment 108461 PARAMETER Experiment Name: At_Germinating_Seeds_cDNA_P Parameter: Age (day) Value: 1 vs. 0
  misc_feature: MA Experiment 108461 PARAMETER Experiment Name: At_Germinating_Seeds_cDNA_P Parameter: Tissue Value: Germinating Seeds
  misc_feature: MA Experiment ID: 108462 Result: Down-regulated in Transcription
  misc_feature: MA Experiment 108462 PARAMETER Experiment Name: At_Germinating_Seeds_cDNA_P Parameter: Age (day) Value: 2 vs. 0
  misc_feature: MA Experiment 108462 PARAMETER Experiment Name: At_Germinating_Seeds_cDNA_P Parameter: Tissue Value: Germinating Seeds
  misc_feature: MA Experiment ID: 108463 Result: Down-regulated in Transcription
  misc_feature: MA Experiment 108463 PARAMETER Experiment Name: At_Germinating_Seeds_cDNA_P Parameter: Age (day) Value: 3 vs. 0
  misc_feature: MA Experiment 108463 PARAMETER Experiment Name: At_Germinating_Seeds_cDNA_P Parameter: Tissue Value: Germinating Seeds
  misc_feature: MA Experiment ID: 108464 Result: Down-regulated in Transcription
  misc_feature: MA Experiment 108464 PARAMETER Experiment Name: At_Germinating_Seeds_cDNA_P Parameter: Age (day) Value: 4 vs. 0
  misc_feature: MA Experiment 108464 PARAMETER Experiment Name: At_Germinating_Seeds_cDNA_P Parameter: Tissue Value: Germinating Seeds
  misc_feature: MA Experiment ID: 108569 Result: Up-regulated in Transcription
  misc_feature: MA Experiment 108569 PARAMETER Experiment Name: At_0.001%_MeJA__cDNA_P Parameter: Timepoint (hr) Value: 6
  misc_feature: MA Experiment 108569 PARAMETER Experiment Name: At_0.001%_MeJA__cDNA_P Parameter: Tissue Value: Aerial
  misc_feature: MA Experiment 108569 PARAMETER Experiment Name: At_0.001%_MeJA__cDNA_P Parameter: Treatment Value: 0.001% MeJA vs. No Treatment
  misc_feature: MA Experiment ID: 108595 Result: Down-regulated in Transcription
  misc_feature: MA Experiment 108595 PARAMETER Experiment Name: At_Ler-pi_Ovule_cDNA_P Parameter: Plant Line Value: null
  misc_feature: MA Experiment ID: 20000224 Result: Down-regulated in Transcription
  misc_feature: MA Experiment ID: 20000227 Result: Up-regulated in Transcription
  misc_feature: MA Experiment 20000227 PARAMETER Experiment Name: At_Root-Tips-vs-Tops_P Parameter: Tissue Value: Root Tips vs. Root Tops
  misc_feature: MA Experiment ID: 20000437 Result: Down-regulated in Transcription
  misc_feature: MA Experiment 20000437 PARAMETER Experiment Name: At_Drought_P Parameter: Age (day) Value: 8
  misc_feature: MA Experiment 20000437 PARAMETER Experiment Name: At_Drought_P Parameter: Organism Value: A. thaliana
  misc_feature: MA Experiment 20000437 PARAMETER Experiment Name: At_Drought_P Parameter: Plant Line Value: WS
  misc_feature: MA Experiment 20000437 PARAMETER Experiment Name: At_Drought_P Parameter: Timepoint (hr) Value: 24
  misc_feature: MA Experiment 20000437 PARAMETER Experiment Name: At_Drought_P Parameter: Tissue Value: Whole Plant
  misc_feature: MA Experiment 20000437 PARAMETER Experiment Name: At_Drought_P Parameter: Treatment Value: Drought vs. No Drought
  misc_feature: MA Experiment ID: 20000452 Result: Down-regulated in Transcription
  misc_feature: MA Experiment 20000452 PARAMETER Experiment Name: At_CS6879_Shoots-Roots_P Parameter: Age (day) Value: 14
  misc_feature: MA Experiment 20000452 PARAMETER Experiment Name: At_CS6879_Shoots-Roots_P Parameter: Organism Value: A. thaliana
  misc_feature: MA Experiment 20000452 PARAMETER Experiment Name: At_CS6879_Shoots-Roots_P Parameter: Plant Line Value: CS6879 vs. WS
  misc_feature: MA Experiment 20000452 PARAMETER Experiment Name: At_CS6879_Shoots-Roots_P Parameter: Tissue Value: Shoots
  misc_feature: MA Experiment ID: 20001557 Result: Up-regulated in Transcription
  misc_feature: MA Experiment 20001557 PARAMETER Experiment Name: At_Drought_Soil_Dry_P Parameter: Age (day) Value: 27
  misc_feature: MA Experiment 20001557 PARAMETER Experiment Name: At_Drought_Soil_Dry_P Parameter: Organism Value: A. thaliana
  misc_feature: MA Experiment 20001557 PARAMETER Experiment Name: At_Drought_Soil_Dry_P Parameter: Plant Line Value: WS
  misc_feature: MA Experiment 20001557 PARAMETER Experiment Name: At_Drought_Soil_Dry_P Parameter: Post Timepoint (hr) Value: 3
  misc_feature: MA Experiment 20001557 PARAMETER Experiment Name: At_Drought_Soil_Dry_P Parameter: Post-Treatment Value: Re-Water vs. No Drought
  misc_feature: MA Experiment 20001557 PARAMETER Experiment Name: At_Drought_Soil_Dry_P Parameter: Timepoint (day) Value: 13
  misc_feature: MA Experiment 20001557 PARAMETER Experiment Name: At_Drought_Soil_Dry_P Parameter: Treatment Value: Drought vs. No Drought
  misc_feature: Phenotype: WHOLE PLANT Other
  misc_feature: Phenotype: WHOLE PLANT Other
  misc_feature: Phenotype: WHOLE PLANT Other
  misc_feature: Phenotype: WHOLE PLANT Other

SEQ ID NO: 31553 - protein, 536 aa, Arabidopsis thaliana; identical to SEQ ID NO: 27963
  peptide (1)..(536): Ceres Seq. ID no. 12371339
  misc_feature (40)..(536): Pfam Name: TCP-1/cpn60 chaperonin family Pfam Description: TCP-1/cpn60 chaperonin family
  misc_feature (1)..(536): Homolog of NCBI NO: 21595439 NR Description: chaperonin subunit, putative [Arabidopsis
  misc_feature (1)..(536): Homolog of NCBI NO: 15229595 NR Description: chaperonin subunit, putative

SEQ ID NO: 31554 - protein, 529 aa, Arabidopsis thaliana; identical to SEQ ID NO: 27964
  peptide (1)..(529): Ceres Seq. ID no. 12371340
  misc_feature (33)..(529): Pfam Name: TCP-1/cpn60 chaperonin family Pfam Description: TCP-1/cpn60 chaperonin family
  misc_feature (1)..(529): Homolog of NCBI NO: 21595439 NR Description: chaperonin subunit, putative [Arabidopsis
  misc_feature (1)..(529): Homolog of NCBI NO: 15229595 NR Description: chaperonin subunit, putative

SEQ ID NO: 31555 - protein, 484 aa, Arabidopsis thaliana; identical to SEQ ID NO: 27965
  peptide (1)..(484): Ceres Seq. ID no. 12371341
  misc_feature (1)..(484): Pfam Name: TCP-1/cpn60 chaperonin family Pfam Description: TCP-1/cpn60 chaperonin family
  misc_feature (1)..(484): Homolog of NCBI NO: 21595439 NR Description: chaperonin subunit, putative [Arabidopsis
  misc_feature (1)..(484): Homolog of NCBI NO: 15229595 NR Description: chaperonin subunit, putative

SEQ ID NO: 31556 - DNA, 1032 bp, Arabidopsis thaliana; identical to SEQ ID NO: 27966
  misc_feature (1)..(1032): Ceres Seq. ID no. 12332963
  misc_feature: MA Experiment ID: 108434 Result: Down-regulated in Transcription
  misc_feature: MA Experiment 108434 PARAMETER Experiment Name: At_Root_Tips_cDNA_P Parameter: Tissue Value: Root Tips
  misc_feature: MA Experiment ID: 108462 Result: Up-regulated in Transcription
  misc_feature: MA Experiment 108462 PARAMETER Experiment Name: At_Germinating_Seeds_cDNA_P Parameter: Age (day) Value: 2 vs. 0
  misc_feature: MA Experiment 108462 PARAMETER Experiment Name: At_Germinating_Seeds_cDNA_P Parameter: Tissue Value: Germinating Seeds
  misc_feature: MA Experiment ID: 108463 Result: Up-regulated in Transcription
  misc_feature: MA Experiment 108463 PARAMETER Experiment Name: At_Germinating_Seeds_cDNA_P Parameter: Age (day) Value: 3 vs. 0
  misc_feature: MA Experiment 108463 PARAMETER Experiment Name: At_Germinating_Seeds_cDNA_P Parameter: Tissue Value: Germinating Seeds
  misc_feature: MA Experiment ID: 108464 Result: Up-regulated in Transcription
  misc_feature: MA Experiment 108464 PARAMETER Experiment Name: At_Germinating_Seeds_cDNA_P Parameter: Age (day) Value: 4 vs. 0
  misc_feature: MA Experiment 108464 PARAMETER Experiment Name: At_Germinating_Seeds_cDNA_P Parameter: Tissue Value: Germinating Seeds
  misc_feature: MA Experiment ID: 108573 Result: Up-regulated in Transcription
  misc_feature: MA Experiment 108573 PARAMETER Experiment Name: At_Drought_cDNA_P Parameter: Timepoint (hr) Value: 6
  misc_feature: MA Experiment 108573 PARAMETER Experiment Name: At_Drought_cDNA_P Parameter: Tissue Value: Aerial
  misc_feature: MA Experiment 108573 PARAMETER Experiment Name: At_Drought_cDNA_P Parameter: Treatment Value: Drought vs. No Drought
  misc_feature: MA Experiment ID: 108576 Result: Down-regulated in Transcription
  misc_feature: MA Experiment 108576 PARAMETER Experiment Name: At_42deg_Heat_cDNA_P Parameter: Temperature (deg C) Value: 42 vs. 22
  misc_feature: MA Experiment 108576 PARAMETER Experiment Name: At_42deg_Heat_cDNA_P Parameter: Timepoint (hr) Value: 1
  misc_feature: MA Experiment 108576 PARAMETER Experiment Name: At_42deg_Heat_cDNA_P Parameter: Tissue Value: Aerial
  misc_feature: MA Experiment ID: 108577 Result: Down-regulated in Transcription
  misc_feature: MA Experiment 108577 PARAMETER Experiment Name: At_42deg_Heat_cDNA_P Parameter: Temperature (deg C) Value: 42 vs. 22
  misc_feature: MA Experiment 108577 PARAMETER Experiment Name: At_42deg_Heat_cDNA_P Parameter: Timepoint (hr) Value: 6
  misc_feature: MA Experiment 108577 PARAMETER Experiment Name: At_42deg_Heat_cDNA_P Parameter: Tissue Value: Aerial
  misc_feature: MA Experiment ID: 108579 Result: Up-regulated in Transcription
  misc_feature: MA Experiment 108579 PARAMETER Experiment Name: At_4deg_Cold_cDNA_P Parameter: Temperature (deg C) Value: 4 vs. 22
  misc_feature: MA Experiment 108579 PARAMETER Experiment Name: At_4deg_Cold_cDNA_P Parameter: Timepoint (hr) Value: 6
  misc_feature: MA Experiment 108579 PARAMETER Experiment Name: At_4deg_Cold_cDNA_P Parameter: Tissue Value: Aerial
  misc_feature: MA Experiment ID: 20000111 Result: Down-regulated in Transcription
  misc_feature: MA Experiment 20000111 PARAMETER Experiment Name: At_42deg_Heat_cDNA_P Parameter: Temperature (deg C) Value: 42 vs. 22
  misc_feature: MA Experiment 20000111 PARAMETER Experiment Name: At_42deg_Heat_cDNA_P Parameter: Timepoint (hr) Value: 6
  misc_feature: MA Experiment 20000111 PARAMETER Experiment Name: At_42deg_Heat_cDNA_P Parameter: Tissue Value: Aerial
  misc_feature: MA Experiment ID: 20000113 Result: Down-regulated in Transcription
  misc_feature: MA Experiment 20000113 PARAMETER Experiment Name: At_42deg_Heat_cDNA_P Parameter: Temperature (deg C) Value: 42 vs. 22
  misc_feature: MA Experiment 20000113 PARAMETER Experiment Name: At_42deg_Heat_cDNA_P Parameter: Timepoint (hr) Value: 8
  misc_feature: MA Experiment 20000113 PARAMETER Experiment Name: At_42deg_Heat_cDNA_P Parameter: Tissue Value: Aerial
  misc_feature: MA Experiment ID: 20000173 Result: Down-regulated in Transcription
  misc_feature: MA Experiment 20000173 PARAMETER Experiment Name: At_42deg_Heat_P Parameter: Age (day) Value: 14
  misc_feature: MA Experiment 20000173 PARAMETER Experiment Name: At_42deg_Heat_P Parameter: Organism Value: A. thaliana
  misc_feature: MA Experiment 20000173 PARAMETER Experiment Name: At_42deg_Heat_P Parameter: Plant Line Value: WS
  misc_feature: MA Experiment 20000173 PARAMETER Experiment Name: At_42deg_Heat_P Parameter: Temperature (deg C) Value: 42 vs. 22
  misc_feature: MA Experiment 20000173 PARAMETER Experiment Name: At_42deg_Heat_P Parameter: Timepoint (hr) Value: 6
  misc_feature: MA Experiment 20000173 PARAMETER Experiment Name: At_42deg_Heat_P Parameter: Tissue Value: Aerial
  misc_feature: MA Experiment ID: 20000180 Result: Up-regulated in Transcription
  misc_feature: MA Experiment 20000180 PARAMETER Experiment Name: At_Germinating_Seeds_P Parameter: Age (hr) Value: 24 vs. 0
  misc_feature: MA Experiment 20000180 PARAMETER Experiment Name: At_Germinating_Seeds_P Parameter: Tissue Value: Germinating Seeds
  misc_feature: MA Experiment ID: 20000224 Result: Up-regulated in Transcription
  misc_feature: MA Experiment ID: 20000495 Result: Down-regulated in Transcription
  misc_feature: MA Experiment 20000495 PARAMETER Experiment Name: At_Guard_Cells_P Parameter: Harvest Date Value: 8/2/2002
  misc_feature: MA Experiment 20000495 PARAMETER Experiment Name: At_Guard_Cells_P Parameter: Organism Value: A. thaliana
  misc_feature: MA Experiment 20000495 PARAMETER Experiment Name: At_Guard_Cells_P Parameter: Tissue Value: Guard Cells vs. Leaves
  misc_feature: MA Experiment ID: 20001248 Result: Down-regulated in Transcription
  misc_feature: MA Experiment 20001248 PARAMETER Experiment Name: At_Far-red-induction_P Parameter: Age (day) Value: 7
  misc_feature: MA Experiment 20001248 PARAMETER Experiment Name: At_Far-red-induction_P Parameter: Light Value: Far-red vs. White
  misc_feature: MA Experiment 20001248 PARAMETER Experiment Name: At_Far-red-induction_P Parameter: Organism Value: A. thaliana
  misc_feature: MA Experiment 20001248 PARAMETER Experiment Name: At_Far-red-induction_P Parameter: Plant Line Value: Columbia
  misc_feature: MA Experiment 20001248 PARAMETER Experiment Name: At_Far-red-induction_P Parameter: Timepoint (hr) Value: 4
  misc_feature: MA Experiment 20001248 PARAMETER Experiment Name: At_Far-red-induction_P Parameter: Tissue Value: Whole Plant
  misc_feature: MA Experiment ID: 20001451 Result: Down-regulated in Transcription
  misc_feature: MA Experiment 20001451 PARAMETER Experiment Name: At_Far-red-induction_P Parameter: Age (day) Value: 7
  misc_feature: MA Experiment 20001451 PARAMETER Experiment Name: At_Far-red-induction_P Parameter: Light Value: Far-red vs. White
  misc_feature: MA Experiment 20001451 PARAMETER Experiment Name: At_Far-red-induction_P Parameter: Organism Value: A. thaliana
  misc_feature: MA Experiment 20001451 PARAMETER Experiment Name: At_Far-red-induction_P Parameter: Plant Line Value: Columbia
  misc_feature: MA Experiment 20001451 PARAMETER Experiment Name: At_Far-red-induction_P Parameter: Timepoint (hr) Value: 24
  misc_feature: MA Experiment 20001451 PARAMETER Experiment Name: At_Far-red-induction_P Parameter: Tissue Value: Whole Plant
  misc_feature: MA Experiment ID: 20001558 Result: Down-regulated in Transcription
  misc_feature: MA Experiment 20001558 PARAMETER Experiment Name: At_Drought_Soil_Dry_P Parameter: Age (day) Value: 27
  misc_feature: MA Experiment 20001558 PARAMETER Experiment Name: At_Drought_Soil_Dry_P Parameter: Organism Value: A. thaliana
  misc_feature: MA Experiment 20001558 PARAMETER Experiment Name: At_Drought_Soil_Dry_P Parameter: Plant Line Value: WS
  misc_feature: MA Experiment 20001558 PARAMETER Experiment Name: At_Drought_Soil_Dry_P Parameter: Post Timepoint (hr) Value: 6
  misc_feature: MA Experiment 20001558 PARAMETER Experiment Name: At_Drought_Soil_Dry_P Parameter: Post-Treatment Value: Re-Water vs. No Drought
  misc_feature: MA Experiment 20001558 PARAMETER Experiment Name: At_Drought_Soil_Dry_P Parameter: Timepoint (day) Value: 13
  misc_feature: MA Experiment 20001558 PARAMETER Experiment Name: At_Drought_Soil_Dry_P Parameter: Treatment Value: Drought vs. No Drought

SEQ ID NO: 31557 - protein, 281 aa, Arabidopsis thaliana; identical to SEQ ID NO: 27967
  peptide (1)..(281): Ceres Seq. ID no. 12332964
  misc_feature (68)..(280): Pfam Name: O-methyltransferase Pfam Description: O-methyltransferase
  misc_feature (35)..(280): Homolog of NCBI NO: 13249171 NR Description: caffeoyl-CoA 3-O-methyltransferase
  misc_feature (43)..(280): Homolog of NCBI NO: 7271916 NR Description: caffeoyl-CoA O-methyltransferase [Populus
  misc_feature (35)..(281): Homolog of NCBI NO: 30580381 NR Description: Caffeoyl-CoA O-methyltransferase 2
  misc_feature (47)..(281): Homolog of NCBI NO: 2511737 NR Description: caffeoyl-CoA 3-O-methyltransferase 5 [Nicotiana
  misc_feature (47)..(281): Homolog of NCBI NO: 30580324 NR Description: Caffeoyl-CoA O-methyltransferase 5
  misc_feature (35)..(280): Homolog of NCBI NO: 30580341 NR Description: Caffeoyl-CoA O-methyltransferase
  misc_feature (35)..(280): Homolog of NCBI NO: 30580333 NR Description: Caffeoyl-CoA O-methyltransferase 1
  misc_feature (35)..(280): Homolog of NCBI NO: 3023436 NR Description: Caffeoyl-CoA O-methyltransferase
  misc_feature (23)..(281): Homolog of NCBI NO: 21595512 NR Description: caffeoyl-CoA O-methyltransferase-like protein
  misc_feature (23)..(281): Homolog of NCBI NO: 15235213 NR Description: caffeoyl-CoA 3-O-methyltransferase

SEQ ID NO: 31558 - protein, 259 aa, Arabidopsis thaliana; identical to SEQ ID NO: 27968
  peptide (1)..(259): Ceres Seq. ID no. 12332965
  misc_feature (46)..(258): Pfam Name: O-methyltransferase Pfam Description: O-methyltransferase
  misc_feature (13)..(258): Homolog of NCBI NO: 13249171 NR Description: caffeoyl-CoA 3-O-methyltransferase
  misc_feature (21)..(258): Homolog of NCBI NO: 7271916 NR Description: caffeoyl-CoA O-methyltransferase [Populus
  misc_feature (13)..(259): Homolog of NCBI NO: 30580381 NR Description: Caffeoyl-CoA O-methyltransferase 2
  misc_feature (25)..(259): Homolog of NCBI NO: 2511737 NR Description: caffeoyl-CoA 3-O-methyltransferase 5 [Nicotiana
  misc_feature (25)..(259): Homolog of NCBI NO: 30580324 NR Description: Caffeoyl-CoA O-methyltransferase 5
  misc_feature (13)..(258): Homolog of NCBI NO: 30580341 NR Description: Caffeoyl-CoA O-methyltransferase
  misc_feature (13)..(258): Homolog of NCBI NO: 30580333 NR Description: Caffeoyl-CoA O-methyltransferase 1
  misc_feature (13)..(258): Homolog of NCBI NO: 3023436 NR Description: Caffeoyl-CoA O-methyltransferase
  misc_feature (1)..(259): Homolog of NCBI NO: 21595512 NR Description: caffeoyl-CoA O-methyltransferase-like protein
  misc_feature (1)..(259): Homolog of NCBI NO: 15235213 NR Description: caffeoyl-CoA 3-O-methyltransferase

SEQ ID NO: 31559 - protein, 202 aa, Arabidopsis thaliana; identical to SEQ ID NO: 27969
  peptide (1)..(202): Ceres Seq. ID no. 12332966
  misc_feature (1)..(201): Pfam Name: O-methyltransferase Pfam Description: O-methyltransferase
  misc_feature (1)..(201): Homolog of NCBI NO: 13249171 NR Description: caffeoyl-CoA 3-O-methyltransferase
  misc_feature (1)..(201): Homolog of NCBI NO: 7271916 NR Description: caffeoyl-CoA O-methyltransferase [Populus
  misc_feature (1)..(202): Homolog of NCBI NO: 30580381 NR Description: Caffeoyl-CoA O-methyltransferase 2
  misc_feature (1)..(202): Homolog of NCBI NO: 2511737 NR Description: caffeoyl-CoA 3-O-methyltransferase 5 [Nicotiana
  misc_feature (1)..(202): Homolog of NCBI NO: 30580324 NR Description: Caffeoyl-CoA O-methyltransferase 5
  misc_feature (1)..(201): Homolog of NCBI NO: 30580341 NR Description: Caffeoyl-CoA O-methyltransferase
  misc_feature (1)..(201): Homolog of NCBI NO: 30580333 NR Description: Caffeoyl-CoA O-methyltransferase 1
  misc_feature (1)..(201): Homolog of NCBI NO: 3023436 NR Description: Caffeoyl-CoA O-methyltransferase
  misc_feature (1)..(202): Homolog of NCBI NO: 21595512 NR Description: caffeoyl-CoA O-methyltransferase-like protein
  misc_feature (1)..(202): Homolog of NCBI NO: 15235213 NR Description: caffeoyl-CoA 3-O-methyltransferase

SEQ ID NO: 31560 - DNA, 998 bp, Arabidopsis thaliana; identical to SEQ ID NO: 27970
  misc_feature (1)..(998): Ceres Seq. ID no. 12325548
  misc_feature: MA Experiment ID: 108462 Result: Up-regulated in Transcription
  misc_feature: MA Experiment 108462 PARAMETER Experiment Name: At_Germinating_Seeds_cDNA_P Parameter: Age (day) Value: 2 vs. 0
  misc_feature: MA Experiment 108462 PARAMETER Experiment Name: At_Germinating_Seeds_cDNA_P Parameter: Tissue Value: Germinating Seeds
  misc_feature: MA Experiment ID: 108463 Result: Up-regulated in Transcription
  misc_feature: MA Experiment 108463 PARAMETER Experiment Name: At_Germinating_Seeds_cDNA_P Parameter: Age (day) Value: 3 vs. 0
  misc_feature: MA Experiment 108463 PARAMETER Experiment Name: At_Germinating_Seeds_cDNA_P Parameter: Tissue Value: Germinating Seeds
  misc_feature: MA Experiment ID: 108464 Result: Up-regulated in Transcription
  misc_feature: MA Experiment 108464 PARAMETER Experiment Name: At_Germinating_Seeds_cDNA_P Parameter: Age (day) Value: 4 vs. 0
  misc_feature: MA Experiment 108464 PARAMETER Experiment Name: At_Germinating_Seeds_cDNA_P Parameter: Tissue Value: Germinating Seeds
  misc_feature: MA Experiment ID: 108572 Result: Up-regulated in Transcription
  misc_feature: MA Experiment 108572 PARAMETER Experiment Name: At_Drought_cDNA_P Parameter: Timepoint (hr) Value: 1
  misc_feature: MA Experiment 108572 PARAMETER Experiment Name: At_Drought_cDNA_P Parameter: Tissue Value: Aerial
  misc_feature: MA Experiment 108572 PARAMETER Experiment Name: At_Drought_cDNA_P Parameter: Treatment Value: Drought vs. No Drought
  misc_feature: MA Experiment ID: 108579 Result: Up-regulated in Transcription
  misc_feature: MA Experiment 108579 PARAMETER Experiment Name: At_4deg_Cold_cDNA_P Parameter: Temperature (deg C) Value: 4 vs. 22
  misc_feature: MA Experiment 108579 PARAMETER Experiment Name: At_4deg_Cold_cDNA_P Parameter: Timepoint (hr) Value: 6
  misc_feature: MA Experiment 108579 PARAMETER Experiment Name: At_4deg_Cold_cDNA_P Parameter: Tissue Value: Aerial
  misc_feature: MA Experiment ID: 108607 Result: Up-regulated in Transcription
  misc_feature: MA Experiment 108607 PARAMETER Experiment Name: At_100uM_ABA_cDNA_P Parameter: Timepoint (hr) Value: 4
  misc_feature: MA Experiment 108607 PARAMETER Experiment Name: At_100uM_ABA_cDNA_P Parameter: Tissue Value: Aerial
  misc_feature: MA Experiment 108607 PARAMETER Experiment Name: At_100uM_ABA_cDNA_P Parameter: Treatment Value: 100uM ABA vs. No Treatment
  misc_feature: MA Experiment ID: 20000069 Result: Down-regulated in Transcription
  misc_feature: MA Experiment 20000069 PARAMETER Experiment Name: At_100uM_ABA_Mutants_cDNA_P Parameter: Plant Line Value: CS23
  misc_feature: MA Experiment 20000069 PARAMETER Experiment Name: At_100uM_ABA_Mutants_cDNA_P Parameter: Timepoint (hr) Value: 6
  misc_feature: MA Experiment 20000069 PARAMETER Experiment Name: At_100uM_ABA_Mutants_cDNA_P Parameter: Tissue Value: Aerial
  misc_feature: MA Experiment 20000069 PARAMETER Experiment Name: At_100uM_ABA_Mutants_cDNA_P Parameter: Treatment Value: 100uM ABA vs. No Treatment
  misc_feature: MA Experiment ID: 20000071 Result: Down-regulated in Transcription
  misc_feature: MA Experiment 20000071 PARAMETER Experiment Name: At_100uM_ABA_Mutants_cDNA_P Parameter: Plant Line Value: CS8104
  misc_feature: MA Experiment 20000071 PARAMETER Experiment Name: At_100uM_ABA_Mutants_cDNA_P Parameter: Timepoint (hr) Value: 6
  misc_feature: MA Experiment 20000071 PARAMETER Experiment Name: At_100uM_ABA_Mutants_cDNA_P Parameter: Tissue Value: Aerial
  misc_feature: MA Experiment 20000071 PARAMETER Experiment Name: At_100uM_ABA_Mutants_cDNA_P Parameter: Treatment Value: 100uM ABA vs. No Treatment
  misc_feature: MA Experiment ID: 20000087 Result: Down-regulated in Transcription
  misc_feature: MA Experiment 20000087 PARAMETER Experiment Name: At_100uM_ABA_Mutants_cDNA_P Parameter: Plant Line Value: WS
  misc_feature: MA Experiment 20000087 PARAMETER Experiment Name: At_100uM_ABA_Mutants_cDNA_P Parameter: Timepoint (hr) Value: 6
  misc_feature: MA Experiment 20000087 PARAMETER Experiment Name: At_100uM_ABA_Mutants_cDNA_P Parameter: Tissue Value: Aerial
  misc_feature: MA Experiment 20000087 PARAMETER Experiment Name: At_100uM_ABA_Mutants_cDNA_P Parameter: Treatment Value: 100uM ABA vs. No Treatment
  misc_feature: MA Experiment ID: 20000089 Result: Down-regulated in Transcription
  misc_feature: MA Experiment ID: 20000090 Result: Down-regulated in Transcription
  misc_feature: MA Experiment ID: 20000179 Result: Up-regulated in Transcription
  misc_feature: MA Experiment 20000179 PARAMETER Experiment Name: At_Germinating_Seeds_P Parameter: Age (hr) Value: 6 vs. 0
  misc_feature: MA Experiment 20000179 PARAMETER Experiment Name: At_Germinating_Seeds_P Parameter: Tissue Value: Germinating Seeds
  misc_feature: MA Experiment ID: 20000184 Result: Up-regulated in Transcription
  misc_feature: MA Experiment 20000184 PARAMETER Experiment Name: At_Shoots__P Parameter: Age (day) Value: 7
  misc_feature: MA Experiment 20000184 PARAMETER Experiment Name: At_Shoots__P Parameter: Tissue Value: Shoots vs. Whole Plant
  misc_feature: MA Experiment ID: 20000224 Result: Up-regulated in Transcription
  misc_feature: MA Experiment ID: 20000234 Result: Up-regulated in Transcription
  misc_feature: MA Experiment 20000234 PARAMETER Experiment Name: At_Siliques_P Parameter: Age (day) Value: 21
  misc_feature: MA Experiment 20000234 PARAMETER Experiment Name: At_Siliques_P Parameter: Organism Value: A. thaliana
  misc_feature: MA Experiment 20000234 PARAMETER Experiment Name: At_Siliques_P Parameter: Plant Line Value: WS
  misc_feature: MA Experiment 20000234 PARAMETER Experiment Name: At_Siliques_P Parameter: Tissue Value: Less Than 5mm Siliques vs. Whole Plant
  misc_feature: MA Experiment ID: 20000264 Result: Up-regulated in Transcription
  misc_feature: MA Experiment 20000264 PARAMETER Experiment Name: At_Open_Flower_P Parameter: Age (day) Value: 21
  misc_feature: MA Experiment 20000264 PARAMETER Experiment Name: At_Open_Flower_P Parameter: Plant Line Value: WS
  misc_feature: MA Experiment 20000264 PARAMETER Experiment Name: At_Open_Flower_P Parameter: Tissue Value: Open Flower vs. Whole Plant
  misc_feature: MA Experiment ID: 20000265 Result: Up-regulated in Transcription
  misc_feature: MA Experiment 20000265 PARAMETER Experiment Name: At_Open_Flower_P Parameter: Age (day) Value: 21
  misc_feature: MA Experiment 20000265 PARAMETER Experiment Name: At_Open_Flower_P Parameter: Plant Line Value: WS
  misc_feature: MA Experiment 20000265 PARAMETER Experiment Name: At_Open_Flower_P Parameter: Tissue Value: Closed Flower vs. Whole Plant
  misc_feature: MA Experiment ID: 20000286 Result: Up-regulated in Transcription
  misc_feature: MA Experiment 20000286 PARAMETER Experiment Name: At_Open_Flower_P Parameter: Age (day) Value: 21
  misc_feature: MA Experiment 20000286 PARAMETER Experiment Name: At_Open_Flower_P Parameter: Plant Line Value: WS
  misc_feature: MA Experiment 20000286 PARAMETER Experiment Name: At_Open_Flower_P Parameter: Tissue Value: Half Open vs. Whole Plant
  misc_feature: MA Experiment ID: 20000794 Result: Up-regulated in Transcription
  misc_feature: MA Experiment 20000794 PARAMETER Experiment Name: At_Petals_P Parameter: Age (day) Value: 23-25 days
  misc_feature: MA Experiment 20000794 PARAMETER Experiment Name: At_Petals_P Parameter: Plant Line Value: WS
  misc_feature: MA Experiment 20000794 PARAMETER Experiment Name: At_Petals_P Parameter: Tissue Value: Petals vs. Whole plant
  misc_feature: MA Experiment ID: 20001248 Result: Down-regulated in Transcription
  misc_feature: MA Experiment 20001248 PARAMETER Experiment Name: At_Far-red-induction_P Parameter: Age (day) Value: 7
  misc_feature: MA Experiment 20001248 PARAMETER Experiment Name: At_Far-red-induction_P Parameter: Light Value: Far-red vs. White
  misc_feature: MA Experiment 20001248 PARAMETER Experiment Name: At_Far-red-induction_P Parameter: Organism Value: A. thaliana
  misc_feature: MA Experiment 20001248 PARAMETER Experiment Name: At_Far-red-induction_P Parameter: Plant Line Value: Columbia
  misc_feature: MA Experiment 20001248 PARAMETER Experiment Name: At_Far-red-induction_P Parameter: Timepoint (hr) Value: 4
  misc_feature: MA Experiment 20001248 PARAMETER Experiment Name: At_Far-red-induction_P Parameter: Tissue Value: Whole Plant
  misc_feature: MA Experiment ID: 20001450 Result: Down-regulated in Transcription
  misc_feature: MA Experiment 20001450 PARAMETER Experiment Name: At_Far-red-induction_P Parameter: Age (day) Value: 7
  misc_feature: MA Experiment 20001450 PARAMETER Experiment Name: At_Far-red-induction_P Parameter: Light Value: Far-red vs. White
  misc_feature: MA Experiment 20001450 PARAMETER Experiment Name: At_Far-red-induction_P Parameter: Organism Value: A. thaliana
  misc_feature: MA Experiment 20001450 PARAMETER Experiment Name: At_Far-red-induction_P Parameter: Plant Line Value: Columbia
  misc_feature: MA Experiment 20001450 PARAMETER Experiment Name: At_Far-red-induction_P Parameter: Timepoint (hr) Value: 8
  misc_feature: MA Experiment 20001450 PARAMETER Experiment Name: At_Far-red-induction_P Parameter: Tissue Value: Whole Plant
  misc_feature: MA Experiment ID: 20001451 Result: Down-regulated in Transcription
  misc_feature: MA Experiment 20001451 PARAMETER Experiment Name: At_Far-red-induction_P Parameter: Age (day) Value: 7
  misc_feature: MA Experiment 20001451 PARAMETER Experiment Name: At_Far-red-induction_P Parameter: Light Value: Far-red vs. White
  misc_feature: MA Experiment 20001451 PARAMETER Experiment Name: At_Far-red-induction_P Parameter: Organism Value: A. thaliana
  misc_feature: MA Experiment 20001451 PARAMETER Experiment Name: At_Far-red-induction_P Parameter: Plant Line Value: Columbia
  misc_feature: MA Experiment 20001451 PARAMETER Experiment Name: At_Far-red-induction_P Parameter: Timepoint (hr) Value: 24
  misc_feature: MA Experiment 20001451 PARAMETER Experiment Name: At_Far-red-induction_P Parameter: Tissue Value: Whole Plant

SEQ ID NO: 31561 - protein, 218 aa, Arabidopsis thaliana; identical to SEQ ID NO: 27971
  peptide (1)..(218): Ceres Seq. ID no. 12325549
  misc_feature (24)..(218): Homolog of NCBI NO: 40642617 NR Description: soluble pyrophosphatase [Beta vulgaris]
  misc_feature (17)..(218): Homolog of NCBI NO: 15223288 NR Description: soluble inorganic pyrophosphatase, putative
  misc_feature (5)..(218): Homolog of NCBI NO: 4033424 NR Description: Soluble inorganic pyrophosphatase (Pyrophosphate
  misc_feature (24)..(218): Homolog of NCBI NO: 2500047 NR Description: Soluble inorganic pyrophosphatase (Pyrophosphate
  misc_feature (1)..(218): Homolog of NCBI NO: 38345829 NR Description: OSJNBa0070M12.12 [Oryza sativa (japonica
  misc_feature (23)..(218): Homolog of NCBI NO: 21593570 NR Description: inorganic pyrophosphatase-like protein
  misc_feature (23)..(218): Homolog of NCBI NO: 15231849 NR Description: inorganic pyrophosphatase -like protein
  misc_feature (1)..(218): Homolog of NCBI NO: 21595532 NR Description: putative inorganic pyrophosphatase [Arabidopsis
  misc_feature (1)..(218): Homolog of NCBI NO: 15224134 NR Description: putative inorganic pyrophosphatase
  misc_feature (1)..(208): Homolog of NCBI NO: 81645 NR Description: inorganic diphosphatase (EC 3.6.1.1) -

SEQ ID NO: 31562 - protein, 111 aa, Arabidopsis thaliana; identical to SEQ ID NO: 27972
  peptide (1)..(111): Ceres Seq. ID no. 12325550
  misc_feature (1)..(111): Homolog of NCBI NO: 40642617 NR Description: soluble pyrophosphatase [Beta vulgaris]
  misc_feature (1)..(111): Homolog of NCBI NO: 15223288 NR Description: soluble inorganic pyrophosphatase, putative
  misc_feature (1)..(111): Homolog of NCBI NO: 4033424 NR Description: Soluble inorganic pyrophosphatase (Pyrophosphate
  misc_feature (1)..(111): Homolog of NCBI NO: 2500047 NR Description: Soluble inorganic pyrophosphatase (Pyrophosphate
  misc_feature (1)..(111): Homolog of NCBI NO: 38345829 NR Description: OSJNBa0070M12.12 [Oryza sativa (japonica
  misc_feature (1)..(111): Homolog of NCBI NO: 21593570 NR Description: inorganic pyrophosphatase-like protein
  misc_feature (1)..(111): Homolog of NCBI NO: 15231849 NR Description: inorganic pyrophosphatase -like protein
  misc_feature (1)..(111): Homolog of NCBI NO: 21595532 NR Description: putative inorganic pyrophosphatase [Arabidopsis
  misc_feature (1)..(111): Homolog of NCBI NO: 15224134 NR Description: putative inorganic pyrophosphatase
  misc_feature (1)..(101): Homolog of NCBI NO: 81645 NR Description: inorganic diphosphatase (EC 3.6.1.1) -

SEQ ID NO: 31563 - DNA, 908 bp, Arabidopsis thaliana; identical to SEQ ID NO: 27973
  misc_feature (1)..(908): Ceres Seq. ID no. 12394059
  misc_feature: MA Experiment ID: 108488 Result: Down-regulated in Transcription
  misc_feature: MA Experiment ID: 108595 Result: Down-regulated in Transcription
  misc_feature: MA Experiment 108595 PARAMETER Experiment Name: At_Ler-pi_Ovule_cDNA_P Parameter: Plant Line Value: null
  misc_feature: MA Experiment ID: 20000227 Result: Down-regulated in Transcription
  misc_feature: MA Experiment 20000227 PARAMETER Experiment Name: At_Root-Tips-vs-Tops_P Parameter: Tissue Value: Root Tips vs. Root Tops
  misc_feature: MA Experiment ID: 20001559 Result: Down-regulated in Transcription
  misc_feature: MA Experiment 20001559 PARAMETER Experiment Name: At_Drought_Soil_Dry_P Parameter: Age (day) Value: 28
  misc_feature: MA Experiment 20001559 PARAMETER Experiment Name: At_Drought_Soil_Dry_P Parameter: Organism Value: A. thaliana
  misc_feature: MA Experiment 20001559 PARAMETER Experiment Name: At_Drought_Soil_Dry_P Parameter: Plant Line Value: WS
  misc_feature: MA Experiment 20001559 PARAMETER Experiment Name: At_Drought_Soil_Dry_P Parameter: Post Timepoint (hr) Value: 29
  misc_feature: MA Experiment 20001559 PARAMETER Experiment Name: At_Drought_Soil_Dry_P Parameter: Post-Treatment Value: Re-Water vs. No Drought
  misc_feature: MA Experiment 20001559 PARAMETER Experiment Name: At_Drought_Soil_Dry_P Parameter: Timepoint (day) Value: 14
  misc_feature: MA Experiment 20001559 PARAMETER Experiment Name: At_Drought_Soil_Dry_P Parameter: Treatment Value: Drought vs. No Drought

SEQ ID NO: 31564 - protein, 191 aa, Arabidopsis thaliana; identical to SEQ ID NO: 27974
  peptide (1)..(191): Ceres Seq. ID no. 12394060
  misc_feature (1)..(186): Homolog of NCBI NO: 8099143 NR Description: hypothetical protein [Oryza sativa]
  misc_feature (1)..(191): Homolog of NCBI NO: 15235839 NR Description: putative protein

SEQ ID NO: 31565 - protein, 188 aa, Arabidopsis thaliana; identical to SEQ ID NO: 27975
  peptide (1)..(188): Ceres Seq. ID no. 12394061
  misc_feature (1)..(183): Homolog of NCBI NO: 8099143 NR Description: hypothetical protein [Oryza sativa]
  misc_feature (1)..(188): Homolog of NCBI NO: 15235839 NR Description: putative protein

SEQ ID NO: 31566 - DNA, 853 bp, Arabidopsis thaliana; identical to SEQ ID NO: 27976
  misc_feature (1)..(853): Ceres Seq. ID no. 12421660
  misc_feature: MA Experiment ID: 108434 Result: Down-regulated in Transcription
  misc_feature: MA Experiment 108434 PARAMETER Experiment Name: At_Root_Tips_cDNA_P Parameter: Tissue Value: Root Tips
  misc_feature: MA Experiment ID: 108573 Result: Up-regulated in Transcription
  misc_feature: MA Experiment 108573 PARAMETER Experiment Name: At_Drought_cDNA_P Parameter: Timepoint (hr) Value: 6
  misc_feature: MA Experiment 108573 PARAMETER Experiment Name: At_Drought_cDNA_P Parameter: Tissue Value: Aerial
  misc_feature: MA Experiment 108573 PARAMETER Experiment Name: At_Drought_cDNA_P Parameter: Treatment Value: Drought vs. No Drought
  misc_feature: MA Experiment ID: 108585 Result: Up-regulated in Transcription
  misc_feature: MA Experiment 108585 PARAMETER Experiment Name: At_5mM_NaNP_cDNA_P Parameter: Timepoint (hr) Value: 6
  misc_feature: MA Experiment 108585 PARAMETER Experiment Name: At_5mM_NaNP_cDNA_P Parameter: Tissue Value: Aerial
  misc_feature: MA Experiment 108585 PARAMETER Experiment Name: At_5mM_NaNP_cDNA_P Parameter: Treatment Value: null
  misc_feature: MA Experiment ID: 20000069 Result: Up-regulated in Transcription
  misc_feature: MA Experiment 20000069 PARAMETER Experiment Name: At_100uM_ABA_Mutants_cDNA_P Parameter: Plant Line Value: CS23
  misc_feature: MA Experiment 20000069 PARAMETER Experiment Name: At_100uM_ABA_Mutants_cDNA_P Parameter: Timepoint (hr) Value: 6
  misc_feature: MA Experiment 20000069 PARAMETER Experiment Name: At_100uM_ABA_Mutants_cDNA_P Parameter: Tissue Value: Aerial
  misc_feature: MA Experiment 20000069 PARAMETER Experiment Name: At_100uM_ABA_Mutants_cDNA_P Parameter: Treatment Value: 100uM ABA vs. No Treatment
  misc_feature: MA Experiment ID: 20000070 Result: Up-regulated in Transcription
  misc_feature: MA Experiment 20000070 PARAMETER Experiment Name: At_100uM_ABA_Mutants_cDNA_P Parameter: Plant Line Value: CS24
  misc_feature: MA Experiment 20000070 PARAMETER Experiment Name: At_100uM_ABA_Mutants_cDNA_P Parameter: Timepoint (hr) Value: 6
  misc_feature: MA Experiment 20000070 PARAMETER Experiment Name: At_100uM_ABA_Mutants_cDNA_P Parameter: Tissue Value: Aerial
  misc_feature: MA Experiment 20000070 PARAMETER Experiment Name: At_100uM_ABA_Mutants_cDNA_P Parameter: Treatment Value: 100uM ABA vs. No Treatment
  misc_feature: MA Experiment ID: 20000071 Result: Up-regulated in Transcription
  misc_feature: MA Experiment 20000071 PARAMETER Experiment Name: At_100uM_ABA_Mutants_cDNA_P Parameter: Plant Line Value: CS8104
  misc_feature: MA Experiment 20000071 PARAMETER Experiment Name: At_100uM_ABA_Mutants_cDNA_P Parameter: Timepoint (hr) Value: 6
  misc_feature: MA Experiment 20000071 PARAMETER Experiment Name: At_100uM_ABA_Mutants_cDNA_P Parameter: Tissue Value: Aerial
  misc_feature: MA Experiment 20000071 PARAMETER Experiment Name: At_100uM_ABA_Mutants_cDNA_P Parameter: Treatment Value: 100uM ABA vs. No Treatment
  misc_feature: MA Experiment ID: 20000117 Result: Up-regulated in Transcription
  misc_feature: MA Experiment 20000117 PARAMETER Experiment Name: At_100uM_ABA_Mutants_cDNA_P Parameter: Plant Line Value: Columbia
  misc_feature: MA Experiment 20000117 PARAMETER Experiment Name: At_100uM_ABA_Mutants_cDNA_P Parameter: Timepoint (hr) Value: 6
  misc_feature: MA Experiment 20000117 PARAMETER Experiment Name: At_100uM_ABA_Mutants_cDNA_P Parameter: Tissue Value: Aerial
  misc_feature: MA Experiment 20000117 PARAMETER Experiment Name: At_100uM_ABA_Mutants_cDNA_P Parameter: Treatment Value: 100uM ABA vs. No Treatment
  misc_feature: MA Experiment ID: 20000173 Result: Down-regulated in Transcription
  misc_feature: MA Experiment 20000173 PARAMETER Experiment Name: At_42deg_Heat_P Parameter: Age (day) Value: 14
  misc_feature: MA Experiment 20000173 PARAMETER Experiment Name: At_42deg_Heat_P Parameter: Organism Value: A. thaliana
  misc_feature: MA Experiment 20000173 PARAMETER Experiment Name: At_42deg_Heat_P Parameter: Plant Line Value: WS
  misc_feature: MA Experiment 20000173 PARAMETER Experiment Name: At_42deg_Heat_P Parameter: Temperature (deg C) Value: 42 vs. 22
  misc_feature: MA Experiment 20000173 PARAMETER Experiment Name: At_42deg_Heat_P Parameter: Timepoint (hr) Value: 6
  misc_feature: MA Experiment 20000173 PARAMETER Experiment Name: At_42deg_Heat_P Parameter: Tissue Value: Aerial
  misc_feature: MA Experiment ID: 20000224 Result: Down-regulated in Transcription
  misc_feature: MA Experiment ID: 20000227 Result: Down-regulated in Transcription
  misc_feature: MA Experiment 20000227 PARAMETER Experiment Name: At_Root-Tips-vs-Tops_P Parameter: Tissue Value: Root Tips vs. Root Tops
  misc_feature: MA Experiment ID: 20000234 Result: Down-regulated in Transcription
  misc_feature: MA Experiment 20000234 PARAMETER Experiment Name: At_Siliques_P Parameter: Age (day) Value: 21
  misc_feature: MA Experiment 20000234 PARAMETER Experiment Name: At_Siliques_P Parameter: Organism Value: A. thaliana
  misc_feature: MA Experiment 20000234 PARAMETER Experiment Name: At_Siliques_P Parameter: Plant Line Value: WS
  misc_feature: MA Experiment 20000234 PARAMETER Experiment Name: At_Siliques_P Parameter: Tissue Value: Less Than 5mm Siliques vs. Whole Plant
  misc_feature: MA Experiment ID: 20000235 Result: Down-regulated in Transcription
  misc_feature: MA Experiment 20000235 PARAMETER Experiment Name: At_Siliques_P Parameter: Age (day) Value: 21
  misc_feature: MA Experiment 20000235 PARAMETER Experiment Name: At_Siliques_P Parameter: Organism Value: A. thaliana
  misc_feature: MA Experiment 20000235 PARAMETER Experiment Name: At_Siliques_P Parameter: Plant Line Value: WS
  misc_feature: MA Experiment 20000235 PARAMETER Experiment Name: At_Siliques_P Parameter: Tissue Value: 5-10mm Siliques vs. Whole Plant
  misc_feature: MA Experiment ID: 20000264 Result: Down-regulated in Transcription
  misc_feature: MA Experiment 20000264 PARAMETER Experiment Name: At_Open_Flower_P Parameter: Age (day) Value: 21
  misc_feature: MA Experiment 20000264 PARAMETER Experiment Name: At_Open_Flower_P Parameter: Plant Line Value: WS
  misc_feature: MA Experiment 20000264 PARAMETER Experiment Name: At_Open_Flower_P Parameter: Tissue Value: Open Flower vs. Whole Plant
  misc_feature: MA Experiment ID: 20000437 Result: Up-regulated in Transcription
  misc_feature: MA Experiment 20000437 PARAMETER Experiment Name: At_Drought_P Parameter: Age (day) Value: 8
  misc_feature: MA Experiment 20000437 PARAMETER Experiment Name: At_Drought_P Parameter: Organism Value: A. thaliana
  misc_feature: MA Experiment 20000437 PARAMETER Experiment Name: At_Drought_P Parameter: Plant Line Value: WS
  misc_feature: MA Experiment 20000437 PARAMETER Experiment Name: At_Drought_P Parameter: Timepoint (hr) Value: 24
  misc_feature: MA Experiment 20000437 PARAMETER Experiment Name: At_Drought_P Parameter: Tissue Value: Whole Plant
  misc_feature: MA Experiment 20000437 PARAMETER Experiment Name: At_Drought_P Parameter: Treatment Value: Drought vs. No Drought
  misc_feature: MA Experiment ID: 20000794 Result: Down-regulated in Transcription
  misc_feature: MA Experiment 20000794 PARAMETER Experiment Name: At_Petals_P Parameter: Age (day) Value: 23-25 days
  misc_feature: MA Experiment 20000794 PARAMETER Experiment Name: At_Petals_P Parameter: Plant Line Value: WS
  misc_feature: MA Experiment 20000794 PARAMETER Experiment Name: At_Petals_P Parameter: Tissue Value: Petals vs. Whole plant
  misc_feature: MA Experiment ID: 20001247 Result: Up-regulated in Transcription
  misc_feature: MA Experiment 20001247 PARAMETER Experiment Name: At_Far-red-induction_P Parameter: Age (day) Value: 7
  misc_feature: MA Experiment 20001247 PARAMETER Experiment Name: At_Far-red-induction_P Parameter: Light Value: Far-red vs. White
  misc_feature: MA Experiment 20001247 PARAMETER Experiment Name: At_Far-red-induction_P Parameter: Organism Value: A. thaliana
  misc_feature: MA Experiment 20001247 PARAMETER Experiment Name: At_Far-red-induction_P Parameter: Plant Line Value: Columbia
  misc_feature: MA Experiment 20001247 PARAMETER Experiment Name: At_Far-red-induction_P Parameter: Timepoint (hr) Value: 1
  misc_feature: MA Experiment 20001247 PARAMETER Experiment Name: At_Far-red-induction_P Parameter: Tissue Value: Whole Plant
  misc_feature: MA Experiment ID: 20001248 Result: Up-regulated in Transcription
  misc_feature: MA Experiment 20001248 PARAMETER Experiment Name: At_Far-red-induction_P Parameter: Age (day) Value: 7
  misc_feature: MA Experiment 20001248 PARAMETER Experiment Name: At_Far-red-induction_P Parameter: Light Value: Far-red vs. White
  misc_feature: MA Experiment 20001248 PARAMETER Experiment Name: At_Far-red-induction_P Parameter: Organism Value: A. thaliana
  misc_feature: MA Experiment 20001248 PARAMETER Experiment Name: At_Far-red-induction_P Parameter: Plant Line Value: Columbia
  misc_feature: MA Experiment 20001248 PARAMETER Experiment Name: At_Far-red-induction_P Parameter: Timepoint (hr) Value: 4
  misc_feature: MA Experiment 20001248 PARAMETER Experiment Name: At_Far-red-induction_P Parameter: Tissue Value: Whole Plant
  misc_feature: MA Experiment ID: 20001450 Result: Up-regulated in Transcription
  misc_feature: MA Experiment 20001450 PARAMETER Experiment Name: At_Far-red-induction_P Parameter: Age (day) Value: 7
  misc_feature: MA Experiment 20001450 PARAMETER Experiment Name: At_Far-red-induction_P Parameter: Light Value: Far-red vs. White
  misc_feature: MA Experiment 20001450 PARAMETER Experiment Name: At_Far-red-induction_P Parameter: Organism Value: A. thaliana
  misc_feature: MA Experiment 20001450 PARAMETER Experiment Name: At_Far-red-induction_P Parameter: Plant Line Value: Columbia
  misc_feature: MA Experiment 20001450 PARAMETER Experiment Name: At_Far-red-induction_P Parameter: Timepoint (hr) Value: 8
  misc_feature: MA Experiment 20001450 PARAMETER Experiment Name: At_Far-red-induction_P Parameter: Tissue Value: Whole Plant
  misc_feature: Phenotype: ROSETTE LEAVES Curled-Curled 4
  misc_feature: Phenotype: WHOLE PLANT Size-Small
  misc_feature: Phenotype: INFLORESCENCE Height-Short
  misc_feature: Phenotype: FERTILITY Fertility-Reduced
  misc_feature: Phenotype: ROSETTE LEAVES Curled-Curled 4
  misc_feature: Phenotype: WHOLE PLANT Size-Small
  misc_feature: Phenotype: INFLORESCENCE Branching-Reduced Apical Dominance
  misc_feature: Phenotype: INFLORESCENCE Height-Short
  misc_feature: Phenotype: ROSETTE LEAVES Curled-Curled 4
  misc_feature: Phenotype: WHOLE PLANT Size-Small

SEQ ID NO: 31567 - protein, 207 aa, Arabidopsis thaliana; identical to SEQ ID NO: 27977
  peptide (1)..(207): Ceres Seq. ID no. 12421661
  misc_feature (5)..(176): Homolog of NCBI NO: 15236647 NR Description: putative protein
  misc_feature (1)..(113): Homolog of NCBI NO: 25406677 NR Description: hypothetical protein T21F11.6 [imported] -
  misc_feature (113)..(207): Homolog of NCBI NO: 15218326 NR Description: hypothetical protein; protein id: At1g15800.1
  misc_feature (1)..(191): Homolog of NCBI NO: 15218326 NR Description: hypothetical protein; protein id: At1g15800.1
  misc_feature (1)..(201): Homolog of NCBI NO: 22330774 NR Description: hypothetical protein
  misc_feature (113)..(207): Homolog of NCBI NO: 25402801 NR Description: protein F7H2.14 [imported] - Arabidopsis thaliana
  misc_feature (1)..(113): Homolog of NCBI NO: 25402801 NR Description: protein F7H2.14 [imported] - Arabidopsis thaliana

SEQ ID NO: 31568 - protein, 197 aa, Arabidopsis thaliana; identical to SEQ ID NO: 27978
  peptide (1)..(197): Ceres Seq. ID no. 12421662
  misc_feature (1)..(166): Homolog of NCBI NO: 15236647 NR Description: putative protein
  misc_feature (1)..(103): Homolog of NCBI NO: 25406677 NR Description: hypothetical protein T21F11.6 [imported] -
  misc_feature (103)..(197): Homolog of NCBI NO: 15218326 NR Description: hypothetical protein; protein id: At1g15800.1
  misc_feature (1)..(181): Homolog of NCBI NO: 15218326 NR Description: hypothetical protein; protein id: At1g15800.1
  misc_feature (1)..(191): Homolog of NCBI NO: 22330774 NR Description: hypothetical protein
  misc_feature (103)..(197): Homolog of NCBI NO: 25402801 NR Description: protein F7H2.14 [imported] - Arabidopsis thaliana
  misc_feature (1)..(103): Homolog of NCBI NO: 25402801 NR Description: protein F7H2.14 [imported] - Arabidopsis thaliana

SEQ ID NO: 31569 - DNA, 692 bp, Arabidopsis thaliana; identical to SEQ ID NO: 27979
  misc_feature (1)..(692): Ceres Seq. ID no. 12340023
  misc_feature: MA Experiment ID: 108434 Result: Down-regulated in Transcription
  misc_feature: MA Experiment 108434 PARAMETER Experiment Name: At_Root_Tips_cDNA_P Parameter: Tissue Value: Root Tips
  misc_feature: MA Experiment ID: 108435 Result: Down-regulated in Transcription
  misc_feature: MA Experiment 108435 PARAMETER Experiment Name: At_stm_Mutants_cDNA_P Parameter: Plant Line Value: wt Landsburg vs stm
  misc_feature: MA Experiment 108435 PARAMETER Experiment Name: At_stm_Mutants_cDNA_P Parameter: Tissue Value: Shoot Apical Meristem Region
  misc_feature: MA Experiment ID: 108461 Result: Up-regulated in Transcription
  misc_feature: MA Experiment 108461 PARAMETER Experiment Name: At_Germinating_Seeds_cDNA_P Parameter: Age (day) Value: 1 vs. 0
  misc_feature: MA Experiment 108461 PARAMETER Experiment Name: At_Germinating_Seeds_cDNA_P Parameter: Tissue Value: Germinating Seeds
  misc_feature: MA Experiment ID: 108462 Result: Up-regulated in Transcription
  misc_feature: MA Experiment 108462 PARAMETER Experiment Name: At_Germinating_Seeds_cDNA_P Parameter: Age (day) Value: 2 vs. 0
  misc_feature: MA Experiment 108462 PARAMETER Experiment Name: At_Germinating_Seeds_cDNA_P Parameter: Tissue Value: Germinating Seeds
  misc_feature: MA Experiment ID: 108464 Result: Up-regulated in Transcription
  misc_feature: MA Experiment 108464 PARAMETER Experiment Name: At_Germinating_Seeds_cDNA_P Parameter: Age (day) Value: 4 vs. 0
  misc_feature: MA Experiment 108464 PARAMETER Experiment Name: At_Germinating_Seeds_cDNA_P Parameter: Tissue Value: Germinating Seeds
  misc_feature: MA Experiment ID: 108488 Result: Up-regulated in Transcription
  misc_feature: MA Experiment ID: 20000180 Result: Up-regulated in Transcription
  misc_feature: MA Experiment 20000180 PARAMETER Experiment Name: At_Germinating_Seeds_P Parameter: Age (hr) Value: 24 vs. 0
  misc_feature: MA Experiment 20000180 PARAMETER Experiment Name: At_Germinating_Seeds_P Parameter: Tissue Value: Germinating Seeds
  misc_feature: MA Experiment ID: 20000185 Result: Down-regulated in Transcription
  misc_feature: MA Experiment 20000185 PARAMETER Experiment Name: At_Roots__P Parameter: Age (day) Value: 7 vs. 21
  misc_feature: MA Experiment 20000185 PARAMETER Experiment Name: At_Roots__P Parameter: Organism Value: A. thaliana
  misc_feature: MA Experiment 20000185 PARAMETER Experiment Name: At_Roots__P Parameter: Tissue Value: Roots vs. Whole Plant
  misc_feature: MA Experiment ID: 20000264 Result: Down-regulated in Transcription
  misc_feature: MA Experiment 20000264 PARAMETER Experiment Name: At_Open_Flower_P Parameter: Age (day) Value: 21
  misc_feature: MA Experiment 20000264 PARAMETER Experiment Name: At_Open_Flower_P Parameter: Plant Line Value: WS
  misc_feature: MA Experiment 20000264 PARAMETER Experiment Name: At_Open_Flower_P Parameter: Tissue Value: Open Flower vs. Whole Plant
  misc_feature: MA Experiment ID: 20000286 Result: Down-regulated in Transcription
  misc_feature: MA Experiment 20000286 PARAMETER Experiment Name: At_Open_Flower_P Parameter: Age (day) Value: 21
  misc_feature: MA Experiment 20000286 PARAMETER Experiment Name: At_Open_Flower_P Parameter: Plant Line Value: WS
  misc_feature: MA Experiment 20000286 PARAMETER Experiment Name: At_Open_Flower_P Parameter: Tissue Value: Half Open vs. Whole Plant
  misc_feature: MA Experiment ID: 20000438 Result: Up-regulated in Transcription
  misc_feature: MA Experiment 20000438 PARAMETER Experiment Name: At_Shoots__P Parameter: Age (day) Value: 14
  misc_feature: MA Experiment 20000438 PARAMETER Experiment Name: At_Shoots__P Parameter: Tissue Value: Shoots vs. Whole Plant
  misc_feature: MA Experiment ID: 20000439 Result: Down-regulated in Transcription
  misc_feature: MA Experiment 20000439 PARAMETER Experiment Name: At_Roots__P Parameter: Age (day) Value: 14 vs. 21
  misc_feature: MA Experiment 20000439 PARAMETER Experiment Name: At_Roots__P Parameter: Organism Value: A. thaliana
  misc_feature: MA Experiment 20000439 PARAMETER Experiment Name: At_Roots__P Parameter: Tissue Value: Roots vs. Whole Plant
  misc_feature: MA Experiment ID: 20000794 Result: Down-regulated in Transcription
  misc_feature: MA Experiment 20000794 PARAMETER Experiment Name: At_Petals_P Parameter: Age (day) Value: 23-25 days
  misc_feature: MA Experiment 20000794 PARAMETER Experiment Name: At_Petals_P Parameter: Plant Line Value: WS
  misc_feature: MA Experiment 20000794 PARAMETER Experiment Name: At_Petals_P Parameter: Tissue Value: Petals vs. Whole plant
  misc_feature: MA Experiment ID: 20001451 Result: Down-regulated in Transcription
  misc_feature: MA Experiment 20001451 PARAMETER Experiment Name: At_Far-red-induction_P Parameter: Age (day) Value: 7
  misc_feature: MA Experiment 20001451 PARAMETER Experiment Name: At_Far-red-induction_P Parameter: Light Value: Far-red vs. White
  misc_feature: MA Experiment 20001451 PARAMETER Experiment Name: At_Far-red-induction_P Parameter: Organism Value: A. thaliana
  misc_feature: MA Experiment 20001451 PARAMETER Experiment Name: At_Far-red-induction_P Parameter: Plant Line Value: Columbia
  misc_feature: MA Experiment 20001451 PARAMETER Experiment Name: At_Far-red-induction_P Parameter: Timepoint (hr) Value: 24
  misc_feature: MA Experiment 20001451 PARAMETER Experiment Name: At_Far-red-induction_P Parameter: Tissue Value: Whole Plant
  misc_feature: MA Experiment ID: 20001557 Result: Down-regulated in Transcription
  misc_feature: MA Experiment 20001557 PARAMETER Experiment Name: At_Drought_Soil_Dry_P Parameter: Age (day) Value: 27
  misc_feature: MA Experiment 20001557 PARAMETER Experiment Name: At_Drought_Soil_Dry_P Parameter: Organism Value: A. thaliana
  misc_feature: MA Experiment 20001557 PARAMETER Experiment Name: At_Drought_Soil_Dry_P Parameter: Plant Line Value: WS
  misc_feature: MA Experiment 20001557 PARAMETER Experiment Name: At_Drought_Soil_Dry_P Parameter: Post Timepoint (hr) Value: 3
  misc_feature: MA Experiment 20001557 PARAMETER Experiment Name: At_Drought_Soil_Dry_P Parameter: Post-Treatment Value: Re-Water vs. No Drought
  misc_feature: MA Experiment 20001557 PARAMETER Experiment Name: At_Drought_Soil_Dry_P Parameter: Timepoint (day) Value: 13
  misc_feature: MA Experiment 20001557 PARAMETER Experiment Name: At_Drought_Soil_Dry_P Parameter: Treatment Value: Drought vs. No Drought
  misc_feature: MA Experiment ID: 20001757 Result: Up-regulated in Transcription
  misc_feature: MA Experiment 20001757 PARAMETER Experiment Name: At_50mM_NH4NO3_L-to-H_P Parameter: Timepoint (hr) Value: 6
  misc_feature: MA Experiment 20001757 PARAMETER Experiment Name: At_50mM_NH4NO3_L-to-H_P Parameter: Tissue Value: Leaf
  misc_feature: MA Experiment 20001757 PARAMETER Experiment Name: At_50mM_NH4NO3_L-to-H_P Parameter: Treatment Value: 50mM NH4NO3 vs 100mM Mannitol
  misc_feature: MA Experiment ID: 20001905 Result: Down-regulated in Transcription
  misc_feature: MA Experiment 20001905 PARAMETER Experiment Name: At_Drought_Reproduction_P Parameter: Age (day) Value: 40
  misc_feature: MA Experiment 20001905 PARAMETER Experiment Name: At_Drought_Reproduction_P Parameter: Organism Value: A. thaliana
  misc_feature: MA Experiment 20001905 PARAMETER Experiment Name: At_Drought_Reproduction_P Parameter: Plant Line Value: WS
  misc_feature: MA Experiment 20001905 PARAMETER Experiment Name: At_Drought_Reproduction_P Parameter: Timepoint (day) Value: 10
  misc_feature: MA Experiment 20001905 PARAMETER Experiment Name: At_Drought_Reproduction_P Parameter: Tissue Value: Rosettes
  misc_feature: MA Experiment 20001905 PARAMETER Experiment Name: At_Drought_Reproduction_P Parameter: Treatment Value: Drought vs. No Drought
  misc_feature: MA Experiment ID: 20001906 Result: Down-regulated in Transcription
  misc_feature: MA Experiment 20001906 PARAMETER Experiment Name: At_Drought_Reproduction_P Parameter: Age (day) Value: 35
  misc_feature: MA Experiment 20001906 PARAMETER Experiment Name: At_Drought_Reproduction_P Parameter: Organism Value: A. thaliana
  misc_feature: MA Experiment 20001906 PARAMETER Experiment Name: At_Drought_Reproduction_P Parameter: Plant Line Value: WS
  misc_feature: MA Experiment 20001906 PARAMETER Experiment Name: At_Drought_Reproduction_P Parameter: Timepoint (day) Value: 5
  misc_feature: MA Experiment 20001906 PARAMETER Experiment Name: At_Drought_Reproduction_P Parameter: Tissue Value: Siliques
  misc_feature: MA Experiment 20001906 PARAMETER Experiment Name: At_Drought_Reproduction_P Parameter: Treatment Value: Drought vs. No Drought
  misc_feature: MA Experiment ID: 20001908 Result: Down-regulated in Transcription
  misc_feature: MA Experiment 20001908 PARAMETER Experiment Name: At_Drought_Reproduction_P Parameter: Age (day) Value: 40
  misc_feature: MA Experiment 20001908 PARAMETER Experiment Name: At_Drought_Reproduction_P Parameter: Organism Value: A. thaliana
  misc_feature: MA Experiment 20001908 PARAMETER Experiment Name: At_Drought_Reproduction_P Parameter: Plant Line Value: WS
  misc_feature: MA Experiment 20001908 PARAMETER Experiment Name: At_Drought_Reproduction_P Parameter: Timepoint (day) Value: 10
  misc_feature: MA Experiment 20001908 PARAMETER Experiment Name: At_Drought_Reproduction_P Parameter: Tissue Value: Siliques
  misc_feature: MA Experiment 20001908 PARAMETER Experiment Name: At_Drought_Reproduction_P Parameter: Treatment Value: Drought vs. No Drought

SEQ ID NO: 31570 - protein, 158 aa, Arabidopsis thaliana; identical to SEQ ID NO: 27980
  peptide (1)..(158): Ceres Seq. ID no. 12340024
  misc_feature (59)..(154): Pfam Name: Photosystem I psaG / psaK Pfam Description: Photosystem I psaG / psaK
  misc_feature (59)..(97): Homolog of NCBI NO: 131193 NR Description: Photosystem I reaction center subunit V (PSI-G)
  misc_feature (32)..(149): Homolog of NCBI NO: 131191 NR Description: Photosystem I reaction center subunit V, precursor (PSI-G) (Light-harvesting complex I 10 kDa protein)
  misc_feature (50)..(153): Homolog of NCBI NO: 17369611 NR Description: Photosystem I reaction center subunit V,
  misc_feature (1)..(158): Homolog of NCBI NO: 131192 NR Description: Photosystem I reaction center subunit V,
  misc_feature (20)..(157): Homolog of NCBI NO: 131194 NR Description: Photosystem I reaction center subunit V,
  misc_feature (1)..(158): Homolog of NCBI NO: 15222757 NR Description: photosystem I subunit V precursor, putative

SEQ ID NO: 31571 - DNA, 837 bp, Arabidopsis thaliana; identical to SEQ ID NO: 27981
  misc_feature (1)..(837): Ceres Seq. ID no. 12423298
  misc_feature: MA Experiment ID: 20000173 Result: Up-regulated in Transcription
  misc_feature: MA Experiment 20000173 PARAMETER Experiment Name: At_42deg_Heat_P Parameter: Age (day) Value: 14
  misc_feature: MA Experiment 20000173 PARAMETER Experiment Name: At_42deg_Heat_P Parameter: Organism Value: A. thaliana
  misc_feature: MA Experiment 20000173 PARAMETER Experiment Name: At_42deg_Heat_P Parameter: Plant Line Value: WS
  misc_feature: MA Experiment 20000173 PARAMETER Experiment Name: At_42deg_Heat_P Parameter: Temperature (deg C) Value: 42 vs. 22
  misc_feature: MA Experiment 20000173 PARAMETER Experiment Name: At_42deg_Heat_P Parameter: Timepoint (hr) Value: 6
  misc_feature: MA Experiment 20000173 PARAMETER Experiment Name: At_42deg_Heat_P Parameter: Tissue Value: Aerial

SEQ ID NO: 31572 - protein, 183 aa, Arabidopsis thaliana; identical to SEQ ID NO: 27982
  peptide (1)..(183): Ceres Seq. ID no. 12423299
  misc_feature (44)..(171): Pfam Name: NifU-like N terminal domain Pfam Description: NifU-like N terminal domain
  misc_feature (45)..(177): Homolog of NCBI NO: 33592862 NR Description: [Fe-S] cluster formation/repair protein
  misc_feature (19)..(168): Homolog of NCBI NO: 21313484 NR Description: RIKEN cDNA 2310020H20 [Mus musculus]
  misc_feature (19)..(168): Homolog of NCBI NO: 20381021 NR Description: RIKEN cDNA 2310020H20 gene [Mus musculus]
  misc_feature (43)..(175): Homolog of NCBI NO: 11545707 NR Description: ISCU2 [Homo sapiens]
  misc_feature (43)..(176): Homolog of NCBI NO: 16798388 NR Description: iron-sulfur cluster assembly protein IscU
  misc_feature (18)..(170): Homolog of NCBI NO: 34912076 NR Description: putative nifU-like protein
  misc_feature (17)..(183): Homolog of NCBI NO: 15232028 NR Description: unknown protein; protein id: At3g01020.1
  misc_feature (18)..(183): Homolog of NCBI NO: 15233385 NR Description: putative NifU-like metallocluster assembly factor
  misc_feature (17)..(183): Homolog of NCBI NO: 15235569 NR Description: nifU-like protein
  misc_feature (18)..(183): Homolog of NCBI NO: 21595581 NR Description: nifU-like protein [Arabidopsis thaliana]

SEQ ID NO: 31573 - protein, 167 aa, Arabidopsis thaliana; identical to SEQ ID NO: 27983
  peptide (1)..(167): Ceres Seq. ID no. 12423300
  misc_feature (28)..(155): Pfam Name: NifU-like N terminal domain Pfam Description: NifU-like N terminal domain
  misc_feature (29)..(161): Homolog of NCBI NO: 33592862 NR Description: [Fe-S] cluster formation/repair protein
  misc_feature (3)..(152): Homolog of NCBI NO: 21313484 NR Description: RIKEN cDNA 2310020H20 [Mus musculus]
  misc_feature (3)..(152): Homolog of NCBI NO: 20381021 NR Description: RIKEN cDNA 2310020H20 gene [Mus musculus]
  misc_feature (27)..(159): Homolog of NCBI NO: 11545707 NR Description: ISCU2 [Homo sapiens]
  misc_feature (27)..(160): Homolog of NCBI NO: 16798388 NR Description: iron-sulfur cluster assembly protein IscU
  misc_feature (2)..(154): Homolog of NCBI NO: 34912076 NR Description: putative nifU-like protein
  misc_feature (1)..(167): Homolog of NCBI NO: 15232028 NR Description: unknown protein; protein id: At3g01020.1
  misc_feature (2)..(167): Homolog of NCBI NO: 15233385 NR Description: putative NifU-like metallocluster assembly factor
  misc_feature (1)..(167): Homolog of NCBI NO: 15235569 NR Description: nifU-like protein
  misc_feature (2)..(167): Homolog of NCBI NO: 21595581 NR Description: nifU-like protein [Arabidopsis thaliana]

SEQ ID NO: 31574 - protein, 166 aa, Arabidopsis thaliana; identical to SEQ ID NO: 27984
  peptide (1)..(166): Ceres Seq. ID no. 12423301
  misc_feature (27)..(154): Pfam Name: NifU-like N terminal domain Pfam Description: NifU-like N terminal domain
  misc_feature (28)..(160): Homolog of NCBI NO: 33592862 NR Description: [Fe-S] cluster formation/repair protein
  misc_feature (2)..(151): Homolog of NCBI NO: 21313484 NR Description: RIKEN cDNA 2310020H20 [Mus musculus]
  misc_feature (2)..(151): Homolog of NCBI NO: 20381021 NR Description: RIKEN cDNA 2310020H20 gene [Mus musculus]
  misc_feature (26)..(158): Homolog of NCBI NO: 11545707 NR Description: ISCU2 [Homo sapiens]
  misc_feature (26)..(159): Homolog of NCBI NO: 16798388 NR Description: iron-sulfur cluster assembly protein IscU
  misc_feature (1)..(153): Homolog of NCBI NO: 34912076 NR Description: putative nifU-like protein
  misc_feature (1)..(166): Homolog of NCBI NO: 15232028 NR Description: unknown protein; protein id: At3g01020.1
  misc_feature (1)..(166): Homolog of NCBI NO: 15233385 NR Description: putative NifU-like metallocluster assembly factor
  misc_feature (1)..(166): Homolog of NCBI NO: 15235569 NR Description: nifU-like protein
  misc_feature (1)..(166): Homolog of NCBI NO: 21595581 NR Description: nifU-like protein [Arabidopsis thaliana]

SEQ ID NO: 31575 - DNA, 911 bp, Arabidopsis thaliana; identical to SEQ ID NO: 27985
  misc_feature (1)..(911): Ceres Seq. ID no. 13486631
  misc_feature: MA Experiment ID: 108434 Result: Down-regulated in Transcription
  misc_feature: MA Experiment 108434 PARAMETER Experiment Name: At_Root_Tips_cDNA_P Parameter: Tissue Value: Root Tips
  misc_feature: MA Experiment ID: 108462 Result: Up-regulated in Transcription
  misc_feature: MA Experiment 108462 PARAMETER Experiment Name: At_Germinating_Seeds_cDNA_P Parameter: Age (day) Value: 2 vs. 0
  misc_feature: MA Experiment 108462 PARAMETER Experiment Name: At_Germinating_Seeds_cDNA_P Parameter: Tissue Value: Germinating Seeds
  misc_feature: MA Experiment ID: 108463 Result: Up-regulated in Transcription
  misc_feature: MA Experiment 108463 PARAMETER Experiment Name: At_Germinating_Seeds_cDNA_P Parameter: Age (day) Value: 3 vs. 0
  misc_feature: MA Experiment 108463 PARAMETER Experiment Name: At_Germinating_Seeds_cDNA_P Parameter: Tissue Value: Germinating Seeds
  misc_feature: MA Experiment ID: 108464 Result: Up-regulated in Transcription
  misc_feature: MA Experiment 108464 PARAMETER Experiment Name: At_Germinating_Seeds_cDNA_P Parameter: Age (day) Value: 4 vs. 0
  misc_feature: MA Experiment 108464 PARAMETER Experiment Name: At_Germinating_Seeds_cDNA_P Parameter: Tissue Value: Germinating Seeds
  misc_feature: MA Experiment ID: 108572 Result: Up-regulated in Transcription
  misc_feature: MA Experiment 108572 PARAMETER Experiment Name: At_Drought_cDNA_P Parameter: Timepoint (hr) Value: 1
  misc_feature: MA Experiment 108572 PARAMETER Experiment Name: At_Drought_cDNA_P Parameter: Tissue Value: Aerial
  misc_feature: MA Experiment 108572 PARAMETER Experiment Name: At_Drought_cDNA_P Parameter: Treatment Value: Drought vs. No Drought
  misc_feature: MA Experiment ID: 108573 Result: Up-regulated in Transcription
  misc_feature: MA Experiment 108573 PARAMETER Experiment Name: At_Drought_cDNA_P Parameter: Timepoint (hr) Value: 6
  misc_feature: MA Experiment 108573 PARAMETER Experiment Name: At_Drought_cDNA_P Parameter: Tissue Value: Aerial
  misc_feature: MA Experiment 108573 PARAMETER Experiment Name: At_Drought_cDNA_P Parameter: Treatment Value: Drought vs. No Drought
  misc_feature: MA Experiment ID: 20000224 Result: Up-regulated in Transcription
  misc_feature: MA Experiment ID: 20000227 Result: Down-regulated in Transcription
  misc_feature: MA Experiment 20000227 PARAMETER Experiment Name: At_Root-Tips-vs-Tops_P Parameter: Tissue Value: Root Tips vs. Root Tops
  misc_feature: MA Experiment ID: 20000265 Result: Down-regulated in Transcription
  misc_feature: MA Experiment 20000265 PARAMETER Experiment Name: At_Open_Flower_P Parameter: Age (day) Value: 21
  misc_feature: MA Experiment 20000265 PARAMETER Experiment Name: At_Open_Flower_P Parameter: Plant Line Value: WS
  misc_feature: MA Experiment 20000265 PARAMETER Experiment Name: At_Open_Flower_P Parameter: Tissue Value: Closed Flower vs. Whole Plant
  misc_feature: MA Experiment ID: 20000527 Result: Down-regulated in Transcription
  misc_feature: MA Experiment 20000527 PARAMETER Experiment Name: At_10percent_PEG_P Parameter: Age (day) Value: 20
  misc_feature: MA Experiment 20000527 PARAMETER Experiment Name: At_10percent_PEG_P Parameter: Organism Value: A. thaliana
  misc_feature: MA Experiment 20000527 PARAMETER Experiment Name: At_10percent_PEG_P Parameter: Plant Line Value: WS
  misc_feature: MA Experiment 20000527 PARAMETER Experiment Name: At_10percent_PEG_P Parameter: Timepoint (day) Value: 20
  misc_feature: MA Experiment 20000527 PARAMETER Experiment Name: At_10percent_PEG_P Parameter: Tissue Value: Whole Plant
  misc_feature: MA Experiment 20000527 PARAMETER Experiment Name: At_10percent_PEG_P Parameter: Treatment Value: 10percent PEG vs. No Treatment
  misc_feature: MA Experiment ID: 20000794 Result: Up-regulated in Transcription
  misc_feature: MA Experiment 20000794 PARAMETER Experiment Name: At_Petals_P Parameter: Age (day) Value: 23-25 days
  misc_feature: MA Experiment 20000794 PARAMETER Experiment Name: At_Petals_P Parameter: Plant Line Value: WS
  misc_feature: MA Experiment 20000794 PARAMETER Experiment Name: At_Petals_P Parameter: Tissue Value: Petals vs. Whole plant
  misc_feature: MA Experiment ID: 20001247 Result: Down-regulated in Transcription
  misc_feature: MA Experiment 20001247 PARAMETER Experiment Name: At_Far-red-induction_P Parameter: Age (day) Value: 7
  misc_feature: MA Experiment 20001247 PARAMETER Experiment Name: At_Far-red-induction_P Parameter: Light Value: Far-red vs. White
  misc_feature: MA Experiment 20001247 PARAMETER Experiment Name: At_Far-red-induction_P Parameter: Organism Value: A. thaliana
  misc_feature: MA Experiment 20001247 PARAMETER Experiment Name: At_Far-red-induction_P Parameter: Plant Line Value: Columbia
  misc_feature: MA Experiment 20001247 PARAMETER Experiment Name: At_Far-red-induction_P Parameter: Timepoint (hr) Value: 1
  misc_feature: MA Experiment 20001247 PARAMETER Experiment Name: At_Far-red-induction_P Parameter: Tissue Value: Whole Plant
  misc_feature: MA Experiment ID: 20001248 Result: Down-regulated in Transcription
  misc_feature: MA Experiment 20001248 PARAMETER Experiment Name: At_Far-red-induction_P Parameter: Age (day) Value: 7
  misc_feature: MA Experiment 20001248 PARAMETER Experiment Name: At_Far-red-induction_P Parameter: Light Value: Far-red vs. White
  misc_feature: MA Experiment 20001248 PARAMETER Experiment Name: At_Far-red-induction_P Parameter: Organism Value: A. thaliana
  misc_feature: MA Experiment 20001248 PARAMETER Experiment Name: At_Far-red-induction_P Parameter: Plant Line Value: Columbia
  misc_feature: MA Experiment 20001248 PARAMETER Experiment Name: At_Far-red-induction_P Parameter: Timepoint (hr) Value: 4
  misc_feature: MA Experiment 20001248 PARAMETER Experiment Name: At_Far-red-induction_P Parameter: Tissue Value: Whole Plant
  misc_feature: MA Experiment ID: 20001450 Result: Down-regulated in Transcription
  misc_feature: MA Experiment 20001450 PARAMETER Experiment Name: At_Far-red-induction_P Parameter: Age (day) Value: 7
  misc_feature: MA Experiment 20001450 PARAMETER Experiment Name: At_Far-red-induction_P Parameter: Light Value: Far-red vs. White
  misc_feature: MA Experiment 20001450 PARAMETER Experiment Name: At_Far-red-induction_P Parameter: Organism Value: A. thaliana
  misc_feature: MA Experiment 20001450 PARAMETER Experiment Name: At_Far-red-induction_P Parameter: Plant Line Value: Columbia
  misc_feature: MA Experiment 20001450 PARAMETER Experiment Name: At_Far-red-induction_P Parameter: Timepoint (hr) Value: 8
  misc_feature: MA Experiment 20001450 PARAMETER Experiment Name: At_Far-red-induction_P Parameter: Tissue Value: Whole Plant
  misc_feature: MA Experiment ID: 20001555 Result: Down-regulated in Transcription
  misc_feature: MA Experiment 20001555 PARAMETER Experiment Name: At_Drought_Soil_Dry_P Parameter: Age (day) Value: 24
  misc_feature: MA Experiment 20001555 PARAMETER Experiment Name: At_Drought_Soil_Dry_P Parameter: Organism Value: A. thaliana
  misc_feature: MA Experiment 20001555 PARAMETER Experiment Name: At_Drought_Soil_Dry_P Parameter: Plant Line Value: WS
  misc_feature: MA Experiment 20001555 PARAMETER Experiment Name: At_Drought_Soil_Dry_P Parameter: Post Timepoint (hr) Value: None
  misc_feature: MA Experiment 20001555 PARAMETER Experiment Name: At_Drought_Soil_Dry_P Parameter: Post-Treatment Value: None
  misc_feature: MA Experiment 20001555 PARAMETER Experiment Name: At_Drought_Soil_Dry_P Parameter: Timepoint (day) Value: 10
  misc_feature: MA Experiment 20001555 PARAMETER Experiment Name: At_Drought_Soil_Dry_P Parameter: Treatment Value: Drought vs. No Drought
  misc_feature: MA Experiment ID: 20001556 Result: Down-regulated in Transcription
  misc_feature: MA Experiment 20001556 PARAMETER Experiment Name: At_Drought_Soil_Dry_P Parameter: Age (day) Value: 26
  misc_feature: MA Experiment 20001556 PARAMETER Experiment Name: At_Drought_Soil_Dry_P Parameter: Organism Value: A. thaliana
  misc_feature: MA Experiment 20001556 PARAMETER Experiment Name: At_Drought_Soil_Dry_P Parameter: Plant Line Value: WS
  misc_feature: MA Experiment 20001556 PARAMETER Experiment Name: At_Drought_Soil_Dry_P Parameter: Post Timepoint (hr) Value: None
  misc_feature: MA Experiment 20001556 PARAMETER Experiment Name: At_Drought_Soil_Dry_P Parameter: Post-Treatment Value: None
  misc_feature: MA Experiment 20001556 PARAMETER Experiment Name: At_Drought_Soil_Dry_P Parameter: Timepoint (day) Value: 12
  misc_feature: MA Experiment 20001556 PARAMETER Experiment Name: At_Drought_Soil_Dry_P Parameter: Treatment Value: Drought vs. No Drought
  misc_feature: MA Experiment ID: 20001558 Result: Down-regulated in Transcription
  misc_feature: MA Experiment 20001558 PARAMETER Experiment Name: At_Drought_Soil_Dry_P Parameter: Age (day) Value: 27
  misc_feature: MA Experiment 20001558 PARAMETER Experiment Name: At_Drought_Soil_Dry_P Parameter: Organism Value: A. thaliana
  misc_feature: MA Experiment 20001558 PARAMETER Experiment Name: At_Drought_Soil_Dry_P Parameter: Plant Line Value: WS
  misc_feature: MA Experiment 20001558 PARAMETER Experiment Name: At_Drought_Soil_Dry_P Parameter: Post Timepoint (hr) Value: 6
  misc_feature: MA Experiment 20001558 PARAMETER Experiment Name: At_Drought_Soil_Dry_P Parameter: Post-Treatment Value: Re-Water vs. No Drought
  misc_feature: MA Experiment 20001558 PARAMETER Experiment Name: At_Drought_Soil_Dry_P Parameter: Timepoint (day) Value: 13
  misc_feature: MA Experiment 20001558 PARAMETER Experiment Name: At_Drought_Soil_Dry_P Parameter: Treatment Value: Drought vs. No Drought
  misc_feature: MA Experiment ID: 20001559 Result: Down-regulated in Transcription
  misc_feature: MA Experiment 20001559 PARAMETER Experiment Name: At_Drought_Soil_Dry_P Parameter: Age (day) Value: 28
  misc_feature: MA Experiment 20001559 PARAMETER Experiment Name: At_Drought_Soil_Dry_P Parameter: Organism Value: A. thaliana
  misc_feature: MA Experiment 20001559 PARAMETER Experiment Name: At_Drought_Soil_Dry_P Parameter: Plant Line Value: WS
  misc_feature: MA Experiment 20001559 PARAMETER Experiment Name: At_Drought_Soil_Dry_P Parameter: Post Timepoint (hr) Value: 29
  misc_feature: MA Experiment 20001559 PARAMETER Experiment Name: At_Drought_Soil_Dry_P Parameter: Post-Treatment Value: Re-Water vs. No Drought
  misc_feature: MA Experiment 20001559 PARAMETER Experiment Name: At_Drought_Soil_Dry_P Parameter: Timepoint (day) Value: 14
  misc_feature: MA Experiment 20001559 PARAMETER Experiment Name: At_Drought_Soil_Dry_P Parameter: Treatment Value: Drought vs. No Drought
  misc_feature: MA Experiment ID: 20001560 Result: Down-regulated in Transcription
  misc_feature: MA Experiment 20001560 PARAMETER Experiment Name: At_Drought_Soil_Dry_P Parameter: Age (day) Value: 28
  misc_feature: MA Experiment 20001560 PARAMETER Experiment Name: At_Drought_Soil_Dry_P Parameter: Organism Value: A. thaliana
  misc_feature: MA Experiment 20001560 PARAMETER Experiment Name: At_Drought_Soil_Dry_P Parameter: Plant Line Value: WS
  misc_feature: MA Experiment 20001560 PARAMETER Experiment Name: At_Drought_Soil_Dry_P Parameter: Post Timepoint (hr) Value: None
  misc_feature: MA Experiment 20001560 PARAMETER Experiment Name: At_Drought_Soil_Dry_P Parameter: Post-Treatment Value: None
  misc_feature: MA Experiment 20001560 PARAMETER Experiment Name: At_Drought_Soil_Dry_P Parameter: Timepoint (day) Value: 14
  misc_feature: MA Experiment 20001560 PARAMETER Experiment Name: At_Drought_Soil_Dry_P Parameter: Treatment Value: Drought vs. No Drought
  misc_feature: MA Experiment ID: 20001905 Result: Down-regulated in Transcription
  misc_feature: MA Experiment 20001905 PARAMETER Experiment Name: At_Drought_Reproduction_P Parameter: Age (day) Value: 40
  misc_feature: MA Experiment 20001905 PARAMETER Experiment Name: At_Drought_Reproduction_P Parameter: Organism Value: A. thaliana
  misc_feature: MA Experiment 20001905 PARAMETER Experiment Name: At_Drought_Reproduction_P Parameter: Plant Line Value: WS
  misc_feature: MA Experiment 20001905 PARAMETER Experiment Name: At_Drought_Reproduction_P Parameter: Timepoint (day) Value: 10
  misc_feature: MA Experiment 20001905 PARAMETER Experiment Name: At_Drought_Reproduction_P Parameter: Tissue Value: Rosettes
  misc_feature: MA Experiment 20001905 PARAMETER Experiment Name: At_Drought_Reproduction_P Parameter: Treatment Value: Drought vs. No Drought
  misc_feature: MA Experiment ID: 20001911 Result: Down-regulated in Transcription
  misc_feature: MA Experiment 20001911 PARAMETER Experiment Name: At_Drought_Reproduction_P Parameter: Age (day) Value: 40
  misc_feature: MA Experiment 20001911 PARAMETER Experiment Name: At_Drought_Reproduction_P Parameter: Organism Value: A. thaliana
  misc_feature: MA Experiment 20001911 PARAMETER Experiment Name: At_Drought_Reproduction_P Parameter: Plant Line Value: WS
  misc_feature: MA Experiment 20001911 PARAMETER Experiment Name: At_Drought_Reproduction_P Parameter: Timepoint (day) Value: 10
  misc_feature: MA Experiment 20001911 PARAMETER Experiment Name: At_Drought_Reproduction_P Parameter: Tissue Value: Flowers
  misc_feature: MA Experiment 20001911 PARAMETER Experiment Name: At_Drought_Reproduction_P Parameter: Treatment Value: Drought vs. No Drought

SEQ ID NO: 31576 - protein, 209 aa, Arabidopsis thaliana; identical to SEQ ID NO: 27986
  peptide (1)..(209): Ceres Seq. ID no. 13486632
  misc_feature (1)..(209): Homolog of NCBI NO: 38637038 NR Description: harpin-induced protein 1 family (HIN1)-like
  misc_feature (1)..(209): Homolog of NCBI NO: 22326984 NR Description: harpin-induced protein 1 family (HIN1)
  misc_feature (1)..(209): Homolog of NCBI NO: 15229906 NR Description: harpin-induced protein 1 family (HIN1)
  misc_feature (1)..(208): Homolog of NCBI NO: 15227540 NR Description: harpin-induced protein 1 family (HIN1)
  misc_feature (1)..(208): Homolog of NCBI NO: 15233951 NR Description: harpin-induced protein 1 family (HIN1)
  misc_feature (1)..(209): Homolog of NCBI NO: 15227538 NR Description: harpin-induced protein 1 family (HIN1)
  misc_feature (1)..(209): Homolog of NCBI NO: 15240001 NR Description: harpin-induced protein, putative (HIN1)
  misc_feature (2)..(209): Homolog of NCBI NO: 15231227 NR Description: harpin-induced protein 1 family (HIN1)
  misc_feature (1)..(209): Homolog of NCBI NO: 28392929 NR Description: putative VAMP protein SEC22 [Arabidopsis thaliana]
  misc_feature (1)..(209): Homolog of NCBI NO: 18399308 NR Description: harpin-induced protein 1 family (HIN1)

SEQ ID NO: 31577 - DNA, 1368 bp, Arabidopsis thaliana; identical to SEQ ID NO: 27987
  misc_feature (1)..(1368): Ceres Seq. ID no. 12423294
  misc_feature: MA Experiment ID: 108573 Result: Up-regulated in Transcription
  misc_feature: MA Experiment 108573 PARAMETER Experiment Name: At_Drought_cDNA_P Parameter: Timepoint (hr) Value: 6
  misc_feature: MA Experiment 108573 PARAMETER Experiment Name: At_Drought_cDNA_P Parameter: Tissue Value: Aerial
  misc_feature: MA Experiment 108573 PARAMETER Experiment Name: At_Drought_cDNA_P Parameter: Treatment Value: Drought vs. No Drought
  misc_feature: MA Experiment ID: 108595 Result: Down-regulated in Transcription
  misc_feature: MA Experiment 108595 PARAMETER Experiment Name: At_Ler-pi_Ovule_cDNA_P Parameter: Plant Line Value: null
  misc_feature: MA Experiment ID: 20000184 Result: Down-regulated in Transcription
  misc_feature: MA Experiment 20000184 PARAMETER Experiment Name: At_Shoots__P Parameter: Age (day) Value: 7
  misc_feature: MA Experiment 20000184 PARAMETER Experiment Name: At_Shoots__P Parameter: Tissue Value: Shoots vs. Whole Plant
  misc_feature: MA Experiment ID: 20001757 Result: Down-regulated in Transcription
  misc_feature: MA Experiment 20001757 PARAMETER Experiment Name: At_50mM_NH4NO3_L-to-H_P Parameter: Timepoint (hr) Value: 6
  misc_feature: MA Experiment 20001757 PARAMETER Experiment Name: At_50mM_NH4NO3_L-to-H_P Parameter: Tissue Value: Leaf
  misc_feature: MA Experiment 20001757 PARAMETER Experiment Name: At_50mM_NH4NO3_L-to-H_P Parameter: Treatment Value: 50mM NH4NO3 vs 100mM Mannitol

SEQ ID NO: 31578 - protein, 313 aa, Arabidopsis thaliana; identical to SEQ ID NO: 27988
  peptide (1)..(313): Ceres Seq. ID no. 12423295
  misc_feature (6)..(156): Pfam Name: Autophagocytosis associated protein, N-terminal domain Pfam Description: Autophagocytosis associated protein, N-terminal
  misc_feature (25)..(308): Homolog of NCBI NO: 19705511 NR Description: preconditioning-inducible gene 1 protein [Rattus
  misc_feature (25)..(308): Homolog of NCBI NO: 13385890 NR Description: RIKEN cDNA 2610016C12 [Mus musculus]
  misc_feature (13)..(308): Homolog of NCBI NO: 34785406 NR Description: Unknown (protein for MGC:64156) [Danio rerio]
  misc_feature (149)..(307): Homolog of NCBI NO: 28828597 NR Description: hypothetical protein [Dictyostelium discoideum]
  misc_feature (5)..(174): Homolog of NCBI NO: 28828597 NR Description: hypothetical protein [Dictyostelium discoideum]
  misc_feature (1)..(233): Homolog of NCBI NO: 37536838 NR Description: autophagocytosis protein AUT1-like
  misc_feature (1)..(312): Homolog of NCBI NO: 34903638 NR Description: B1015E06.2 [Oryza sativa (japonica
  misc_feature (1)..(313): Homolog of NCBI NO: 21595613 NR Description: autophagocytosis protein-like [Arabidopsis
  misc_feature (1)..(313): Homolog of NCBI NO: 18424474 NR Description: autophagocytosis protein - like
  misc_feature (1)..(308): Homolog of NCBI NO: 9758466 NR Description: autophagocytosis protein AUT1-like [Arabidopsis

SEQ ID NO: 31579 - protein, 186 aa, Arabidopsis thaliana; identical to SEQ ID NO: 27989
  peptide (1)..(186): Ceres Seq. ID no. 12423296
  misc_feature (60)..(177): Pfam Name: Autophagocytosis associated protein, C-terminal domain Pfam Description: Autophagocytosis associated protein, C-terminal
  misc_feature (1)..(181): Homolog of NCBI NO: 19705511 NR Description: preconditioning-inducible gene 1 protein [Rattus
  misc_feature (1)..(181): Homolog of NCBI NO: 13385890 NR Description: RIKEN cDNA 2610016C12 [Mus musculus]
  misc_feature (1)..(181): Homolog of NCBI NO: 34785406 NR Description: Unknown (protein for MGC:64156) [Danio rerio]
  misc_feature (22)..(180): Homolog of NCBI NO: 28828597 NR Description: hypothetical protein [Dictyostelium discoideum]
  misc_feature (1)..(47): Homolog of NCBI NO: 28828597 NR Description: hypothetical protein [Dictyostelium discoideum]
  misc_feature (1)..(106): Homolog of NCBI NO: 37536838 NR Description: autophagocytosis protein AUT1-like
  misc_feature (1)..(185): Homolog of NCBI NO: 34903638 NR Description: B1015E06.2 [Oryza sativa (japonica
  misc_feature (1)..(186): Homolog of NCBI NO: 21595613 NR Description: autophagocytosis protein-like [Arabidopsis
  misc_feature (1)..(186): Homolog of NCBI NO: 18424474 NR Description: autophagocytosis protein - like
  misc_feature (1)..(181): Homolog of NCBI NO: 9758466 NR Description: autophagocytosis protein AUT1-like [Arabidopsis

SEQ ID NO: 31580 - protein, 157 aa, Arabidopsis thaliana; identical to SEQ ID NO: 27990
  peptide (1)..(157): Ceres Seq. ID no. 12423297
  misc_feature (31)..(148): Pfam Name: Autophagocytosis associated protein, C-terminal domain Pfam Description: Autophagocytosis associated protein, C-terminal
  misc_feature (1)..(152): Homolog of NCBI NO: 19705511 NR Description: preconditioning-inducible gene 1 protein [Rattus
  misc_feature (1)..(152): Homolog of NCBI NO: 13385890 NR Description: RIKEN cDNA 2610016C12 [Mus musculus]
  misc_feature (1)..(152): Homolog of NCBI NO: 34785406 NR Description: Unknown (protein for MGC:64156) [Danio rerio]
  misc_feature (1)..(151): Homolog of NCBI NO: 28828597 NR Description: hypothetical protein [Dictyostelium discoideum]
  misc_feature (1)..(18): Homolog of NCBI NO: 28828597 NR Description: hypothetical protein [Dictyostelium discoideum]
  misc_feature (1)..(77): Homolog of NCBI NO: 37536838 NR Description: autophagocytosis protein AUT1-like
  misc_feature (1)..(156): Homolog of NCBI NO: 34903638 NR Description: B1015E06.2 [Oryza sativa (japonica
  misc_feature (1)..(157): Homolog of NCBI NO: 21595613 NR Description: autophagocytosis protein-like [Arabidopsis
  misc_feature (1)..(157): Homolog of NCBI NO: 18424474 NR Description: autophagocytosis protein - like
  misc_feature (1)..(152): Homolog of NCBI NO: 9758466 NR Description: autophagocytosis protein AUT1-like [Arabidopsis

SEQ ID NO: 31581 - DNA, 919 bp, Arabidopsis thaliana; identical to SEQ ID NO: 27991
  misc_feature (1)..(919): Ceres Seq. ID no. 13488627
  misc_feature: MA Experiment ID: 108434 Result: Down-regulated in Transcription
  misc_feature: MA Experiment 108434 PARAMETER Experiment Name: At_Root_Tips_cDNA_P Parameter: Tissue Value: Root Tips
  misc_feature: MA Experiment ID: 108462 Result: Up-regulated in Transcription
  misc_feature: MA Experiment 108462 PARAMETER Experiment Name: At_Germinating_Seeds_cDNA_P Parameter: Age (day) Value: 2 vs. 0
  misc_feature: MA Experiment 108462 PARAMETER Experiment Name: At_Germinating_Seeds_cDNA_P Parameter: Tissue Value: Germinating Seeds
  misc_feature: MA Experiment ID: 108463 Result: Up-regulated in Transcription
  misc_feature: MA Experiment 108463 PARAMETER Experiment Name: At_Germinating_Seeds_cDNA_P Parameter: Age (day) Value: 3 vs. 0
  misc_feature: MA Experiment 108463 PARAMETER Experiment Name: At_Germinating_Seeds_cDNA_P Parameter: Tissue Value: Germinating Seeds
  misc_feature: MA Experiment ID: 108573 Result: Up-regulated in Transcription
  misc_feature: MA Experiment 108573 PARAMETER Experiment Name: At_Drought_cDNA_P Parameter: Timepoint (hr) Value: 6
  misc_feature: MA Experiment 108573 PARAMETER Experiment Name: At_Drought_cDNA_P Parameter: Tissue Value: Aerial
  misc_feature: MA Experiment 108573 PARAMETER Experiment Name: At_Drought_cDNA_P Parameter: Treatment Value: Drought vs. No Drought
  misc_feature: MA Experiment ID: 108579 Result: Up-regulated in Transcription
  misc_feature: MA Experiment 108579 PARAMETER Experiment Name: At_4deg_Cold_cDNA_P Parameter: Temperature (deg C) Value: 4 vs. 22
  misc_feature: MA Experiment 108579 PARAMETER Experiment Name: At_4deg_Cold_cDNA_P Parameter: Timepoint (hr) Value: 6
  misc_feature: MA Experiment 108579 PARAMETER Experiment Name: At_4deg_Cold_cDNA_P Parameter: Tissue Value: Aerial
  misc_feature: MA Experiment ID: 20000113 Result: Up-regulated in Transcription
  misc_feature: MA Experiment 20000113 PARAMETER Experiment Name: At_42deg_Heat_cDNA_P Parameter: Temperature (deg C) Value: 42 vs. 22
  misc_feature: MA Experiment 20000113 PARAMETER Experiment Name: At_42deg_Heat_cDNA_P Parameter: Timepoint (hr) Value: 8
  misc_feature: MA Experiment 20000113 PARAMETER Experiment Name: At_42deg_Heat_cDNA_P Parameter: Tissue Value: Aerial
  misc_feature: MA Experiment ID: 20000180 Result: Up-regulated in Transcription
  misc_feature: MA Experiment 20000180 PARAMETER Experiment Name: At_Germinating_Seeds_P Parameter: Age (hr) Value: 24 vs. 0
  misc_feature: MA Experiment 20000180 PARAMETER Experiment Name: At_Germinating_Seeds_P Parameter: Tissue Value: Germinating Seeds
  misc_feature: MA Experiment ID: 20000185 Result: Down-regulated in Transcription
  misc_feature: MA Experiment 20000185 PARAMETER Experiment Name: At_Roots__P Parameter: Age (day) Value: 7 vs. 21
  misc_feature: MA Experiment 20000185 PARAMETER Experiment Name: At_Roots__P Parameter: Organism Value: A. thaliana
  misc_feature: MA Experiment 20000185 PARAMETER Experiment Name: At_Roots__P Parameter: Tissue Value: Roots vs. Whole Plant
  misc_feature: MA Experiment ID: 20000224 Result: Down-regulated in Transcription
  misc_feature: MA Experiment ID: 20000286 Result: Down-regulated in Transcription
  misc_feature: MA Experiment 20000286 PARAMETER Experiment Name: At_Open_Flower_P Parameter: Age (day) Value: 21
  misc_feature: MA Experiment 20000286 PARAMETER Experiment Name: At_Open_Flower_P Parameter: Plant Line Value: WS
  misc_feature: MA Experiment 20000286 PARAMETER Experiment Name: At_Open_Flower_P Parameter: Tissue Value: Half Open vs. Whole Plant
  misc_feature: MA Experiment ID: 20000438 Result: Down-regulated in Transcription
  misc_feature: MA Experiment 20000438 PARAMETER Experiment Name: At_Shoots__P Parameter: Age (day) Value: 14
  misc_feature: MA Experiment 20000438 PARAMETER Experiment Name: At_Shoots__P Parameter: Tissue Value: Shoots vs. Whole Plant
  misc_feature: MA Experiment ID: 20000439 Result: Down-regulated in Transcription
  misc_feature: MA Experiment 20000439 PARAMETER Experiment Name: At_Roots__P Parameter: Age (day) Value: 14 vs. 21
  misc_feature: MA Experiment 20000439 PARAMETER Experiment Name: At_Roots__P Parameter: Organism Value: A. thaliana
  misc_feature: MA Experiment 20000439 PARAMETER Experiment Name: At_Roots__P Parameter: Tissue Value: Roots vs. Whole Plant
  misc_feature: MA Experiment ID: 20001248 Result: Up-regulated in Transcription
  misc_feature: MA Experiment 20001248 PARAMETER Experiment Name: At_Far-red-induction_P Parameter: Age (day) Value: 7
  misc_feature: MA Experiment 20001248 PARAMETER Experiment Name: At_Far-red-induction_P Parameter: Light Value: Far-red vs. White
  misc_feature: MA Experiment 20001248 PARAMETER Experiment Name: At_Far-red-induction_P Parameter: Organism Value: A. thaliana
  misc_feature: MA Experiment 20001248 PARAMETER Experiment Name: At_Far-red-induction_P Parameter: Plant Line Value: Columbia
  misc_feature: MA Experiment 20001248 PARAMETER Experiment Name: At_Far-red-induction_P Parameter: Timepoint (hr) Value: 4
  misc_feature: MA Experiment 20001248 PARAMETER Experiment Name: At_Far-red-induction_P Parameter: Tissue Value: Whole Plant
  misc_feature: MA Experiment ID: 20001558 Result: Down-regulated in Transcription
  misc_feature: MA Experiment 20001558 PARAMETER Experiment Name: At_Drought_Soil_Dry_P Parameter: Age (day) Value: 27
  misc_feature: MA Experiment 20001558 PARAMETER Experiment Name: At_Drought_Soil_Dry_P Parameter: Organism Value: A. thaliana
  misc_feature: MA Experiment 20001558 PARAMETER Experiment Name: At_Drought_Soil_Dry_P Parameter: Plant Line Value: WS
  misc_feature: MA Experiment 20001558 PARAMETER Experiment Name: At_Drought_Soil_Dry_P Parameter: Post Timepoint (hr) Value: 6
  misc_feature: MA Experiment 20001558 PARAMETER Experiment Name: At_Drought_Soil_Dry_P Parameter: Post-Treatment Value: Re-Water vs. No Drought
  misc_feature: MA Experiment 20001558 PARAMETER Experiment Name: At_Drought_Soil_Dry_P Parameter: Timepoint (day) Value: 13
  misc_feature: MA Experiment 20001558 PARAMETER Experiment Name: At_Drought_Soil_Dry_P Parameter: Treatment Value: Drought vs. No Drought
  misc_feature: MA Experiment ID: 20001560 Result: Down-regulated in Transcription
  misc_feature: MA Experiment 20001560 PARAMETER Experiment Name: At_Drought_Soil_Dry_P Parameter: Age (day) Value: 28
  misc_feature: MA Experiment 20001560 PARAMETER Experiment Name: At_Drought_Soil_Dry_P Parameter: Organism Value: A. thaliana
  misc_feature: MA Experiment 20001560 PARAMETER Experiment Name: At_Drought_Soil_Dry_P Parameter: Plant Line Value: WS
  misc_feature: MA Experiment 20001560 PARAMETER Experiment Name: At_Drought_Soil_Dry_P Parameter: Post Timepoint (hr) Value: None
  misc_feature: MA Experiment 20001560 PARAMETER Experiment Name: At_Drought_Soil_Dry_P Parameter: Post-Treatment Value: None
  misc_feature: MA Experiment 20001560 PARAMETER Experiment Name: At_Drought_Soil_Dry_P Parameter: Timepoint (day) Value: 14
  misc_feature: MA Experiment 20001560 PARAMETER Experiment Name: At_Drought_Soil_Dry_P Parameter: Treatment Value: Drought vs. No Drought

SEQ ID NO: 31582 - protein, 179 aa, Arabidopsis thaliana; identical to SEQ ID NO: 27992
  peptide (1)..(179): Ceres Seq. ID no. 13488628
  misc_feature (82)..(179): Pfam Name: Dehydrin Pfam Description: Dehydrin
  misc_feature (1)..(137): Homolog of NCBI NO: 585217 NR Description: GLYCINE RICH PROTEIN A3
  misc_feature (4)..(179): Homolog of NCBI NO: 15238005 NR Description: glycine/proline-rich protein [Arabidopsis
  misc_feature (4)..(179): Homolog of NCBI NO: 21553447 NR Description: putative glycine and proline-rich protein
  misc_feature (4)..(179): Homolog of NCBI NO: 18398103 NR Description: proline-rich protein family [Arabidopsis
  misc_feature (1)..(179): Homolog of NCBI NO: 13543234 NR Description: Unknown (protein for MGC:12025) [Mus musculus]
  misc_feature (17)..(179): Homolog of NCBI NO: 33668156 NR Description: GPRP [Oryza sativa (indica cultivar-group)]
  misc_feature (1)..(179): Homolog of NCBI NO: 6478148 NR Description: putative glycine and proline-rich protein
  misc_feature (1)..(179): Homolog of NCBI NO: 18422542 NR Description: proline-rich protein family [Arabidopsis
  misc_feature (1)..(150): Homolog of NCBI NO: 7487135 NR Description: hypothetical protein T18B16.170 - Arabidopsis
  misc_feature (1)..(179): Homolog of NCBI NO: 15234178 NR Description: glycine/proline-rich protein [Arabidopsis

SEQ ID NO: 31583 - DNA, 1792 bp, Arabidopsis thaliana; identical to SEQ ID NO: 22471
  misc_feature (1)..(1792): Ceres Seq. ID no. 13490532
  misc_feature: MA Experiment ID: 20000169 Result: Up-regulated in Transcription
  misc_feature: MA Experiment 20000169 PARAMETER Experiment Name: At_100uM_ABA_P Parameter: Age (day) Value: 14
  misc_feature: MA Experiment 20000169 PARAMETER Experiment Name: At_100uM_ABA_P Parameter: Organism Value: A. thaliana
  misc_feature: MA Experiment 20000169 PARAMETER Experiment Name: At_100uM_ABA_P Parameter: Plant Line Value: WS
  misc_feature: MA Experiment 20000169 PARAMETER Experiment Name: At_100uM_ABA_P Parameter: Timepoint (hr) Value: 6
  misc_feature: MA Experiment 20000169 PARAMETER Experiment Name: At_100uM_ABA_P Parameter: Tissue Value: Aerial
  misc_feature: MA Experiment 20000169 PARAMETER Experiment Name: At_100uM_ABA_P Parameter: Treatment Value: 100uM ABA vs. No Treatment
  misc_feature: MA Experiment ID: 20000173 Result: Down-regulated in Transcription
  misc_feature: MA Experiment 20000173 PARAMETER Experiment Name: At_42deg_Heat_P Parameter: Age (day) Value: 14
  misc_feature: MA Experiment 20000173 PARAMETER Experiment Name: At_42deg_Heat_P Parameter: Organism Value: A. thaliana
  misc_feature: MA Experiment 20000173 PARAMETER Experiment Name: At_42deg_Heat_P Parameter: Plant Line Value: WS
  misc_feature: MA Experiment 20000173 PARAMETER Experiment Name: At_42deg_Heat_P Parameter: Temperature (deg C) Value: 42 vs. 22
  misc_feature: MA Experiment 20000173 PARAMETER Experiment Name: At_42deg_Heat_P Parameter: Timepoint (hr) Value: 6
  misc_feature: MA Experiment 20000173 PARAMETER Experiment Name: At_42deg_Heat_P Parameter: Tissue Value: Aerial
  misc_feature: MA Experiment ID: 20000179 Result: Up-regulated in Transcription
  misc_feature: MA Experiment 20000179 PARAMETER Experiment Name: At_Germinating_Seeds_P Parameter: Age (hr) Value: 6 vs. 0
  misc_feature: MA Experiment 20000179 PARAMETER Experiment Name: At_Germinating_Seeds_P Parameter: Tissue Value: Germinating Seeds
  misc_feature: MA Experiment ID: 20000180 Result: Up-regulated in Transcription
  misc_feature: MA Experiment 20000180 PARAMETER Experiment Name: At_Germinating_Seeds_P Parameter: Age (hr) Value: 24 vs. 0
  misc_feature: MA Experiment 20000180 PARAMETER Experiment Name: At_Germinating_Seeds_P Parameter: Tissue Value: Germinating Seeds
  misc_feature: MA Experiment ID: 20000184 Result: Up-regulated in Transcription
  misc_feature: MA Experiment 20000184 PARAMETER Experiment Name: At_Shoots__P Parameter: Age (day) Value: 7
  misc_feature: MA Experiment 20000184 PARAMETER Experiment Name: At_Shoots__P Parameter: Tissue Value: Shoots vs. Whole Plant
  misc_feature: MA Experiment ID: 20000185 Result: Up-regulated in Transcription
  misc_feature: MA Experiment 20000185 PARAMETER Experiment Name: At_Roots__P Parameter: Age (day) Value: 7 vs. 21
  misc_feature: MA Experiment 20000185 PARAMETER Experiment Name: At_Roots__P Parameter: Organism Value: A. thaliana
  misc_feature: MA Experiment 20000185 PARAMETER Experiment Name: At_Roots__P Parameter: Tissue Value: Roots vs. Whole Plant
  misc_feature: MA Experiment ID: 20000235 Result: Down-regulated in Transcription
  misc_feature: MA Experiment 20000235 PARAMETER Experiment Name: At_Siliques_P Parameter: Age (day) Value: 21
  misc_feature: MA Experiment 20000235 PARAMETER Experiment Name: At_Siliques_P Parameter: Organism Value: A. thaliana
  misc_feature: MA Experiment 20000235 PARAMETER Experiment Name: At_Siliques_P Parameter: Plant Line Value: WS
  misc_feature: MA Experiment 20000235 PARAMETER Experiment Name: At_Siliques_P Parameter: Tissue Value: 5-10mm Siliques vs. Whole Plant
  misc_feature: MA Experiment ID: 20000264 Result: Down-regulated in Transcription
  misc_feature: MA Experiment 20000264 PARAMETER Experiment Name: At_Open_Flower_P Parameter: Age (day) Value: 21
  misc_feature: MA Experiment 20000264 PARAMETER Experiment Name: At_Open_Flower_P Parameter: Plant Line Value: WS
  misc_feature: MA Experiment 20000264 PARAMETER Experiment Name: At_Open_Flower_P Parameter: Tissue Value: Open Flower vs. Whole Plant
  misc_feature: MA Experiment ID: 20000286 Result: Down-regulated in Transcription
  misc_feature: MA Experiment 20000286 PARAMETER Experiment Name: At_Open_Flower_P Parameter: Age (day) Value: 21
  misc_feature: MA Experiment 20000286 PARAMETER Experiment Name: At_Open_Flower_P Parameter: Plant Line Value: WS
  misc_feature: MA Experiment 20000286 PARAMETER Experiment Name: At_Open_Flower_P Parameter: Tissue Value: Half Open vs. Whole Plant
  misc_feature: MA Experiment ID: 20000438 Result: Up-regulated in Transcription
  misc_feature: MA Experiment 20000438 PARAMETER Experiment Name: At_Shoots__P Parameter: Age (day) Value: 14
  misc_feature: MA Experiment 20000438 PARAMETER Experiment Name: At_Shoots__P Parameter: Tissue Value: Shoots vs. Whole Plant
  misc_feature: MA Experiment ID: 20000439 Result: Up-regulated in Transcription
  misc_feature: MA Experiment 20000439 PARAMETER Experiment Name: At_Roots__P Parameter: Age (day) Value: 14 vs. 21
  misc_feature: MA Experiment 20000439 PARAMETER Experiment Name: At_Roots__P Parameter: Organism Value: A. thaliana
  misc_feature: MA Experiment 20000439 PARAMETER Experiment Name: At_Roots__P Parameter: Tissue Value: Roots vs. Whole Plant
  misc_feature: MA Experiment ID: 20000445 Result: Down-regulated in Transcription
  misc_feature: MA Experiment 20000445 PARAMETER Experiment Name: At_100uM_NAA__P Parameter: Age (day) Value: 14
  misc_feature: MA Experiment 20000445 PARAMETER Experiment Name: At_100uM_NAA__P Parameter: Organism Value: A. thaliana
  misc_feature: MA Experiment 20000445 PARAMETER Experiment Name: At_100uM_NAA__P Parameter: Plant Line Value: WS
  misc_feature: MA Experiment 20000445 PARAMETER Experiment Name: At_100uM_NAA__P Parameter: Timepoint (hr) Value: 6
  misc_feature: MA Experiment 20000445 PARAMETER Experiment Name: At_100uM_NAA__P Parameter: Tissue Value: Aerial
  misc_feature: MA Experiment 20000445 PARAMETER Experiment Name: At_100uM_NAA__P Parameter: Treatment Value: 100uM NAA vs. No Treatment
  misc_feature: MA Experiment ID: 20000452 Result: Up-regulated in Transcription
  misc_feature: MA Experiment 20000452 PARAMETER Experiment Name: At_CS6879_Shoots-Roots_P Parameter: Age (day) Value: 14
  misc_feature: MA Experiment 20000452 PARAMETER Experiment Name: At_CS6879_Shoots-Roots_P Parameter: Organism Value: A. thaliana
  misc_feature: MA Experiment 20000452 PARAMETER Experiment Name: At_CS6879_Shoots-Roots_P Parameter: Plant Line Value: CS6879 vs. WS
  misc_feature: MA Experiment 20000452 PARAMETER Experiment Name: At_CS6879_Shoots-Roots_P Parameter: Tissue Value: Shoots
  misc_feature: MA Experiment ID: 20000453 Result: Up-regulated in Transcription
  misc_feature: MA Experiment 20000453 PARAMETER Experiment Name: At_100uM_ABA_P Parameter: Age (day) Value: 15
  misc_feature: MA Experiment 20000453 PARAMETER Experiment Name: At_100uM_ABA_P Parameter: Organism Value: A. thaliana
  misc_feature: MA Experiment 20000453 PARAMETER Experiment Name: At_100uM_ABA_P Parameter: Plant Line Value: WS
  misc_feature: MA Experiment 20000453 PARAMETER Experiment Name: At_100uM_ABA_P Parameter: Timepoint (hr) Value: 24
  misc_feature: MA Experiment 20000453 PARAMETER Experiment Name: At_100uM_ABA_P Parameter: Tissue Value: Aerial
  misc_feature: MA Experiment 20000453 PARAMETER Experiment Name: At_100uM_ABA_P Parameter: Treatment Value: 100uM ABA vs. No Treatment
  misc_feature: MA Experiment ID: 20000455 Result: Up-regulated in Transcription
  misc_feature: MA Experiment 20000455 PARAMETER Experiment Name: At_100uM_ABA_P Parameter: Age (day) Value: 16
  misc_feature: MA Experiment 20000455 PARAMETER Experiment Name: At_100uM_ABA_P Parameter: Organism Value: A. thaliana
  misc_feature: MA Experiment 20000455 PARAMETER Experiment Name: At_100uM_ABA_P Parameter: Plant Line Value: WS
  misc_feature: MA Experiment 20000455 PARAMETER Experiment Name: At_100uM_ABA_P Parameter: Timepoint (hr) Value: 48
  misc_feature: MA Experiment 20000455 PARAMETER Experiment Name: At_100uM_ABA_P Parameter: Tissue Value: Aerial
  misc_feature: MA Experiment 20000455 PARAMETER Experiment Name: At_100uM_ABA_P Parameter: Treatment Value: 100uM ABA vs. No Treatment
  misc_feature: MA Experiment ID: 20000495 Result: Up-regulated in Transcription
  misc_feature: MA Experiment 20000495 PARAMETER Experiment Name: At_Guard_Cells_P Parameter: Harvest Date Value: 8/2/2002
  misc_feature: MA Experiment 20000495 PARAMETER Experiment Name: At_Guard_Cells_P Parameter: Organism Value: A. thaliana
  misc_feature: MA Experiment 20000495 PARAMETER Experiment Name: At_Guard_Cells_P Parameter: Tissue Value: Guard Cells vs. Leaves
  misc_feature: MA Experiment ID: 20000794 Result: Down-regulated in Transcription
  misc_feature: MA Experiment 20000794 PARAMETER Experiment Name: At_Petals_P Parameter: Age (day) Value: 23-25 days
  misc_feature: MA Experiment 20000794 PARAMETER Experiment Name: At_Petals_P Parameter: Plant Line Value: WS
  misc_feature: MA Experiment 20000794 PARAMETER Experiment Name: At_Petals_P Parameter: Tissue Value: Petals vs. Whole plant
  misc_feature: MA Experiment ID: 20001450 Result: Down-regulated in Transcription
  misc_feature: MA Experiment 20001450 PARAMETER Experiment Name: At_Far-red-induction_P Parameter: Age (day) Value: 7
  misc_feature: MA Experiment 20001450 PARAMETER Experiment Name: At_Far-red-induction_P Parameter: Light Value: Far-red vs. White
  misc_feature: MA Experiment 20001450 PARAMETER Experiment Name: At_Far-red-induction_P Parameter: Organism Value: A. thaliana
  misc_feature: MA Experiment 20001450 PARAMETER Experiment Name: At_Far-red-induction_P Parameter: Plant Line Value: Columbia
  misc_feature: MA Experiment 20001450 PARAMETER Experiment Name: At_Far-red-induction_P Parameter: Timepoint (hr) Value: 8
  misc_feature: MA Experiment 20001450 PARAMETER Experiment Name: At_Far-red-induction_P Parameter: Tissue Value: Whole Plant
  misc_feature: MA Experiment ID: 20001451 Result: Down-regulated in Transcription
  misc_feature: MA Experiment 20001451 PARAMETER Experiment Name: At_Far-red-induction_P Parameter: Age (day) Value: 7
  misc_feature: MA Experiment 20001451 PARAMETER Experiment Name: At_Far-red-induction_P Parameter: Light Value: Far-red vs. White
  misc_feature: MA Experiment 20001451 PARAMETER Experiment Name: At_Far-red-induction_P Parameter: Organism Value: A. thaliana
  misc_feature: MA Experiment 20001451 PARAMETER Experiment Name: At_Far-red-induction_P Parameter: Plant Line Value: Columbia
  misc_feature: MA Experiment 20001451 PARAMETER Experiment Name: At_Far-red-induction_P Parameter: Timepoint (hr) Value: 24
  misc_feature: MA Experiment 20001451 PARAMETER Experiment Name: At_Far-red-induction_P Parameter: Tissue Value: Whole Plant
  misc_feature: MA Experiment ID: 20001558 Result: Down-regulated in Transcription
  misc_feature: MA Experiment 20001558 PARAMETER Experiment Name: At_Drought_Soil_Dry_P Parameter: Age (day) Value: 27
  misc_feature: MA Experiment 20001558 PARAMETER Experiment Name: At_Drought_Soil_Dry_P Parameter: Organism Value: A. thaliana
  misc_feature: MA Experiment 20001558 PARAMETER Experiment Name: At_Drought_Soil_Dry_P Parameter: Plant Line Value: WS
  misc_feature: MA Experiment 20001558 PARAMETER Experiment Name: At_Drought_Soil_Dry_P Parameter: Post Timepoint (hr) Value: 6
  misc_feature: MA Experiment 20001558 PARAMETER Experiment Name: At_Drought_Soil_Dry_P Parameter: Post-Treatment Value: Re-Water vs. No Drought
  misc_feature: MA Experiment 20001558 PARAMETER Experiment Name: At_Drought_Soil_Dry_P Parameter: Timepoint (day) Value: 13
  misc_feature: MA Experiment 20001558 PARAMETER Experiment Name: At_Drought_Soil_Dry_P Parameter: Treatment Value: Drought vs. No Drought
  misc_feature: MA Experiment ID: 20001768 Result: Down-regulated in Transcription
  misc_feature: MA Experiment 20001768 PARAMETER Experiment Name: At_Far-red-enriched-adult_P Parameter: Age (day) Value: 28
  misc_feature: MA Experiment 20001768 PARAMETER Experiment Name: At_Far-red-enriched-adult_P Parameter: Light Value: Far-red enriched vs. White
  misc_feature: MA Experiment 20001768 PARAMETER Experiment Name: At_Far-red-enriched-adult_P Parameter: Organism Value: A. thaliana
  misc_feature: MA Experiment 20001768 PARAMETER Experiment Name: At_Far-red-enriched-adult_P Parameter: Plant Line Value: Columbia
  misc_feature: MA Experiment 20001768 PARAMETER Experiment Name: At_Far-red-enriched-adult_P Parameter: Timepoint (hr) Value: 1
  misc_feature: MA Experiment 20001768 PARAMETER Experiment Name: At_Far-red-enriched-adult_P Parameter: Tissue Value: Aerial

SEQ ID NO: 31584 - protein, 524 aa, Arabidopsis thaliana; identical to SEQ ID NO: 22472
  peptide (1)..(524): Ceres Seq. ID no. 13490533
  misc_feature (4)..(522): Homolog of NCBI NO: 12043529 NR Description: beta-glucosidase 1 [Arabidopsis thaliana]
  misc_feature (89)..(524): Homolog of NCBI NO: 1732572 NR Description: beta-glucosidase [Brassica nigra]
  misc_feature (1)..(524): Homolog of NCBI NO: 15241841 NR Description: glycosyl hydrolase family 1 [Arabidopsis thaliana]
  misc_feature (1)..(524): Homolog of NCBI NO: 30697327 NR Description: glycosyl hydrolase family 1, beta-glucosidase
  misc_feature (1)..(524): Homolog of NCBI NO: 2286069 NR Description: beta-glucosidase [Arabidopsis thaliana]
  misc_feature (1)..(524): Homolog of NCBI NO: 15219605 NR Description: glycosyl hydrolase family 1, beta-glucosidase
  misc_feature (1)..(524): Homolog of NCBI NO: 15219623 NR Description: glycosyl hydrolase family 1 [Arabidopsis
  misc_feature (1)..(524): Homolog of NCBI NO: 1732570 NR Description: beta-glucosidase [Arabidopsis thaliana]
  misc_feature (1)..(524): Homolog of NCBI NO: 1363489 NR Description: thioglucosidase (EC 3.2.1.147) 3D precursor -
  misc_feature (1)..(524): Homolog of NCBI NO: 15232626 NR Description: glycosyl hydrolase family 1 [Arabidopsis
  misc_feature (4)..(522): Homolog of NCBI NO: 12043529 NR Description: beta-glucosidase 1 [Arabidopsis thaliana]
  misc_feature (89)..(524): Homolog of NCBI NO: 1732572 NR Description: beta-glucosidase [Brassica nigra]
  misc_feature (1)..(524): Homolog of NCBI NO: 15241841 NR Description: glycosyl hydrolase family 1 [Arabidopsis thaliana]
  misc_feature (1)..(524): Homolog of NCBI NO: 30697327 NR Description: glycosyl hydrolase family 1, beta-glucosidase
  misc_feature (1)..(524): Homolog of NCBI NO: 2286069 NR Description: beta-glucosidase [Arabidopsis thaliana]
  misc_feature (1)..(524): Homolog of NCBI NO: 15219605 NR Description: glycosyl hydrolase family 1, beta-glucosidase
  misc_feature (1)..(524): Homolog of NCBI NO: 15219623 NR Description: glycosyl hydrolase family 1 [Arabidopsis
  misc_feature (1)..(524): Homolog of NCBI NO: 1732570 NR Description: beta-glucosidase [Arabidopsis thaliana]
  misc_feature (1)..(524): Homolog of NCBI NO: 1363489 NR Description: thioglucosidase (EC 3.2.1.147) 3D precursor -
  misc_feature (1)..(524): Homolog of NCBI NO: 15232626 NR Description: glycosyl hydrolase family 1 [Arabidopsis

SEQ ID NO: 31585 - protein, 423 aa, Arabidopsis thaliana; identical to SEQ ID NO: 22473
  peptide (1)..(423): Ceres Seq. ID no. 13490534
  misc_feature (1)..(421): Homolog of NCBI NO: 12043529 NR Description: beta-glucosidase 1 [Arabidopsis thaliana]
  misc_feature (1)..(423): Homolog of NCBI NO: 1732572 NR Description: beta-glucosidase [Brassica nigra]
  misc_feature (1)..(423): Homolog of NCBI NO: 15241841 NR Description: glycosyl hydrolase family 1 [Arabidopsis thaliana]
  misc_feature (1)..(423): Homolog of NCBI NO: 30697327 NR Description: glycosyl hydrolase family 1, beta-glucosidase
  misc_feature (1)..(423): Homolog of NCBI NO: 2286069 NR Description: beta-glucosidase [Arabidopsis thaliana]
  misc_feature (1)..(423): Homolog of NCBI NO: 15219605 NR Description: glycosyl hydrolase family 1, beta-glucosidase
  misc_feature (1)..(423): Homolog of NCBI NO: 15219623 NR Description: glycosyl hydrolase family 1 [Arabidopsis
  misc_feature (1)..(423): Homolog of NCBI NO: 1732570 NR Description: beta-glucosidase [Arabidopsis thaliana]
  misc_feature (1)..(423): Homolog of NCBI NO: 1363489 NR Description: thioglucosidase (EC 3.2.1.147) 3D precursor -
  misc_feature (1)..(423): Homolog of NCBI NO: 15232626 NR Description: glycosyl hydrolase family 1 [Arabidopsis
  misc_feature (1)..(421): Homolog of NCBI NO: 12043529 NR Description: beta-glucosidase 1 [Arabidopsis thaliana]
  misc_feature (1)..(423): Homolog of NCBI NO: 1732572 NR Description: beta-glucosidase [Brassica nigra]
  misc_feature (1)..(423): Homolog of NCBI NO: 15241841 NR Description: glycosyl hydrolase family 1 [Arabidopsis thaliana]
  misc_feature (1)..(423): Homolog of NCBI NO: 30697327 NR Description: glycosyl hydrolase family 1, beta-glucosidase
  misc_feature (1)..(423): Homolog of NCBI NO: 2286069 NR Description: beta-glucosidase [Arabidopsis thaliana]
  misc_feature (1)..(423): Homolog of NCBI NO: 15219605 NR Description: glycosyl hydrolase family 1, beta-glucosidase
  misc_feature (1)..(423): Homolog of NCBI NO: 15219623 NR Description: glycosyl hydrolase family 1 [Arabidopsis
  misc_feature (1)..(423): Homolog of NCBI NO: 1732570 NR Description: beta-glucosidase [Arabidopsis thaliana]
  misc_feature (1)..(423): Homolog of NCBI NO: 1363489 NR Description: thioglucosidase (EC 3.2.1.147) 3D precursor -
  misc_feature (1)..(423): Homolog of NCBI NO: 15232626 NR Description: glycosyl hydrolase family 1 [Arabidopsis

SEQ ID NO: 31586 - protein, 413 aa, Arabidopsis thaliana; identical to SEQ ID NO: 22474
  peptide (1)..(413): Ceres Seq. ID no. 13490535
  misc_feature (1)..(411): Homolog of NCBI NO: 12043529 NR Description: beta-glucosidase 1 [Arabidopsis thaliana]
  misc_feature (1)..(413): Homolog of NCBI NO: 1732572 NR Description: beta-glucosidase [Brassica nigra]
  misc_feature (1)..(413): Homolog of NCBI NO: 15241841 NR Description: glycosyl hydrolase family 1 [Arabidopsis thaliana]
  misc_feature (1)..(413): Homolog of NCBI NO: 30697327 NR Description: glycosyl hydrolase family 1, beta-glucosidase
  misc_feature (1)..(413): Homolog of NCBI NO: 2286069 NR Description: beta-glucosidase [Arabidopsis thaliana]
  misc_feature (1)..(413): Homolog of NCBI NO: 15219605 NR Description: glycosyl hydrolase family 1, beta-glucosidase
  misc_feature (1)..(413): Homolog of NCBI NO: 15219623 NR Description: glycosyl hydrolase family 1 [Arabidopsis
  misc_feature (1)..(413): Homolog of NCBI NO: 1732570 NR Description: beta-glucosidase [Arabidopsis thaliana]
  misc_feature (1)..(413): Homolog of NCBI NO: 1363489 NR Description: thioglucosidase (EC 3.2.1.147) 3D precursor -
  misc_feature (1)..(413): Homolog of NCBI NO: 15232626 NR Description: glycosyl hydrolase family 1 [Arabidopsis
  misc_feature (1)..(411): Homolog of NCBI NO: 12043529 NR Description: beta-glucosidase 1 [Arabidopsis thaliana]
  misc_feature (1)..(413): Homolog of NCBI NO: 1732572 NR Description: beta-glucosidase [Brassica nigra]
  misc_feature (1)..(413): Homolog of NCBI NO: 15241841 NR Description: glycosyl hydrolase family 1 [Arabidopsis thaliana]
  misc_feature (1)..(413): Homolog of NCBI NO: 30697327 NR Description: glycosyl hydrolase family 1, beta-glucosidase
  misc_feature (1)..(413): Homolog of NCBI NO: 2286069 NR Description: beta-glucosidase [Arabidopsis thaliana]
  misc_feature (1)..(413): Homolog of NCBI NO: 15219605 NR Description: glycosyl hydrolase family 1, beta-glucosidase
  misc_feature (1)..(413): Homolog of NCBI NO: 15219623 NR Description: glycosyl hydrolase family 1 [Arabidopsis
  misc_feature (1)..(413): Homolog of NCBI NO: 1732570 NR Description: beta-glucosidase [Arabidopsis thaliana]
  misc_feature (1)..(413): Homolog of NCBI NO: 1363489 NR Description: thioglucosidase (EC 3.2.1.147) 3D precursor -
  misc_feature (1)..(413): Homolog of NCBI NO: 15232626 NR Description: glycosyl hydrolase family 1 [Arabidopsis

SEQ ID NO: 31587 - DNA, 970 bp, Arabidopsis thaliana; identical to SEQ ID NO: 27997
  misc_feature (1)..(970): Ceres Seq. ID no. 13504892
  misc_feature: MA Experiment ID: 20001757 Result: Up-regulated in Transcription
  misc_feature: MA Experiment 20001757 PARAMETER Experiment Name: At_50mM_NH4NO3_L-to-H_P Parameter: Timepoint (hr) Value: 6
  misc_feature: MA Experiment 20001757 PARAMETER Experiment Name: At_50mM_NH4NO3_L-to-H_P Parameter: Tissue Value: Leaf
  misc_feature: MA Experiment 20001757 PARAMETER Experiment Name: At_50mM_NH4NO3_L-to-H_P Parameter: Treatment Value: 50mM NH4NO3 vs 100mM Mannitol

SEQ ID NO: 31588 - protein, 237 aa, Arabidopsis thaliana; identical to SEQ ID NO: 27998
  peptide (1)..(237): Ceres Seq. ID no. 13504893
  misc_feature (31)..(218): Pfam Name: Proteasome A-type and B-type Pfam Description: Proteasome A-type and B-type
  misc_feature (1)..(237): Homolog of NCBI NO: 15220961 NR Description: 20S proteasome alpha subunit E1 (PAE1)
  misc_feature (1)..(237): Homolog of NCBI NO: 15231824 NR Description: 20S proteasome alpha subunit E2 (PAE2)

SEQ ID NO: 31589 - protein, 170 aa, Arabidopsis thaliana; identical to SEQ ID NO: 27999
  peptide (1)..(170): Ceres Seq. ID no. 13504894
  misc_feature (1)..(151): Pfam Name: Proteasome A-type and B-type Pfam Description: Proteasome A-type and B-type
  misc_feature (1)..(170): Homolog of NCBI NO: 15220961 NR Description: 20S proteasome alpha subunit E1 (PAE1)
  misc_feature (1)..(170): Homolog of NCBI NO: 15231824 NR Description: 20S proteasome alpha subunit E2 (PAE2)

SEQ ID NO: 31590 - protein, 160 aa, Arabidopsis thaliana; identical to SEQ ID NO: 28000
  peptide (1)..(160): Ceres Seq. ID no. 13504895
  misc_feature (1)..(141): Pfam Name: Proteasome A-type and B-type Pfam Description: Proteasome A-type and B-type
  misc_feature (1)..(160): Homolog of NCBI NO: 15220961 NR Description: 20S proteasome alpha subunit E1 (PAE1)
  misc_feature (1)..(160): Homolog of NCBI NO: 15231824 NR Description: 20S proteasome alpha subunit E2 (PAE2)

SEQ ID NO: 31591 - DNA, 1153 bp, Arabidopsis thaliana; identical to SEQ ID NO: 28001
  misc_feature (1)..(1153): Ceres Seq. ID no. 12334239
  misc_feature: MA Experiment ID: 108488 Result: Down-regulated in Transcription
  misc_feature: MA Experiment ID: 20000224 Result: Down-regulated in Transcription

SEQ ID NO: 31592 - protein, 129 aa, Arabidopsis thaliana; identical to SEQ ID NO: 28002
  peptide (1)..(129): Ceres Seq. ID no. 12334240
  misc_feature (17)..(126): Pfam Name: Ras family Pfam Description: Ras family
  misc_feature (1)..(126): Homolog of NCBI NO: 18447915 NR Description: ras-related protein RAB8-2 [Nicotiana tabacum]
  misc_feature (1)..(126): Homolog of NCBI NO: 5669640 NR Description: ethylene-responsive small GTP-binding protein
  misc_feature (1)..(126): Homolog of NCBI NO: 479442 NR Description: GTP-binding protein ypt2 - tomato
  misc_feature (1)..(126): Homolog of NCBI NO: 18447921 NR Description: ras-related protein RAB8-5 [Nicotiana tabacum]
  misc_feature (1)..(126): Homolog of NCBI NO: 18447913 NR Description: ras-related protein RAB8-1 [Nicotiana tabacum]
  misc_feature (1)..(126): Homolog of NCBI NO: 1362066 NR Description: GTP-binding protein GTP6 - garden pea
  misc_feature (1)..(126): Homolog of NCBI NO: 18447917 NR Description: ras-related protein RAB8-3 [Nicotiana tabacum]
  misc_feature (1)..(126): Homolog of NCBI NO: 15231847 NR Description: Ras-related GTP-binding protein, putative
  misc_feature (1)..(126): Homolog of NCBI NO: 15238542 NR Description: GTP-binding protein ara-3; protein id:
  misc_feature (1)..(126): Homolog of NCBI NO: 15231322 NR Description: GTP-binding protein ara-3

SEQ ID NO: 31593 - protein, 121 aa, Arabidopsis thaliana; identical to SEQ ID NO: 28003
  peptide (1)..(121): Ceres Seq. ID no. 12334241
  misc_feature (33)..(84): Pfam Name: Ras family Pfam Description: Ras family
  misc_feature (33)..(121): Homolog of NCBI NO: 18447915 NR Description: ras-related protein RAB8-2 [Nicotiana tabacum]
  misc_feature (33)..(121): Homolog of NCBI NO: 5669640 NR Description: ethylene-responsive small GTP-binding protein
  misc_feature (33)..(121): Homolog of NCBI NO: 479442 NR Description: GTP-binding protein ypt2 - tomato
  misc_feature (33)..(121): Homolog of NCBI NO: 18447921 NR Description: ras-related protein RAB8-5 [Nicotiana tabacum]
  misc_feature (33)..(121): Homolog of NCBI NO: 18447913 NR Description: ras-related protein RAB8-1 [Nicotiana tabacum]
  misc_feature (33)..(121): Homolog of NCBI NO: 1362066 NR Description: GTP-binding protein GTP6 - garden pea
  misc_feature (33)..(121): Homolog of NCBI NO: 18447917 NR Description: ras-related protein RAB8-3 [Nicotiana tabacum]
  misc_feature (33)..(121): Homolog of NCBI NO: 15231847 NR Description: Ras-related GTP-binding protein, putative
  misc_feature (33)..(121): Homolog of NCBI NO: 15238542 NR Description: GTP-binding protein ara-3; protein id:
  misc_feature (33)..(121): Homolog of NCBI NO: 15231322 NR Description: GTP-binding protein ara-3

SEQ ID NO: 31594 - protein, 120 aa, Arabidopsis thaliana; identical to SEQ ID NO: 28004
  peptide (1)..(120): Ceres Seq. ID no. 12334242
  misc_feature (32)..(83): Pfam Name: Ras family Pfam Description: Ras family
  misc_feature (32)..(120): Homolog of NCBI NO: 18447915 NR Description: ras-related protein RAB8-2 [Nicotiana tabacum]
  misc_feature (32)..(120): Homolog of NCBI NO: 5669640 NR Description: ethylene-responsive small GTP-binding protein
  misc_feature (32)..(120): Homolog of NCBI NO: 479442 NR Description: GTP-binding protein ypt2 - tomato
  misc_feature (32)..(120): Homolog of NCBI NO: 18447921 NR Description: ras-related protein RAB8-5 [Nicotiana tabacum]
  misc_feature (32)..(120): Homolog of NCBI NO: 18447913 NR Description: ras-related protein RAB8-1 [Nicotiana tabacum]
  misc_feature (32)..(120): Homolog of NCBI NO: 1362066 NR Description: GTP-binding protein GTP6 - garden pea
  misc_feature (32)..(120): Homolog of NCBI NO: 18447917 NR Description: ras-related protein RAB8-3 [Nicotiana tabacum]
  misc_feature (32)..(120): Homolog of NCBI NO: 15231847 NR Description: Ras-related GTP-binding protein, putative
  misc_feature (32)..(120): Homolog of NCBI NO: 15238542 NR Description: GTP-binding protein ara-3; protein id:
  misc_feature (32)..(120): Homolog of NCBI NO: 15231322 NR Description: GTP-binding protein ara-3

SEQ ID NO: 31595 - DNA, 1203 bp, Arabidopsis thaliana; identical to SEQ ID NO: 28005
  misc_feature (1)..(1203): Ceres Seq. ID no. 12371326
  misc_feature: MA Experiment ID: 108434 Result: Down-regulated in Transcription
  misc_feature: MA Experiment 108434 PARAMETER Experiment Name: At_Root_Tips_cDNA_P Parameter: Tissue Value: Root Tips
  misc_feature: MA Experiment ID: 108462 Result: Up-regulated in Transcription
  misc_feature: MA Experiment 108462 PARAMETER Experiment Name: At_Germinating_Seeds_cDNA_P Parameter: Age (day) Value: 2 vs. 0
  misc_feature: MA Experiment 108462 PARAMETER Experiment Name: At_Germinating_Seeds_cDNA_P Parameter: Tissue Value: Germinating Seeds
  misc_feature: MA Experiment ID: 108463 Result: Up-regulated in Transcription
  misc_feature: MA Experiment 108463 PARAMETER Experiment Name: At_Germinating_Seeds_cDNA_P Parameter: Age (day) Value: 3 vs. 0
  misc_feature: MA Experiment 108463 PARAMETER Experiment Name: At_Germinating_Seeds_cDNA_P Parameter: Tissue Value: Germinating Seeds
  misc_feature: MA Experiment ID: 108464 Result: Up-regulated in Transcription
  misc_feature: MA Experiment 108464 PARAMETER Experiment Name: At_Germinating_Seeds_cDNA_P Parameter: Age (day) Value: 4 vs. 0
  misc_feature: MA Experiment 108464 PARAMETER Experiment Name: At_Germinating_Seeds_cDNA_P Parameter: Tissue Value: Germinating Seeds
  misc_feature: MA Experiment ID: 108488 Result: Down-regulated in Transcription
  misc_feature: MA Experiment ID: 108573 Result: Down-regulated in Transcription
  misc_feature: MA Experiment 108573 PARAMETER Experiment Name: At_Drought_cDNA_P Parameter: Timepoint (hr) Value: 6
  misc_feature: MA Experiment 108573 PARAMETER Experiment Name: At_Drought_cDNA_P Parameter: Tissue Value: Aerial
  misc_feature: MA Experiment 108573 PARAMETER Experiment Name: At_Drought_cDNA_P Parameter: Treatment Value: Drought vs. No Drought
  misc_feature: MA Experiment ID: 108577 Result: Down-regulated in Transcription
  misc_feature: MA Experiment 108577 PARAMETER Experiment Name: At_42deg_Heat_cDNA_P Parameter: Temperature (deg C) Value: 42 vs. 22
  misc_feature: MA Experiment 108577 PARAMETER Experiment Name: At_42deg_Heat_cDNA_P Parameter: Timepoint (hr) Value: 6
  misc_feature: MA Experiment 108577 PARAMETER Experiment Name: At_42deg_Heat_cDNA_P Parameter: Tissue Value: Aerial
  misc_feature: MA Experiment ID: 108668 Result: Up-regulated in Transcription
  misc_feature: MA Experiment 108668 PARAMETER Experiment Name: At_2mM_SA_cDNA_P Parameter: Plant Line Value: WS
  misc_feature: MA Experiment 108668 PARAMETER Experiment Name: At_2mM_SA_cDNA_P Parameter: Timepoint (hr) Value: 6
  misc_feature: MA Experiment 108668 PARAMETER Experiment Name: At_2mM_SA_cDNA_P Parameter: Treatment Value: 2mM SA vs. No Treatment
  misc_feature: MA Experiment ID: 20000087 Result: Down-regulated in Transcription
  misc_feature: MA Experiment 20000087 PARAMETER Experiment Name: At_100uM_ABA_Mutants_cDNA_P Parameter: Plant Line Value: WS
  misc_feature: MA Experiment 20000087 PARAMETER Experiment Name: At_100uM_ABA_Mutants_cDNA_P Parameter: Timepoint (hr) Value: 6
  misc_feature: MA Experiment 20000087 PARAMETER Experiment Name: At_100uM_ABA_Mutants_cDNA_P Parameter: Tissue Value: Aerial
  misc_feature: MA Experiment 20000087 PARAMETER Experiment Name: At_100uM_ABA_Mutants_cDNA_P Parameter: Treatment Value: 100uM ABA vs. No Treatment
  misc_feature: MA Experiment ID: 20000093 Result: Down-regulated in Transcription
  misc_feature: MA Experiment 20000093 PARAMETER Experiment Name: At_42deg_Heat_cDNA_P Parameter: Temperature (deg C) Value: 42 vs. 22
  misc_feature: MA Experiment 20000093 PARAMETER Experiment Name: At_42deg_Heat_cDNA_P Parameter: Timepoint (hr) Value: 0.5
  misc_feature: MA Experiment 20000093 PARAMETER Experiment Name: At_42deg_Heat_cDNA_P Parameter: Tissue Value: Aerial
  misc_feature: MA Experiment ID: 20000111 Result: Down-regulated in Transcription
  misc_feature: MA Experiment 20000111 PARAMETER Experiment Name: At_42deg_Heat_cDNA_P Parameter: Temperature (deg C) Value: 42 vs. 22
  misc_feature: MA Experiment 20000111 PARAMETER Experiment Name: At_42deg_Heat_cDNA_P Parameter: Timepoint (hr) Value: 6
  misc_feature: MA Experiment 20000111 PARAMETER Experiment Name: At_42deg_Heat_cDNA_P Parameter: Tissue Value: Aerial
  misc_feature: MA Experiment ID: 20000113 Result: Down-regulated in Transcription
  misc_feature: MA Experiment 20000113 PARAMETER Experiment Name: At_42deg_Heat_cDNA_P Parameter: Temperature (deg C) Value: 42 vs. 22
  misc_feature: MA Experiment 20000113 PARAMETER Experiment Name: At_42deg_Heat_cDNA_P Parameter: Timepoint (hr) Value: 8
  misc_feature: MA Experiment 20000113 PARAMETER Experiment Name: At_42deg_Heat_cDNA_P Parameter: Tissue Value: Aerial
  misc_feature: MA Experiment ID: 20000144 Result: Down-regulated in Transcription
  misc_feature: MA Experiment 20000144 PARAMETER Experiment Name: At_42deg_Heat_cDNA_P Parameter: Temperature (deg C) Value: 42 vs. 22
  misc_feature: MA Experiment 20000144 PARAMETER Experiment Name: At_42deg_Heat_cDNA_P Parameter: Timepoint (hr) Value: 1
  misc_feature: MA Experiment 20000144 PARAMETER Experiment Name: At_42deg_Heat_cDNA_P Parameter: Tissue Value: Aerial
  misc_feature: MA Experiment ID: 20000171 Result: Down-regulated in Transcription
  misc_feature: MA Experiment 20000171 PARAMETER Experiment Name: At_42deg_Heat_P Parameter: Age (day) Value: 14
  misc_feature: MA Experiment 20000171 PARAMETER Experiment Name: At_42deg_Heat_P Parameter: Organism Value: A. thaliana
  misc_feature: MA Experiment 20000171 PARAMETER Experiment Name: At_42deg_Heat_P Parameter: Plant Line Value: WS
  misc_feature: MA Experiment 20000171 PARAMETER Experiment Name: At_42deg_Heat_P Parameter: Temperature (deg C) Value: 42 vs. 22
  misc_feature: MA Experiment 20000171 PARAMETER Experiment Name: At_42deg_Heat_P Parameter: Timepoint (hr) Value: 1
  misc_feature: MA Experiment 20000171 PARAMETER Experiment Name: At_42deg_Heat_P Parameter: Tissue Value: Aerial
  misc_feature: MA Experiment ID: 20000173 Result: Down-regulated in Transcription
  misc_feature: MA Experiment 20000173 PARAMETER Experiment Name: At_42deg_Heat_P Parameter: Age (day) Value: 14
  misc_feature: MA Experiment 20000173 PARAMETER Experiment Name: At_42deg_Heat_P Parameter: Organism Value: A. thaliana
  misc_feature: MA Experiment 20000173 PARAMETER Experiment Name: At_42deg_Heat_P Parameter: Plant Line Value: WS
  misc_feature: MA Experiment 20000173 PARAMETER Experiment Name: At_42deg_Heat_P Parameter: Temperature (deg C) Value: 42 vs. 22
  misc_feature: MA Experiment 20000173 PARAMETER Experiment Name: At_42deg_Heat_P Parameter: Timepoint (hr) Value: 6
  misc_feature: MA Experiment 20000173 PARAMETER Experiment Name: At_42deg_Heat_P Parameter: Tissue Value: Aerial
  misc_feature: MA Experiment ID: 20000179 Result: Up-regulated in Transcription
  misc_feature: MA Experiment 20000179 PARAMETER Experiment Name: At_Germinating_Seeds_P Parameter: Age (hr) Value: 6 vs. 0
  misc_feature: MA Experiment 20000179 PARAMETER Experiment Name: At_Germinating_Seeds_P Parameter: Tissue Value: Germinating Seeds
  misc_feature: MA Experiment ID: 20000182 Result: Up-regulated in Transcription
  misc_feature: MA Experiment 20000182 PARAMETER Experiment Name: At_2mM_SA_P Parameter: Age (day) Value: 14
  misc_feature: MA Experiment 20000182 PARAMETER Experiment Name: At_2mM_SA_P Parameter: Organism Value: A. thaliana
  misc_feature: MA Experiment 20000182 PARAMETER Experiment Name: At_2mM_SA_P Parameter: Plant Line Value: WS
  misc_feature: MA Experiment 20000182 PARAMETER Experiment Name: At_2mM_SA_P Parameter: Timepoint (hr) Value: 6
  misc_feature: MA Experiment 20000182 PARAMETER Experiment Name: At_2mM_SA_P Parameter: Tissue Value: Aerial
  misc_feature: MA Experiment 20000182 PARAMETER Experiment Name: At_2mM_SA_P Parameter: Treatment Value: 2mM SA vs. No Treatment
  misc_feature: MA Experiment ID: 20000184 Result: Down-regulated in Transcription
  misc_feature: MA Experiment 20000184 PARAMETER Experiment Name: At_Shoots__P Parameter: Age (day) Value: 7
  misc_feature: MA Experiment 20000184 PARAMETER Experiment Name: At_Shoots__P Parameter: Tissue Value: Shoots vs. Whole Plant
  misc_feature: MA Experiment ID: 20000185 Result: Down-regulated in Transcription
  misc_feature: MA Experiment 20000185 PARAMETER Experiment Name: At_Roots__P Parameter: Age (day) Value: 7 vs. 21
  misc_feature: MA Experiment 20000185 PARAMETER Experiment Name: At_Roots__P Parameter: Organism Value: A. thaliana
  misc_feature: MA Experiment 20000185 PARAMETER Experiment Name: At_Roots__P Parameter: Tissue Value: Roots vs. Whole Plant
  misc_feature: MA Experiment ID: 20000227 Result: Down-regulated in Transcription
  misc_feature: MA Experiment 20000227 PARAMETER Experiment Name: At_Root-Tips-vs-Tops_P Parameter: Tissue Value: Root Tips vs. Root Tops
  misc_feature: MA Experiment ID: 20000234 Result: Down-regulated in Transcription
  misc_feature: MA Experiment 20000234 PARAMETER Experiment Name: At_Siliques_P Parameter: Age (day) Value: 21
  misc_feature: MA Experiment 20000234 PARAMETER Experiment Name: At_Siliques_P Parameter: Organism Value: A. thaliana
  misc_feature: MA Experiment 20000234 PARAMETER Experiment Name: At_Siliques_P Parameter: Plant Line Value: WS
  misc_feature: MA Experiment 20000234 PARAMETER Experiment Name: At_Siliques_P Parameter: Tissue Value: Less Than 5mm Siliques vs. Whole Plant
  misc_feature: MA Experiment ID: 20000264 Result: Down-regulated in Transcription
  misc_feature: MA Experiment 20000264 PARAMETER Experiment Name: At_Open_Flower_P Parameter: Age (day) Value: 21
  misc_feature: MA Experiment 20000264 PARAMETER Experiment Name: At_Open_Flower_P Parameter: Plant Line Value: WS
  misc_feature: MA Experiment 20000264 PARAMETER Experiment Name: At_Open_Flower_P Parameter: Tissue Value: Open Flower vs. Whole Plant
  misc_feature: MA Experiment ID: 20000265 Result: Down-regulated in Transcription
  misc_feature: MA Experiment 20000265 PARAMETER Experiment Name: At_Open_Flower_P Parameter: Age (day) Value: 21
  misc_feature: MA Experiment 20000265 PARAMETER Experiment Name: At_Open_Flower_P Parameter: Plant Line Value: WS
  misc_feature: MA Experiment 20000265 PARAMETER Experiment Name: At_Open_Flower_P Parameter: Tissue Value: Closed Flower vs. Whole Plant
  misc_feature: MA Experiment ID: 20000286 Result: Down-regulated in Transcription
  misc_feature: MA Experiment 20000286 PARAMETER Experiment Name: At_Open_Flower_P Parameter: Age (day) Value: 21
  misc_feature: MA Experiment 20000286 PARAMETER Experiment Name: At_Open_Flower_P Parameter: Plant Line Value: WS
  misc_feature: MA Experiment 20000286 PARAMETER Experiment Name: At_Open_Flower_P Parameter: Tissue Value: Half Open vs. Whole Plant
  misc_feature: MA Experiment ID: 20000437 Result: Down-regulated in Transcription
  misc_feature: MA Experiment 20000437 PARAMETER Experiment Name: At_Drought_P Parameter: Age (day) Value: 8
  misc_feature: MA Experiment 20000437 PARAMETER Experiment Name: At_Drought_P Parameter: Organism Value: A. thaliana
  misc_feature: MA Experiment 20000437 PARAMETER Experiment Name: At_Drought_P Parameter: Plant Line Value: WS
  misc_feature: MA Experiment 20000437 PARAMETER Experiment Name: At_Drought_P Parameter: Timepoint (hr) Value: 24
  misc_feature: MA Experiment 20000437 PARAMETER Experiment Name: At_Drought_P Parameter: Tissue Value: Whole Plant
  misc_feature: MA Experiment 20000437 PARAMETER Experiment Name: At_Drought_P Parameter: Treatment Value: Drought vs. No Drought
  misc_feature: MA Experiment ID: 20000495 Result: Down-regulated in Transcription
  misc_feature: MA Experiment 20000495 PARAMETER Experiment Name: At_Guard_Cells_P Parameter: Harvest Date Value: 8/2/2002
  misc_feature: MA Experiment 20000495 PARAMETER Experiment Name: At_Guard_Cells_P Parameter: Organism Value: A. thaliana
  misc_feature: MA Experiment 20000495 PARAMETER Experiment Name: At_Guard_Cells_P Parameter: Tissue Value: Guard Cells vs. Leaves
  misc_feature: MA Experiment ID: 20000709 Result: Down-regulated in Transcription
  misc_feature: MA Experiment 20000709 PARAMETER Experiment Name: At_15mM_NH4NO3_L-to-H_P Parameter: Age (hr) Value: 14
  misc_feature: MA Experiment 20000709 PARAMETER Experiment Name: At_15mM_NH4NO3_L-to-H_P Parameter: Organism Value: A. thaliana
  misc_feature: MA Experiment 20000709 PARAMETER Experiment Name: At_15mM_NH4NO3_L-to-H_P Parameter: Plant Line Value: WS
  misc_feature: MA Experiment 20000709 PARAMETER Experiment Name: At_15mM_NH4NO3_L-to-H_P Parameter: Timepoint (hr) Value: 4
  misc_feature: MA Experiment 20000709 PARAMETER Experiment Name: At_15mM_NH4NO3_L-to-H_P Parameter: Tissue Value: Aerial
  misc_feature: MA Experiment 20000709 PARAMETER Experiment Name: At_15mM_NH4NO3_L-to-H_P Parameter: Treatment Value: 15mM NH4NO3 vs. 30mM Mannitol
  misc_feature: MA Experiment ID: 20000794 Result: Down-regulated in Transcription
  misc_feature: MA Experiment 20000794 PARAMETER Experiment Name: At_Petals_P Parameter: Age (day) Value: 23-25 days
  misc_feature: MA Experiment 20000794 PARAMETER Experiment Name: At_Petals_P Parameter: Plant Line Value: WS
  misc_feature: MA Experiment 20000794 PARAMETER Experiment Name: At_Petals_P Parameter: Tissue Value: Petals vs. Whole plant
  misc_feature: MA Experiment ID: 20001905 Result: Down-regulated in Transcription
  misc_feature: MA Experiment 20001905 PARAMETER Experiment Name: At_Drought_Reproduction_P Parameter: Age (day) Value: 40
  misc_feature: MA Experiment 20001905 PARAMETER Experiment Name: At_Drought_Reproduction_P Parameter: Organism Value: A. thaliana
  misc_feature: MA Experiment 20001905 PARAMETER Experiment Name: At_Drought_Reproduction_P Parameter: Plant Line Value: WS
  misc_feature: MA Experiment 20001905 PARAMETER Experiment Name: At_Drought_Reproduction_P Parameter: Timepoint (day) Value: 10
  misc_feature: MA Experiment 20001905 PARAMETER Experiment Name: At_Drought_Reproduction_P Parameter: Tissue Value: Rosettes
  misc_feature: MA Experiment 20001905 PARAMETER Experiment Name: At_Drought_Reproduction_P Parameter: Treatment Value: Drought vs. No Drought

SEQ ID NO: 31596 - protein, 182 aa, Arabidopsis thaliana; identical to SEQ ID NO: 28006
  peptide (1)..(182): Ceres Seq. ID no. 12371327
  misc_feature (24)..(160): Pfam Name: NUDIX domain Pfam Description: NUDIX domain
  misc_feature (6)..(174): Homolog of NCBI NO: 18391450 NR Description: expressed protein
  misc_feature (7)..(154): Homolog of NCBI NO: 34900054 NR Description: MutT-like protein~contains ESTs
  misc_feature (7)..(154): Homolog of NCBI NO: 38175436 NR Description: MutT-like protein [Oryza sativa (japonica
  misc_feature (4)..(160): Homolog of NCBI NO: 25367539 NR Description: unknown protein [imported] - Arabidopsis thaliana
  misc_feature (4)..(160): Homolog of NCBI NO: 22330598 NR Description: unknown protein
  misc_feature (3)..(158): Homolog of NCBI NO: 15221055 NR Description: unknown protein; protein id: At1g18300.1
  misc_feature (27)..(167): Homolog of NCBI NO: 31747031 NR Description: MutT-like protein [Cucumis sativus]
  misc_feature (6)..(171): Homolog of NCBI NO: 15223919 NR Description: hypothetical protein; protein id: At1g14860.1
  misc_feature (6)..(182): Homolog of NCBI NO: 21595695 NR Description: unknown [Arabidopsis thaliana]
  misc_feature (1)..(182): Homolog of NCBI NO: 18379275 NR Description: expressed protein

SEQ ID NO: 31597 - protein, 177 aa, Arabidopsis thaliana; identical to SEQ ID NO: 28007
  peptide (1)..(177): Ceres Seq. ID no. 12371328
  misc_feature (19)..(155): Pfam Name: NUDIX domain Pfam Description: NUDIX domain
  misc_feature (1)..(169): Homolog of NCBI NO: 18391450 NR Description: expressed protein
  misc_feature (2)..(149): Homolog of NCBI NO: 34900054 NR Description: MutT-like protein~contains ESTs
  misc_feature (2)..(149): Homolog of NCBI NO: 38175436 NR Description: MutT-like protein [Oryza sativa (japonica
  misc_feature (1)..(155): Homolog of NCBI NO: 25367539 NR Description: unknown protein [imported] - Arabidopsis thaliana
  misc_feature (1)..(155): Homolog of NCBI NO: 22330598 NR Description: unknown protein
  misc_feature (1)..(153): Homolog of NCBI NO: 15221055 NR Description: unknown protein; protein id: At1g18300.1
  misc_feature (22)..(162): Homolog of NCBI NO: 31747031 NR Description: MutT-like protein [Cucumis sativus]
  misc_feature (1)..(166): Homolog of NCBI NO: 15223919 NR Description: hypothetical protein; protein id: At1g14860.1
  misc_feature (1)..(177): Homolog of NCBI NO: 21595695 NR Description: unknown [Arabidopsis thaliana]
  misc_feature (1)..(177): Homolog of NCBI NO: 18379275 NR Description: expressed protein

SEQ ID NO: 31598 - protein, 122 aa, Arabidopsis thaliana; identical to SEQ ID NO: 28008
  peptide (1)..(122): Ceres Seq. ID no. 12371329
  misc_feature (1)..(100): Pfam Name: NUDIX domain Pfam Description: NUDIX domain
  misc_feature (1)..(114): Homolog of NCBI NO: 18391450 NR Description: expressed protein
  misc_feature (1)..(94): Homolog of NCBI NO: 34900054 NR Description: MutT-like protein~contains ESTs
  misc_feature (1)..(94): Homolog of NCBI NO: 38175436 NR Description: MutT-like protein [Oryza sativa (japonica
  misc_feature (1)..(100): Homolog of NCBI NO: 25367539 NR Description: unknown protein [imported] - Arabidopsis thaliana
  misc_feature (1)..(100): Homolog of NCBI NO: 22330598 NR Description: unknown protein
  misc_feature (1)..(98): Homolog of NCBI NO: 15221055 NR Description: unknown protein; protein id: At1g18300.1
  misc_feature (1)..(107): Homolog of NCBI NO: 31747031 NR Description: MutT-like protein [Cucumis sativus]
  misc_feature (1)..(111): Homolog of NCBI NO: 15223919 NR Description: hypothetical protein; protein id: At1g14860.1
  misc_feature (1)..(122): Homolog of NCBI NO: 21595695 NR Description: unknown [Arabidopsis thaliana]
  misc_feature (1)..(122): Homolog of NCBI NO: 18379275 NR Description: expressed protein

SEQ ID NO: 31599 - DNA, 1271 bp, Arabidopsis thaliana; identical to SEQ ID NO: 28009
  misc_feature (1)..(1271): Ceres Seq. ID no. 13490305
  misc_feature: MA Experiment ID: 20000180 Result: Up-regulated in Transcription
  misc_feature: MA Experiment 20000180 PARAMETER Experiment Name: At_Germinating_Seeds_P Parameter: Age (hr) Value: 24 vs. 0
  misc_feature: MA Experiment 20000180 PARAMETER Experiment Name: At_Germinating_Seeds_P Parameter: Tissue Value: Germinating Seeds
  misc_feature: MA Experiment ID: 20000185 Result: Down-regulated in Transcription
  misc_feature: MA Experiment 20000185 PARAMETER Experiment Name: At_Roots__P Parameter: Age (day) Value: 7 vs. 21
  misc_feature: MA Experiment 20000185 PARAMETER Experiment Name: At_Roots__P Parameter: Organism Value: A. thaliana
  misc_feature: MA Experiment 20000185 PARAMETER Experiment Name: At_Roots__P Parameter: Tissue Value: Roots vs. Whole Plant
  misc_feature: MA Experiment ID: 20000227 Result: Down-regulated in Transcription
  misc_feature: MA Experiment 20000227 PARAMETER Experiment Name: At_Root-Tips-vs-Tops_P Parameter: Tissue Value: Root Tips vs. Root Tops
  misc_feature: MA Experiment ID: 20000264 Result: Down-regulated in Transcription
  misc_feature: MA Experiment 20000264 PARAMETER Experiment Name: At_Open_Flower_P Parameter: Age (day) Value: 21
  misc_feature: MA Experiment 20000264 PARAMETER Experiment Name: At_Open_Flower_P Parameter: Plant Line Value: WS
  misc_feature: MA Experiment 20000264 PARAMETER Experiment Name: At_Open_Flower_P Parameter: Tissue Value: Open Flower vs. Whole Plant
  misc_feature: MA Experiment ID: 20000269 Result: Down-regulated in Transcription
  misc_feature: MA Experiment 20000269 PARAMETER Experiment Name: At_1mM_KNO3_L-vs-H_Roots_P Parameter: Age (day) Value: 7,10,12
  misc_feature: MA Experiment 20000269 PARAMETER Experiment Name: At_1mM_KNO3_L-vs-H_Roots_P Parameter: Organism Value: A. thaliana
  misc_feature: MA Experiment 20000269 PARAMETER Experiment Name: At_1mM_KNO3_L-vs-H_Roots_P Parameter: Plant Line Value: WS
  misc_feature: MA Experiment 20000269 PARAMETER Experiment Name: At_1mM_KNO3_L-vs-H_Roots_P Parameter: Timepoint (day) Value: 7,10,12
  misc_feature: MA Experiment 20000269 PARAMETER Experiment Name: At_1mM_KNO3_L-vs-H_Roots_P Parameter: Tissue Value: Roots
  misc_feature: MA Experiment 20000269 PARAMETER Experiment Name: At_1mM_KNO3_L-vs-H_Roots_P Parameter: Treatment Value: 1mM KNO3 vs. 50mM KNO3
  misc_feature: MA Experiment ID: 20000286 Result: Down-regulated in Transcription
  misc_feature: MA Experiment 20000286 PARAMETER Experiment Name: At_Open_Flower_P Parameter: Age (day) Value: 21
  misc_feature: MA Experiment 20000286 PARAMETER Experiment Name: At_Open_Flower_P Parameter: Plant Line Value: WS
  misc_feature: MA Experiment 20000286 PARAMETER Experiment Name: At_Open_Flower_P Parameter: Tissue Value: Half Open vs. Whole Plant
  misc_feature: MA Experiment ID: 20000436 Result: Down-regulated in Transcription
  misc_feature: MA Experiment 20000436 PARAMETER Experiment Name: At_Drought_P Parameter: Age (day) Value: 7
  misc_feature: MA Experiment 20000436 PARAMETER Experiment Name: At_Drought_P Parameter: Organism Value: A. thaliana
  misc_feature: MA Experiment 20000436 PARAMETER Experiment Name: At_Drought_P Parameter: Plant Line Value: WS
  misc_feature: MA Experiment 20000436 PARAMETER Experiment Name: At_Drought_P Parameter: Timepoint (hr) Value: 12
  misc_feature: MA Experiment 20000436 PARAMETER Experiment Name: At_Drought_P Parameter: Tissue Value: Whole Plant
  misc_feature: MA Experiment 20000436 PARAMETER Experiment Name: At_Drought_P Parameter: Treatment Value: Drought vs. No Drought
  misc_feature: MA Experiment ID: 20000437 Result: Down-regulated in Transcription
  misc_feature: MA Experiment 20000437 PARAMETER Experiment Name: At_Drought_P Parameter: Age (day) Value: 8
  misc_feature: MA Experiment 20000437 PARAMETER Experiment Name: At_Drought_P Parameter: Organism Value: A. thaliana
  misc_feature: MA Experiment 20000437 PARAMETER Experiment Name: At_Drought_P Parameter: Plant Line Value: WS
  misc_feature: MA Experiment 20000437 PARAMETER Experiment Name: At_Drought_P Parameter: Timepoint (hr) Value: 24
  misc_feature: MA Experiment 20000437 PARAMETER Experiment Name: At_Drought_P Parameter: Tissue Value: Whole Plant
  misc_feature: MA Experiment 20000437 PARAMETER Experiment Name: At_Drought_P Parameter: Treatment Value: Drought vs. No Drought
  misc_feature: MA Experiment ID: 20000438 Result: Up-regulated in Transcription
  misc_feature: MA Experiment 20000438 PARAMETER Experiment Name: At_Shoots__P Parameter: Age (day) Value: 14
  misc_feature: MA Experiment 20000438 PARAMETER Experiment Name: At_Shoots__P Parameter: Tissue Value: Shoots vs. Whole Plant
  misc_feature: MA Experiment ID: 20000439 Result: Down-regulated in Transcription
  misc_feature: MA Experiment 20000439 PARAMETER Experiment Name: At_Roots__P Parameter: Age (day) Value: 14 vs. 21
  misc_feature: MA Experiment 20000439 PARAMETER Experiment Name: At_Roots__P Parameter: Organism Value: A. thaliana
  misc_feature: MA Experiment 20000439 PARAMETER Experiment Name: At_Roots__P Parameter: Tissue Value: Roots vs. Whole Plant
  misc_feature: MA Experiment ID: 20000794 Result: Down-regulated in Transcription
  misc_feature: MA Experiment 20000794 PARAMETER Experiment Name: At_Petals_P Parameter: Age (day) Value: 23-25 days
  misc_feature: MA Experiment 20000794 PARAMETER Experiment Name: At_Petals_P Parameter: Plant Line Value: WS
  misc_feature: MA Experiment 20000794 PARAMETER Experiment Name: At_Petals_P Parameter: Tissue Value: Petals vs. Whole plant
  misc_feature: MA Experiment ID: 20001557 Result: Down-regulated in Transcription
  misc_feature: MA Experiment 20001557 PARAMETER Experiment Name: At_Drought_Soil_Dry_P Parameter: Age (day) Value: 27
  misc_feature: MA Experiment 20001557 PARAMETER Experiment Name: At_Drought_Soil_Dry_P Parameter: Organism Value: A. thaliana
  misc_feature: MA Experiment 20001557 PARAMETER Experiment Name: At_Drought_Soil_Dry_P Parameter: Plant Line Value: WS
  misc_feature: MA Experiment 20001557 PARAMETER Experiment Name: At_Drought_Soil_Dry_P Parameter: Post Timepoint (hr) Value: 3
  misc_feature: MA Experiment 20001557 PARAMETER Experiment Name: At_Drought_Soil_Dry_P Parameter: Post-Treatment Value: Re-Water vs. No Drought
  misc_feature: MA Experiment 20001557 PARAMETER Experiment Name: At_Drought_Soil_Dry_P Parameter: Timepoint (day) Value: 13
  misc_feature: MA Experiment 20001557 PARAMETER Experiment Name: At_Drought_Soil_Dry_P Parameter: Treatment Value: Drought vs. No Drought
  misc_feature: MA Experiment ID: 20001559 Result: Down-regulated in Transcription
  misc_feature: MA Experiment 20001559 PARAMETER Experiment Name: At_Drought_Soil_Dry_P Parameter: Age (day) Value: 28
  misc_feature: MA Experiment 20001559 PARAMETER Experiment Name: At_Drought_Soil_Dry_P Parameter: Organism Value: A. thaliana
  misc_feature: MA Experiment 20001559 PARAMETER Experiment Name: At_Drought_Soil_Dry_P Parameter: Plant Line Value: WS
  misc_feature: MA Experiment 20001559 PARAMETER Experiment Name: At_Drought_Soil_Dry_P Parameter: Post Timepoint (hr) Value: 29
  misc_feature: MA Experiment 20001559 PARAMETER Experiment Name: At_Drought_Soil_Dry_P Parameter: Post-Treatment Value: Re-Water vs. No Drought
  misc_feature: MA Experiment 20001559 PARAMETER Experiment Name: At_Drought_Soil_Dry_P Parameter: Timepoint (day) Value: 14
  misc_feature: MA Experiment 20001559 PARAMETER Experiment Name: At_Drought_Soil_Dry_P Parameter: Treatment Value: Drought vs. No Drought
  misc_feature: MA Experiment ID: 20001757 Result: Up-regulated in Transcription
  misc_feature: MA Experiment 20001757 PARAMETER Experiment Name: At_50mM_NH4NO3_L-to-H_P Parameter: Timepoint (hr) Value: 6
  misc_feature: MA Experiment 20001757 PARAMETER Experiment Name: At_50mM_NH4NO3_L-to-H_P Parameter: Tissue Value: Leaf
  misc_feature: MA Experiment 20001757 PARAMETER Experiment Name: At_50mM_NH4NO3_L-to-H_P Parameter: Treatment Value: 50mM NH4NO3 vs 100mM Mannitol
  misc_feature: MA Experiment ID: 20001904 Result: Down-regulated in Transcription
  misc_feature: MA Experiment 20001904 PARAMETER Experiment Name: At_Drought_Reproduction_P Parameter: Age (day) Value: 37
  misc_feature: MA Experiment 20001904 PARAMETER Experiment Name: At_Drought_Reproduction_P Parameter: Organism Value: A. thaliana
  misc_feature: MA Experiment 20001904 PARAMETER Experiment Name: At_Drought_Reproduction_P Parameter: Plant Line Value: WS
  misc_feature: MA Experiment 20001904 PARAMETER Experiment Name: At_Drought_Reproduction_P Parameter: Timepoint (day) Value: 7
  misc_feature: MA Experiment 20001904 PARAMETER Experiment Name: At_Drought_Reproduction_P Parameter: Tissue Value: Rosettes
  misc_feature: MA Experiment 20001904 PARAMETER Experiment Name: At_Drought_Reproduction_P Parameter: Treatment Value: Drought vs. No Drought
  misc_feature: MA Experiment ID: 20001905 Result: Down-regulated in Transcription
  misc_feature: MA Experiment 20001905 PARAMETER Experiment Name: At_Drought_Reproduction_P Parameter: Age (day) Value: 40
  misc_feature: MA Experiment 20001905 PARAMETER Experiment Name: At_Drought_Reproduction_P Parameter: Organism Value: A. thaliana
  misc_feature: MA Experiment 20001905 PARAMETER Experiment Name: At_Drought_Reproduction_P Parameter: Plant Line Value: WS
  misc_feature: MA Experiment 20001905 PARAMETER Experiment Name: At_Drought_Reproduction_P Parameter: Timepoint (day) Value: 10
  misc_feature: MA Experiment 20001905 PARAMETER Experiment Name: At_Drought_Reproduction_P Parameter: Tissue Value: Rosettes
  misc_feature: MA Experiment 20001905 PARAMETER Experiment Name: At_Drought_Reproduction_P Parameter: Treatment Value: Drought vs. No Drought
  misc_feature: MA Experiment ID: 20001906 Result: Down-regulated in Transcription
  misc_feature: MA Experiment 20001906 PARAMETER Experiment Name: At_Drought_Reproduction_P Parameter: Age (day) Value: 35
  misc_feature: MA Experiment 20001906 PARAMETER Experiment Name: At_Drought_Reproduction_P Parameter: Organism Value: A. thaliana
  misc_feature: MA Experiment 20001906 PARAMETER Experiment Name: At_Drought_Reproduction_P Parameter: Plant Line Value: WS
  misc_feature: MA Experiment 20001906 PARAMETER Experiment Name: At_Drought_Reproduction_P Parameter: Timepoint (day) Value: 5
  misc_feature: MA Experiment 20001906 PARAMETER Experiment Name: At_Drought_Reproduction_P Parameter: Tissue Value: Siliques
  misc_feature: MA Experiment 20001906 PARAMETER Experiment Name: At_Drought_Reproduction_P Parameter: Treatment Value: Drought vs. No Drought
  misc_feature: MA Experiment ID: 20001908 Result: Down-regulated in Transcription
  misc_feature: MA Experiment 20001908 PARAMETER Experiment Name: At_Drought_Reproduction_P Parameter: Age (day) Value: 40
  misc_feature: MA Experiment 20001908 PARAMETER Experiment Name: At_Drought_Reproduction_P Parameter: Organism Value: A. thaliana
  misc_feature: MA Experiment 20001908 PARAMETER Experiment Name: At_Drought_Reproduction_P Parameter: Plant Line Value: WS
  misc_feature: MA Experiment 20001908 PARAMETER Experiment Name: At_Drought_Reproduction_P Parameter: Timepoint (day) Value: 10
  misc_feature: MA Experiment 20001908 PARAMETER Experiment Name: At_Drought_Reproduction_P Parameter: Tissue Value: Siliques
  misc_feature: MA Experiment 20001908 PARAMETER Experiment Name: At_Drought_Reproduction_P Parameter: Treatment Value: Drought vs. No Drought
  misc_feature: MA Experiment ID: 20001911 Result: Down-regulated in Transcription
  misc_feature: MA Experiment 20001911 PARAMETER Experiment Name: At_Drought_Reproduction_P Parameter: Age (day) Value: 40
  misc_feature: MA Experiment 20001911 PARAMETER Experiment Name: At_Drought_Reproduction_P Parameter: Organism Value: A. thaliana
  misc_feature: MA Experiment 20001911 PARAMETER Experiment Name: At_Drought_Reproduction_P Parameter: Plant Line Value: WS
  misc_feature: MA Experiment 20001911 PARAMETER Experiment Name: At_Drought_Reproduction_P Parameter: Timepoint (day) Value: 10
  misc_feature: MA Experiment 20001911 PARAMETER Experiment Name: At_Drought_Reproduction_P Parameter: Tissue Value: Flowers
  misc_feature: MA Experiment 20001911 PARAMETER Experiment Name: At_Drought_Reproduction_P Parameter: Treatment Value: Drought vs. No Drought

SEQ ID NO: 31600 - protein, 334 aa, Arabidopsis thaliana; identical to SEQ ID NO: 28010
  peptide (1)..(334): Ceres Seq. ID no. 13490306
  misc_feature (111)..(329): Homolog of NCBI NO: 37523971 NR Description: Mg-protoporphyrin IX methyl transferase
  misc_feature (111)..(332): Homolog of NCBI NO: 23040051 NR Description: hypothetical protein [Trichodesmium erythraeum
  misc_feature (111)..(331): Homolog of NCBI NO: 17230693 NR Description: Mg-protoporphyrin IX methyl transferase [Nostoc
  misc_feature (95)..(333): Homolog of NCBI NO: 22297994 NR Description: Mg-protoporphyrin IX methyl transferase
  misc_feature (111)..(331): Homolog of NCBI NO: 23130334 NR Description: hypothetical protein [Nostoc punctiforme]
  misc_feature (111)..(332): Homolog of NCBI NO: 7470730 NR Description: magnesium-protoporphyrin IX methyltransferase (EC
  misc_feature (111)..(332): Homolog of NCBI NO: 16332013 NR Description: Mg-protoporphyrin IX methyl transferase
  misc_feature (30)..(334): Homolog of NCBI NO: 6006382 NR Description: Similar to magnesium-protoporphyrin IX
  misc_feature (15)..(333): Homolog of NCBI NO: 7839365 NR Description: S-adenosyl-L-methionine Mg-protoporphyrin IX
  misc_feature (23)..(334): Homolog of NCBI NO: 15234905 NR Description: magnesium-protoporphyrin O-methyltransferase

SEQ ID NO: 31601 - protein, 312 aa, Arabidopsis thaliana; identical to SEQ ID NO: 28011
  peptide (1)..(312): Ceres Seq. ID no. 13490307
  misc_feature (89)..(307): Homolog of NCBI NO: 37523971 NR Description: Mg-protoporphyrin IX methyl transferase
  misc_feature (89)..(310): Homolog of NCBI NO: 23040051 NR Description: hypothetical protein [Trichodesmium erythraeum
  misc_feature (89)..(309): Homolog of NCBI NO: 17230693 NR Description: Mg-protoporphyrin IX methyl transferase [Nostoc
  misc_feature (73)..(311): Homolog of NCBI NO: 22297994 NR Description: Mg-protoporphyrin IX methyl transferase
  misc_feature (89)..(309): Homolog of NCBI NO: 23130334 NR Description: hypothetical protein [Nostoc punctiforme]
  misc_feature (89)..(310): Homolog of NCBI NO: 7470730 NR Description: magnesium-protoporphyrin IX methyltransferase (EC
  misc_feature (89)..(310): Homolog of NCBI NO: 16332013 NR Description: Mg-protoporphyrin IX methyl transferase
  misc_feature (8)..(312): Homolog of NCBI NO: 6006382 NR Description: Similar to magnesium-protoporphyrin IX
  misc_feature (1)..(311): Homolog of NCBI NO: 7839365 NR Description: S-adenosyl-L-methionine Mg-protoporphyrin IX
  misc_feature (1)..(312): Homolog of NCBI NO: 15234905 NR Description: magnesium-protoporphyrin O-methyltransferase

SEQ ID NO: 31602 - protein, 245 aa, Arabidopsis thaliana; identical to SEQ ID NO: 28012
  peptide (1)..(245): Ceres Seq. ID no. 13490308
  misc_feature (22)..(240): Homolog of NCBI NO: 37523971 NR Description: Mg-protoporphyrin IX methyl transferase
  misc_feature (22)..(243): Homolog of NCBI NO: 23040051 NR Description: hypothetical protein [Trichodesmium erythraeum
  misc_feature (22)..(242): Homolog of NCBI NO: 17230693 NR Description: Mg-protoporphyrin IX methyl transferase [Nostoc
  misc_feature (6)..(244): Homolog of NCBI NO: 22297994 NR Description: Mg-protoporphyrin IX methyl transferase
  misc_feature (22)..(242): Homolog of NCBI NO: 23130334 NR Description: hypothetical protein [Nostoc punctiforme]
  misc_feature (22)..(243): Homolog of NCBI NO: 7470730 NR Description: magnesium-protoporphyrin IX methyltransferase (EC
  misc_feature (22)..(243): Homolog of NCBI NO: 16332013 NR Description: Mg-protoporphyrin IX methyl transferase
  misc_feature (1)..(245): Homolog of NCBI NO: 6006382 NR Description: Similar to magnesium-protoporphyrin IX
  misc_feature (1)..(244): Homolog of NCBI NO: 7839365 NR Description: S-adenosyl-L-methionine Mg-protoporphyrin IX
  misc_feature (1)..(245): Homolog of NCBI NO: 15234905 NR Description: magnesium-protoporphyrin O-methyltransferase

SEQ ID NO: 31603 - DNA, 1479 bp, Arabidopsis thaliana; identical to SEQ ID NO: 28013
  misc_feature (1)..(1479): Ceres Seq. ID no. 13499756
  misc_feature: MA Experiment ID: 108464 Result: Down-regulated in Transcription
  misc_feature: MA Experiment 108464 PARAMETER Experiment Name: At_Germinating_Seeds_cDNA_P Parameter: Age (day) Value: 4 vs. 0
  misc_feature: MA Experiment 108464 PARAMETER Experiment Name: At_Germinating_Seeds_cDNA_P Parameter: Tissue Value: Germinating Seeds

SEQ ID NO: 31604 - protein, 408 aa, Arabidopsis thaliana; identical to SEQ ID NO: 28014
  peptide (1)..(408): Ceres Seq. ID no. 13499757
  misc_feature (184)..(303): Pfam Name: BTB/POZ domain Pfam Description: BTB/POZ domain
  misc_feature (12)..(395): Homolog of NCBI NO: 30678912 NR Description: expressed protein [Arabidopsis thaliana]
  misc_feature (12)..(395): Homolog of NCBI NO: 21536509 NR Description: unknown [Arabidopsis thaliana]
  misc_feature (10)..(400): Homolog of NCBI NO: 15242126 NR Description: expressed protein [Arabidopsis thaliana]
  misc_feature (12)..(400): Homolog of NCBI NO: 34900034 NR Description: OJ1641_C04.24 [Oryza sativa (japonica
  misc_feature (1)..(399): Homolog of NCBI NO: 18397497 NR Description: expressed protein [Arabidopsis thaliana]
  misc_feature (13)..(373): Homolog of NCBI NO: 23617108 NR Description: contains ESTs
  misc_feature (14)..(399): Homolog of NCBI NO: 22531225 NR Description: putative protein [Arabidopsis thaliana]
  misc_feature (14)..(404): Homolog of NCBI NO: 34394164 NR Description: putative speckle-type POZ protein
  misc_feature (1)..(408): Homolog of NCBI NO: 21595740 NR Description: unknown [Arabidopsis thaliana]
  misc_feature (1)..(408): Homolog of NCBI NO: 18405153 NR Description: expressed protein [Arabidopsis thaliana]

SEQ ID NO: 31605 - protein, 369 aa, Arabidopsis thaliana; identical to SEQ ID NO: 28015
  peptide (1)..(369): Ceres Seq. ID no. 13499758
  misc_feature (145)..(264): Pfam Name: BTB/POZ domain Pfam Description: BTB/POZ domain
  misc_feature (1)..(356): Homolog of NCBI NO: 30678912 NR Description: expressed protein [Arabidopsis thaliana]
  misc_feature (1)..(356): Homolog of NCBI NO: 21536509 NR Description: unknown [Arabidopsis thaliana]
  misc_feature (1)..(361): Homolog of NCBI NO: 15242126 NR Description: expressed protein [Arabidopsis thaliana]
  misc_feature (1)..(361): Homolog of NCBI NO: 34900034 NR Description: OJ1641_C04.24 [Oryza sativa (japonica
  misc_feature (1)..(360): Homolog of NCBI NO: 18397497 NR Description: expressed protein [Arabidopsis thaliana]
  misc_feature (1)..(334): Homolog of NCBI NO: 23617108 NR Description: contains ESTs
  misc_feature (1)..(360): Homolog of NCBI NO: 22531225 NR Description: putative protein [Arabidopsis thaliana]
  misc_feature (1)..(365): Homolog of NCBI NO: 34394164 NR Description: putative speckle-type POZ protein
  misc_feature (1)..(369): Homolog of NCBI NO: 21595740 NR Description: unknown [Arabidopsis thaliana]
  misc_feature (1)..(369): Homolog of NCBI NO: 18405153 NR Description: expressed protein [Arabidopsis thaliana]

SEQ ID NO: 31606 - protein, 311 aa, Arabidopsis thaliana; identical to SEQ ID NO: 28016
  peptide (1)..(311): Ceres Seq. ID no. 13499759
  misc_feature (87)..(206): Pfam Name: BTB/POZ domain Pfam Description: BTB/POZ domain
  misc_feature (1)..(298): Homolog of NCBI NO: 30678912 NR Description: expressed protein [Arabidopsis thaliana]
  misc_feature (1)..(298): Homolog of NCBI NO: 21536509 NR Description: unknown [Arabidopsis thaliana]
  misc_feature (1)..(303): Homolog of NCBI NO: 15242126 NR Description: expressed protein [Arabidopsis thaliana]
  misc_feature (1)..(303): Homolog of NCBI NO: 34900034 NR Description: OJ1641_C04.24 [Oryza sativa (japonica
  misc_feature (1)..(302): Homolog of NCBI NO: 18397497 NR Description: expressed protein [Arabidopsis thaliana]
  misc_feature (1)..(276): Homolog of NCBI NO: 23617108 NR Description: contains ESTs
  misc_feature (1)..(302): Homolog of NCBI NO: 22531225 NR Description: putative protein [Arabidopsis thaliana]
  misc_feature (1)..(307): Homolog of NCBI NO: 34394164 NR Description: putative speckle-type POZ protein
  misc_feature (1)..(311): Homolog of NCBI NO: 21595740 NR Description: unknown [Arabidopsis thaliana]
  misc_feature (1)..(311): Homolog of NCBI NO: 18405153 NR Description: expressed protein [Arabidopsis thaliana]

SEQ ID NO: 31607 - DNA, 1174 bp, Arabidopsis thaliana; identical to SEQ ID NO: 28017
  misc_feature (1)..(1174): Ceres Seq. ID no. 13500049
  misc_feature: MA Experiment ID: 108434 Result: Down-regulated in Transcription
  misc_feature: MA Experiment 108434 PARAMETER Experiment Name: At_Root_Tips_cDNA_P Parameter: Tissue Value: Root Tips
  misc_feature: MA Experiment ID: 108488 Result: Down-regulated in Transcription
  misc_feature: MA Experiment ID: 108576 Result: Up-regulated in Transcription
  misc_feature: MA Experiment 108576 PARAMETER Experiment Name: At_42deg_Heat_cDNA_P Parameter: Temperature (deg C) Value: 42 vs. 22
  misc_feature: MA Experiment 108576 PARAMETER Experiment Name: At_42deg_Heat_cDNA_P Parameter: Timepoint (hr) Value: 1
  misc_feature: MA Experiment 108576 PARAMETER Experiment Name: At_42deg_Heat_cDNA_P Parameter: Tissue Value: Aerial
  misc_feature: MA Experiment ID: 108605 Result: Up-regulated in Transcription
  misc_feature: MA Experiment 108605 PARAMETER Experiment Name: At_100uM_ABA_cDNA_P Parameter: Timepoint (hr) Value: 6
  misc_feature: MA Experiment 108605 PARAMETER Experiment Name: At_100uM_ABA_cDNA_P Parameter: Tissue Value: Aerial
  misc_feature: MA Experiment 108605 PARAMETER Experiment Name: At_100uM_ABA_cDNA_P Parameter: Treatment Value: 100uM ABA vs. No Treatment
  misc_feature: MA Experiment ID: 108607 Result: Up-regulated in Transcription
  misc_feature: MA Experiment 108607 PARAMETER Experiment Name: At_100uM_ABA_cDNA_P Parameter: Timepoint (hr) Value: 4
  misc_feature: MA Experiment 108607 PARAMETER Experiment Name: At_100uM_ABA_cDNA_P Parameter: Tissue Value: Aerial
  misc_feature: MA Experiment 108607 PARAMETER Experiment Name: At_100uM_ABA_cDNA_P Parameter: Treatment Value: 100uM ABA vs. No Treatment
  misc_feature: MA Experiment ID: 20000111 Result: Up-regulated in Transcription
  misc_feature: MA Experiment 20000111 PARAMETER Experiment Name: At_42deg_Heat_cDNA_P Parameter: Temperature (deg C) Value: 42 vs. 22
  misc_feature: MA Experiment 20000111 PARAMETER Experiment Name: At_42deg_Heat_cDNA_P Parameter: Timepoint (hr) Value: 6
  misc_feature: MA Experiment 20000111 PARAMETER Experiment Name: At_42deg_Heat_cDNA_P Parameter: Tissue Value: Aerial
  misc_feature: MA Experiment ID: 20000112 Result: Up-regulated in Transcription
  misc_feature: MA Experiment 20000112 PARAMETER Experiment Name: At_42deg_Heat_cDNA_P Parameter: Temperature (deg C) Value: 42 vs. 22
  misc_feature: MA Experiment 20000112 PARAMETER Experiment Name: At_42deg_Heat_cDNA_P Parameter: Timepoint (hr) Value: 2
  misc_feature: MA Experiment 20000112 PARAMETER Experiment Name: At_42deg_Heat_cDNA_P Parameter: Tissue Value: Aerial
  misc_feature: MA Experiment ID: 20000113 Result: Up-regulated in Transcription
  misc_feature: MA Experiment 20000113 PARAMETER Experiment Name: At_42deg_Heat_cDNA_P Parameter: Temperature (deg C) Value: 42 vs. 22
  misc_feature: MA Experiment 20000113 PARAMETER Experiment Name: At_42deg_Heat_cDNA_P Parameter: Timepoint (hr) Value: 8
  misc_feature: MA Experiment 20000113 PARAMETER Experiment Name: At_42deg_Heat_cDNA_P Parameter: Tissue Value: Aerial
  misc_feature: MA Experiment ID: 20000173 Result: Up-regulated in Transcription
  misc_feature: MA Experiment 20000173 PARAMETER Experiment Name: At_42deg_Heat_P Parameter: Age (day) Value: 14
  misc_feature: MA Experiment 20000173 PARAMETER Experiment Name: At_42deg_Heat_P Parameter: Organism Value: A. thaliana
  misc_feature: MA Experiment 20000173 PARAMETER Experiment Name: At_42deg_Heat_P Parameter: Plant Line Value: WS
  misc_feature: MA Experiment 20000173 PARAMETER Experiment Name: At_42deg_Heat_P Parameter: Temperature (deg C) Value: 42 vs. 22
  misc_feature: MA Experiment 20000173 PARAMETER Experiment Name: At_42deg_Heat_P Parameter: Timepoint (hr) Value: 6
  misc_feature: MA Experiment 20000173 PARAMETER Experiment Name: At_42deg_Heat_P Parameter: Tissue Value: Aerial
  misc_feature: MA Experiment ID: 20000224 Result: Up-regulated in Transcription
  misc_feature: MA Experiment ID: 20000437 Result: Up-regulated in Transcription
  misc_feature: MA Experiment 20000437 PARAMETER Experiment Name: At_Drought_P Parameter: Age (day) Value: 8
  misc_feature: MA Experiment 20000437 PARAMETER Experiment Name: At_Drought_P Parameter: Organism Value: A. thaliana
  misc_feature: MA Experiment 20000437 PARAMETER Experiment Name: At_Drought_P Parameter: Plant Line Value: WS
  misc_feature: MA Experiment 20000437 PARAMETER Experiment Name: At_Drought_P Parameter: Timepoint (hr) Value: 24
  misc_feature: MA Experiment 20000437 PARAMETER Experiment Name: At_Drought_P Parameter: Tissue Value: Whole Plant
  misc_feature: MA Experiment 20000437 PARAMETER Experiment Name: At_Drought_P Parameter: Treatment Value: Drought vs. No Drought
  misc_feature: MA Experiment ID: 20000495 Result: Down-regulated in Transcription
  misc_feature: MA Experiment 20000495 PARAMETER Experiment Name: At_Guard_Cells_P Parameter: Harvest Date Value: 8/2/2002
  misc_feature: MA Experiment 20000495 PARAMETER Experiment Name: At_Guard_Cells_P Parameter: Organism Value: A. thaliana
  misc_feature: MA Experiment 20000495 PARAMETER Experiment Name: At_Guard_Cells_P Parameter: Tissue Value: Guard Cells vs. Leaves
  misc_feature: MA Experiment ID: 20001905 Result: Up-regulated in Transcription
  misc_feature: MA Experiment 20001905 PARAMETER Experiment Name: At_Drought_Reproduction_P Parameter: Age (day) Value: 40
  misc_feature: MA Experiment 20001905 PARAMETER Experiment Name: At_Drought_Reproduction_P Parameter: Organism Value: A. thaliana
  misc_feature: MA Experiment 20001905 PARAMETER Experiment Name: At_Drought_Reproduction_P Parameter: Plant Line Value: WS
  misc_feature: MA Experiment 20001905 PARAMETER Experiment Name: At_Drought_Reproduction_P Parameter: Timepoint (day) Value: 10
  misc_feature: MA Experiment 20001905 PARAMETER Experiment Name: At_Drought_Reproduction_P Parameter: Tissue Value: Rosettes
  misc_feature: MA Experiment 20001905 PARAMETER Experiment Name: At_Drought_Reproduction_P Parameter: Treatment Value: Drought vs. No Drought

SEQ ID NO: 31608 - protein, 279 aa, Arabidopsis thaliana; identical to SEQ ID NO: 28018
  peptide (1)..(279): Ceres Seq. ID no. 13500050
  misc_feature (191)..(253): Pfam Name: SNARE domain Pfam Description: SNARE domain
  misc_feature (1)..(279): Homolog of NCBI NO: 21595750 NR Description: syntaxin homologue [Arabidopsis thaliana]
  misc_feature (1)..(279): Homolog of NCBI NO: 15237418 NR Description: syntaxin of plants SYP21 (PEP12) [Arabidopsis

SEQ ID NO: 31609 - DNA, 914 bp, Arabidopsis thaliana; identical to SEQ ID NO: 28019
  misc_feature (1)..(914): Ceres Seq. ID no. 12393250
  misc_feature: MA Experiment ID: 108434 Result: Up-regulated in Transcription
  misc_feature: MA Experiment 108434 PARAMETER Experiment Name: At_Root_Tips_cDNA_P Parameter: Tissue Value: Root Tips
  misc_feature: MA Experiment ID: 108435 Result: Up-regulated in Transcription
  misc_feature: MA Experiment 108435 PARAMETER Experiment Name: At_stm_Mutants_cDNA_P Parameter: Plant Line Value: wt Landsburg vs stm
  misc_feature: MA Experiment 108435 PARAMETER Experiment Name: At_stm_Mutants_cDNA_P Parameter: Tissue Value: Shoot Apical Meristem Region
  misc_feature: MA Experiment ID: 108464 Result: Down-regulated in Transcription
  misc_feature: MA Experiment 108464 PARAMETER Experiment Name: At_Germinating_Seeds_cDNA_P Parameter: Age (day) Value: 4 vs. 0
  misc_feature: MA Experiment 108464 PARAMETER Experiment Name: At_Germinating_Seeds_cDNA_P Parameter: Tissue Value: Germinating Seeds
  misc_feature: MA Experiment ID: 108576 Result: Down-regulated in Transcription
  misc_feature: MA Experiment 108576 PARAMETER Experiment Name: At_42deg_Heat_cDNA_P Parameter: Temperature (deg C) Value: 42 vs. 22
  misc_feature: MA Experiment 108576 PARAMETER Experiment Name: At_42deg_Heat_cDNA_P Parameter: Timepoint (hr) Value: 1
  misc_feature: MA Experiment 108576 PARAMETER Experiment Name: At_42deg_Heat_cDNA_P Parameter: Tissue Value: Aerial
  misc_feature: MA Experiment ID: 108577 Result: Down-regulated in Transcription
  misc_feature: MA Experiment 108577 PARAMETER Experiment Name: At_42deg_Heat_cDNA_P Parameter: Temperature (deg C) Value: 42 vs. 22
  misc_feature: MA Experiment 108577 PARAMETER Experiment Name: At_42deg_Heat_cDNA_P Parameter: Timepoint (hr) Value: 6
  misc_feature: MA Experiment 108577 PARAMETER Experiment Name: At_42deg_Heat_cDNA_P Parameter: Tissue Value: Aerial
  misc_feature: MA Experiment ID: 108594 Result: Down-regulated in Transcription
  misc_feature: MA Experiment 108594 PARAMETER Experiment Name: At_Ler-rhl_Root_cDNA_P Parameter: Plant Line Value: null
  misc_feature: MA Experiment ID: 108668 Result: Down-regulated in Transcription
  misc_feature: MA Experiment 108668 PARAMETER Experiment Name: At_2mM_SA_cDNA_P Parameter: Plant Line Value: WS
  misc_feature: MA Experiment 108668 PARAMETER Experiment Name: At_2mM_SA_cDNA_P Parameter: Timepoint (hr) Value: 6
  misc_feature: MA Experiment 108668 PARAMETER Experiment Name: At_2mM_SA_cDNA_P Parameter: Treatment Value: 2mM SA vs. No Treatment
  misc_feature: MA Experiment ID: 20000069 Result: Down-regulated in Transcription
  misc_feature: MA Experiment 20000069 PARAMETER Experiment Name: At_100uM_ABA_Mutants_cDNA_P Parameter: Plant Line Value: CS23
  misc_feature: MA Experiment 20000069 PARAMETER Experiment Name: At_100uM_ABA_Mutants_cDNA_P Parameter: Timepoint (hr) Value: 6
  misc_feature: MA Experiment 20000069 PARAMETER Experiment Name: At_100uM_ABA_Mutants_cDNA_P Parameter: Tissue Value: Aerial
  misc_feature: MA Experiment 20000069 PARAMETER Experiment Name: At_100uM_ABA_Mutants_cDNA_P Parameter: Treatment Value: 100uM ABA vs. No Treatment
  misc_feature: MA Experiment ID: 20000093 Result: Down-regulated in Transcription
  misc_feature: MA Experiment 20000093 PARAMETER Experiment Name: At_42deg_Heat_cDNA_P Parameter: Temperature (deg C) Value: 42 vs. 22
  misc_feature: MA Experiment 20000093 PARAMETER Experiment Name: At_42deg_Heat_cDNA_P Parameter: Timepoint (hr) Value: 0.5
  misc_feature: MA Experiment 20000093 PARAMETER Experiment Name: At_42deg_Heat_cDNA_P Parameter: Tissue Value: Aerial
  misc_feature: MA Experiment ID: 20000111 Result: Down-regulated in Transcription
  misc_feature: MA Experiment 20000111 PARAMETER Experiment Name: At_42deg_Heat_cDNA_P Parameter: Temperature (deg C) Value: 42 vs. 22
  misc_feature: MA Experiment 20000111 PARAMETER Experiment Name: At_42deg_Heat_cDNA_P Parameter: Timepoint (hr) Value: 6
  misc_feature: MA Experiment 20000111 PARAMETER Experiment Name: At_42deg_Heat_cDNA_P Parameter: Tissue Value: Aerial
  misc_feature: MA Experiment ID: 20000113 Result: Down-regulated in Transcription
  misc_feature: MA Experiment 20000113 PARAMETER Experiment Name: At_42deg_Heat_cDNA_P Parameter: Temperature (deg C) Value: 42 vs. 22
  misc_feature: MA Experiment 20000113 PARAMETER Experiment Name: At_42deg_Heat_cDNA_P Parameter: Timepoint (hr) Value: 8
  misc_feature: MA Experiment 20000113 PARAMETER Experiment Name: At_42deg_Heat_cDNA_P Parameter: Tissue Value: Aerial
  misc_feature: MA Experiment ID: 20000144 Result: Down-regulated in Transcription
  misc_feature: MA Experiment 20000144 PARAMETER Experiment Name: At_42deg_Heat_cDNA_P Parameter: Temperature (deg C) Value: 42 vs. 22
  misc_feature: MA Experiment 20000144 PARAMETER Experiment Name: At_42deg_Heat_cDNA_P Parameter: Timepoint (hr) Value: 1
  misc_feature: MA Experiment 20000144 PARAMETER Experiment Name: At_42deg_Heat_cDNA_P Parameter: Tissue Value: Aerial
  misc_feature: MA Experiment ID: 20000173 Result: Down-regulated in Transcription
  misc_feature: MA Experiment 20000173 PARAMETER Experiment Name: At_42deg_Heat_P Parameter: Age (day) Value: 14
  misc_feature: MA Experiment 20000173 PARAMETER Experiment Name: At_42deg_Heat_P Parameter: Organism Value: A. thaliana
  misc_feature: MA Experiment 20000173 PARAMETER Experiment Name: At_42deg_Heat_P Parameter: Plant Line Value: WS
  misc_feature: MA Experiment 20000173 PARAMETER Experiment Name: At_42deg_Heat_P Parameter: Temperature (deg C) Value: 42 vs. 22
  misc_feature: MA Experiment 20000173 PARAMETER Experiment Name: At_42deg_Heat_P Parameter: Timepoint (hr) Value: 6
  misc_feature: MA Experiment 20000173 PARAMETER Experiment Name: At_42deg_Heat_P Parameter: Tissue Value: Aerial
  misc_feature: MA Experiment ID: 20000182 Result: Down-regulated in Transcription
  misc_feature: MA Experiment 20000182 PARAMETER Experiment Name: At_2mM_SA_P Parameter: Age (day) Value: 14
  misc_feature: MA Experiment 20000182 PARAMETER Experiment Name: At_2mM_SA_P Parameter: Organism Value: A. thaliana
  misc_feature: MA Experiment 20000182 PARAMETER Experiment Name: At_2mM_SA_P Parameter: Plant Line Value: WS
  misc_feature: MA Experiment 20000182 PARAMETER Experiment Name: At_2mM_SA_P Parameter: Timepoint (hr) Value: 6
  misc_feature: MA Experiment 20000182 PARAMETER Experiment Name: At_2mM_SA_P Parameter: Tissue Value: Aerial
  misc_feature: MA Experiment 20000182 PARAMETER Experiment Name: At_2mM_SA_P Parameter: Treatment Value: 2mM SA vs. No Treatment
  misc_feature: MA Experiment ID: 20000234 Result: Up-regulated in Transcription
  misc_feature: MA Experiment 20000234 PARAMETER Experiment Name: At_Siliques_P Parameter: Age (day) Value: 21
  misc_feature: MA Experiment 20000234 PARAMETER Experiment Name: At_Siliques_P Parameter: Organism Value: A. thaliana
  misc_feature: MA Experiment 20000234 PARAMETER Experiment Name: At_Siliques_P Parameter: Plant Line Value: WS
  misc_feature: MA Experiment 20000234 PARAMETER Experiment Name: At_Siliques_P Parameter: Tissue Value: Less Than 5mm Siliques vs. Whole Plant
  misc_feature: MA Experiment ID: 20000265 Result: Up-regulated in Transcription
  misc_feature: MA Experiment 20000265 PARAMETER Experiment Name: At_Open_Flower_P Parameter: Age (day) Value: 21
  misc_feature: MA Experiment 20000265 PARAMETER Experiment Name: At_Open_Flower_P Parameter: Plant Line Value: WS
  misc_feature: MA Experiment 20000265 PARAMETER Experiment Name: At_Open_Flower_P Parameter: Tissue Value: Closed Flower vs. Whole Plant
  misc_feature: MA Experiment ID: 20000495 Result: Up-regulated in Transcription
  misc_feature: MA Experiment 20000495 PARAMETER Experiment Name: At_Guard_Cells_P Parameter: Harvest Date Value: 8/2/2002
  misc_feature: MA Experiment 20000495 PARAMETER Experiment Name: At_Guard_Cells_P Parameter: Organism Value: A. thaliana
  misc_feature: MA Experiment 20000495 PARAMETER Experiment Name: At_Guard_Cells_P Parameter: Tissue Value: Guard Cells vs. Leaves
  misc_feature: MA Experiment ID: 20000496 Result: Up-regulated in Transcription
  misc_feature: MA Experiment 20000496 PARAMETER Experiment Name: At_Guard_Cells_P Parameter: Harvest Date Value: 7/19/2002
  misc_feature: MA Experiment 20000496 PARAMETER Experiment Name: At_Guard_Cells_P Parameter: Organism Value: Canola
  misc_feature: MA Experiment 20000496 PARAMETER Experiment Name: At_Guard_Cells_P Parameter: Tissue Value: Guard Cells vs. Leaves
  misc_feature: MA Experiment ID: 20000794 Result: Down-regulated in Transcription
  misc_feature: MA Experiment 20000794 PARAMETER Experiment Name: At_Petals_P Parameter: Age (day) Value: 23-25 days
  misc_feature: MA Experiment 20000794 PARAMETER Experiment Name: At_Petals_P Parameter: Plant Line Value: WS
  misc_feature: MA Experiment 20000794 PARAMETER Experiment Name: At_Petals_P Parameter: Tissue Value: Petals vs. Whole plant
  misc_feature: MA Experiment ID: 20001248 Result: Down-regulated in Transcription
  misc_feature: MA Experiment 20001248 PARAMETER Experiment Name: At_Far-red-induction_P Parameter: Age (day) Value: 7
  misc_feature: MA Experiment 20001248 PARAMETER Experiment Name: At_Far-red-induction_P Parameter: Light Value: Far-red vs. White
  misc_feature: MA Experiment 20001248 PARAMETER Experiment Name: At_Far-red-induction_P Parameter: Organism Value: A. thaliana
  misc_feature: MA Experiment 20001248 PARAMETER Experiment Name: At_Far-red-induction_P Parameter: Plant Line Value: Columbia
  misc_feature: MA Experiment 20001248 PARAMETER Experiment Name: At_Far-red-induction_P Parameter: Timepoint (hr) Value: 4
  misc_feature: MA Experiment 20001248 PARAMETER Experiment Name: At_Far-red-induction_P Parameter: Tissue Value: Whole Plant
  misc_feature: MA Experiment ID: 20001450 Result: Down-regulated in Transcription
  misc_feature: MA Experiment 20001450 PARAMETER Experiment Name: At_Far-red-induction_P Parameter: Age (day) Value: 7
  misc_feature: MA Experiment 20001450 PARAMETER Experiment Name: At_Far-red-induction_P Parameter: Light Value: Far-red vs. White
  misc_feature: MA Experiment 20001450 PARAMETER Experiment Name: At_Far-red-induction_P Parameter: Organism Value: A. thaliana
  misc_feature: MA Experiment 20001450 PARAMETER Experiment Name: At_Far-red-induction_P Parameter: Plant Line Value: Columbia
  misc_feature: MA Experiment 20001450 PARAMETER Experiment Name: At_Far-red-induction_P Parameter: Timepoint (hr) Value: 8
  misc_feature: MA Experiment 20001450 PARAMETER Experiment Name: At_Far-red-induction_P Parameter: Tissue Value: Whole Plant
  misc_feature: MA Experiment ID: 20001451 Result: Down-regulated in Transcription
  misc_feature: MA Experiment 20001451 PARAMETER Experiment Name: At_Far-red-induction_P Parameter: Age (day) Value: 7
  misc_feature: MA Experiment 20001451 PARAMETER Experiment Name: At_Far-red-induction_P Parameter: Light Value: Far-red vs. White
  misc_feature: MA Experiment 20001451 PARAMETER Experiment Name: At_Far-red-induction_P Parameter: Organism Value: A. thaliana
  misc_feature: MA Experiment 20001451 PARAMETER Experiment Name: At_Far-red-induction_P Parameter: Plant Line Value: Columbia
  misc_feature: MA Experiment 20001451 PARAMETER Experiment Name: At_Far-red-induction_P Parameter: Timepoint (hr) Value: 24
  misc_feature: MA Experiment 20001451 PARAMETER Experiment Name: At_Far-red-induction_P Parameter: Tissue Value: Whole Plant
  misc_feature: MA Experiment ID: 20001555 Result: Down-regulated in Transcription
  misc_feature: MA Experiment 20001555 PARAMETER Experiment Name: At_Drought_Soil_Dry_P Parameter: Age (day) Value: 24
  misc_feature: MA Experiment 20001555 PARAMETER Experiment Name: At_Drought_Soil_Dry_P Parameter: Organism Value: A. thaliana
  misc_feature: MA Experiment 20001555 PARAMETER Experiment Name: At_Drought_Soil_Dry_P Parameter: Plant Line Value: WS
  misc_feature: MA Experiment 20001555 PARAMETER Experiment Name: At_Drought_Soil_Dry_P Parameter: Post Timepoint (hr) Value: None
  misc_feature: MA Experiment 20001555 PARAMETER Experiment Name: At_Drought_Soil_Dry_P Parameter: Post-Treatment Value: None
  misc_feature: MA Experiment 20001555 PARAMETER Experiment Name: At_Drought_Soil_Dry_P Parameter: Timepoint (day) Value: 10
  misc_feature: MA Experiment 20001555 PARAMETER Experiment Name: At_Drought_Soil_Dry_P Parameter: Treatment Value: Drought vs. No Drought
  misc_feature: MA Experiment ID: 20001556 Result: Down-regulated in Transcription
  misc_feature: MA Experiment 20001556 PARAMETER Experiment Name: At_Drought_Soil_Dry_P Parameter: Age (day) Value: 26
  misc_feature: MA Experiment 20001556 PARAMETER Experiment Name: At_Drought_Soil_Dry_P Parameter: Organism Value: A. thaliana
  misc_feature: MA Experiment 20001556 PARAMETER Experiment Name: At_Drought_Soil_Dry_P Parameter: Plant Line Value: WS
  misc_feature: MA Experiment 20001556 PARAMETER Experiment Name: At_Drought_Soil_Dry_P Parameter: Post Timepoint (hr) Value: None
  misc_feature: MA Experiment 20001556 PARAMETER Experiment Name: At_Drought_Soil_Dry_P Parameter: Post-Treatment Value: None
  misc_feature: MA Experiment 20001556 PARAMETER Experiment Name: At_Drought_Soil_Dry_P Parameter: Timepoint (day) Value: 12
  misc_feature: MA Experiment 20001556 PARAMETER Experiment Name: At_Drought_Soil_Dry_P Parameter: Treatment Value: Drought vs. No Drought
  misc_feature: MA Experiment ID: 20001560 Result: Up-regulated in Transcription
  misc_feature: MA Experiment 20001560 PARAMETER Experiment Name: At_Drought_Soil_Dry_P Parameter: Age (day) Value: 28
  misc_feature: MA Experiment 20001560 PARAMETER Experiment Name: At_Drought_Soil_Dry_P Parameter: Organism Value: A. thaliana
  misc_feature: MA Experiment 20001560 PARAMETER Experiment Name: At_Drought_Soil_Dry_P Parameter: Plant Line Value: WS
  misc_feature: MA Experiment 20001560 PARAMETER Experiment Name: At_Drought_Soil_Dry_P Parameter: Post Timepoint (hr) Value: None
  misc_feature: MA Experiment 20001560 PARAMETER Experiment Name: At_Drought_Soil_Dry_P Parameter: Post-Treatment Value: None
  misc_feature: MA Experiment 20001560 PARAMETER Experiment Name: At_Drought_Soil_Dry_P Parameter: Timepoint (day) Value: 14
  misc_feature: MA Experiment 20001560 PARAMETER Experiment Name: At_Drought_Soil_Dry_P Parameter: Treatment Value: Drought vs. No Drought
  misc_feature: MA Experiment ID: 20001911 Result: Down-regulated in Transcription
  misc_feature: MA Experiment 20001911 PARAMETER Experiment Name: At_Drought_Reproduction_P Parameter: Age (day) Value: 40
  misc_feature: MA Experiment 20001911 PARAMETER Experiment Name: At_Drought_Reproduction_P Parameter: Organism Value: A. thaliana
  misc_feature: MA Experiment 20001911 PARAMETER Experiment Name: At_Drought_Reproduction_P Parameter: Plant Line Value: WS
  misc_feature: MA Experiment 20001911 PARAMETER Experiment Name: At_Drought_Reproduction_P Parameter: Timepoint (day) Value: 10
  misc_feature: MA Experiment 20001911 PARAMETER Experiment Name: At_Drought_Reproduction_P Parameter: Tissue Value: Flowers
  misc_feature: MA Experiment 20001911 PARAMETER Experiment Name: At_Drought_Reproduction_P Parameter: Treatment Value: Drought vs. No Drought
  misc_feature: Phenotype: ROSETTE LEAVES Shape-Oval
  misc_feature: Phenotype: WHOLE PLANT Color-Dark Green
  misc_feature: Phenotype: WHOLE PLANT Size-Small
  misc_feature: Phenotype: WHOLE PLANT Size-Small
  misc_feature: Phenotype: INFLORESCENCE Flowering Time-Late Flowering
  misc_feature: Phenotype: FERTILITY Fertility-Reduced
  misc_feature: Phenotype: ROSETTE LEAVES Shape-Serrate
  misc_feature: Phenotype: ROSETTE LEAVES Other
  misc_feature: Phenotype: WHOLE PLANT Size-Large
  misc_feature: Phenotype: INFLORESCENCE Height-Short
  misc_feature: Phenotype: INFLORESCENCE Strength-Strong
  misc_feature: Phenotype: FERTILITY Fertility-Reduced
  misc_feature: Phenotype: ROSETTE LEAVES Shape-Serrate
  misc_feature: Phenotype: WHOLE PLANT Color-Dark Green
  misc_feature: Phenotype: WHOLE PLANT Size-Small
  misc_feature: Phenotype: INFLORESCENCE Flowering Time-Late Flowering
  misc_feature: Phenotype: INFLORESCENCE Height-Short
  misc_feature: Phenotype: INFLORESCENCE Strength-Strong
  misc_feature: Phenotype: INFLORESCENCE Other
  misc_feature: Phenotype: FERTILITY Fertility-Reduced
  misc_feature: Phenotype: WHOLE PLANT Color-Dark Green
  misc_feature: Phenotype: WHOLE PLANT Size-Small
  misc_feature: Phenotype: WHOLE PLANT Color-Dark Green
  misc_feature: Phenotype: WHOLE PLANT Size-Small
  misc_feature: Phenotype: INFLORESCENCE Other
  misc_feature: Phenotype: ROSETTE LEAVES Shape-Oval
  misc_feature: Phenotype: WHOLE PLANT Color-Dark Green
  misc_feature: Phenotype: WHOLE PLANT Size-Small
  misc_feature: Phenotype: WHOLE PLANT Size-Small
  misc_feature: Phenotype: FERTILITY Fertility-Reduced

SEQ ID NO: 31610 - protein, 164 aa, Arabidopsis thaliana; identical to SEQ ID NO: 28020
  peptide (1)..(164): Ceres Seq. ID no. 12393251
  misc_feature (61)..(92): Pfam Name: Zn-finger in Ran binding protein and others Pfam Description: Zn-finger in Ran binding protein and others
  misc_feature (41)..(158): Homolog of NCBI NO: 15225776 NR Description: putative second messenger-dependent protein kinase
  misc_feature (1)..(65): Homolog of NCBI NO: 27368046 NR Description: zinc finger protein [Gossypium hirsutum]
  misc_feature (3)..(104): Homolog of NCBI NO: 5679336 NR Description: putative zinc finger protein [Oryza sativa]
  misc_feature (3)..(104): Homolog of NCBI NO: 5803246 NR Description: ESTs AU077984(C62969),D41648(S4289), correspond to a region of the predicted gene.~Similar to putative
  misc_feature (53)..(160): Homolog of NCBI NO: 5679336 NR Description: putative zinc finger protein [Oryza sativa]
  misc_feature (53)..(160): Homolog of NCBI NO: 5803246 NR Description: ESTs AU077984(C62969),D41648(S4289), correspond to a region of the predicted gene.~Similar to putative
  misc_feature (1)..(164): Homolog of NCBI NO: 15239445 NR Description: putative protein; protein id: At5g25490.1
  misc_feature (3)..(157): Homolog of NCBI NO: 28849863 NR Description: zinc finger transcription factor ZFP30
  misc_feature (1)..(164): Homolog of NCBI NO: 15232662 NR Description: putative zinc finger protein
  misc_feature (1)..(164): Homolog of NCBI NO: 21595771 NR Description: putative zinc finger protein [Arabidopsis

SEQ ID NO: 31611 - protein, 116 aa, Arabidopsis thaliana; identical to SEQ ID NO: 28021
  peptide (1)..(116): Ceres Seq. ID no. 12393252
  misc_feature (13)..(44): Pfam Name: Zn-finger in Ran binding protein and others Pfam Description: Zn-finger in Ran binding protein and others
  misc_feature (1)..(110): Homolog of NCBI NO: 15225776 NR Description: putative second messenger-dependent protein kinase
  misc_feature (1)..(17): Homolog of NCBI NO: 27368046 NR Description: zinc finger protein [Gossypium hirsutum]
  misc_feature (1)..(56): Homolog of NCBI NO: 5679336 NR Description: putative zinc finger protein [Oryza sativa]
  misc_feature (1)..(56): Homolog of NCBI NO: 5803246 NR Description: ESTs AU077984(C62969),D41648(S4289), correspond to a region of the predicted gene.~Similar to putative
  misc_feature (5)..(112): Homolog of NCBI NO: 5679336 NR Description: putative zinc finger protein [Oryza sativa]
  misc_feature (5)..(112): Homolog of NCBI NO: 5803246 NR Description: ESTs AU077984(C62969),D41648(S4289), correspond to a region of the predicted gene.~Similar to putative
  misc_feature (1)..(116): Homolog of NCBI NO: 15239445 NR Description: putative protein; protein id: At5g25490.1
  misc_feature (1)..(109): Homolog of NCBI NO: 28849863 NR Description: zinc finger transcription factor ZFP30
  misc_feature (1)..(116): Homolog of NCBI NO: 15232662 NR Description: putative zinc finger protein
  misc_feature (1)..(116): Homolog of NCBI NO: 21595771 NR Description: putative zinc finger protein [Arabidopsis

SEQ ID NO: 31612 - DNA, 662 bp, Arabidopsis thaliana; identical to SEQ ID NO: 28022
  misc_feature (1)..(662): Ceres Seq. ID no. 12333587
  misc_feature: MA Experiment ID: 108461 Result: Down-regulated in Transcription
  misc_feature: MA Experiment 108461 PARAMETER Experiment Name: At_Germinating_Seeds_cDNA_P Parameter: Age (day) Value: 1 vs. 0
  misc_feature: MA Experiment 108461 PARAMETER Experiment Name: At_Germinating_Seeds_cDNA_P Parameter: Tissue Value: Germinating Seeds
  misc_feature: MA Experiment ID: 108462 Result: Down-regulated in Transcription
  misc_feature: MA Experiment 108462 PARAMETER Experiment Name: At_Germinating_Seeds_cDNA_P Parameter: Age (day) Value: 2 vs. 0
  misc_feature: MA Experiment 108462 PARAMETER Experiment Name: At_Germinating_Seeds_cDNA_P Parameter: Tissue Value: Germinating Seeds
  misc_feature: MA Experiment ID: 108463 Result: Down-regulated in Transcription
  misc_feature: MA Experiment 108463 PARAMETER Experiment Name: At_Germinating_Seeds_cDNA_P Parameter: Age (day) Value: 3 vs. 0
  misc_feature: MA Experiment 108463 PARAMETER Experiment Name: At_Germinating_Seeds_cDNA_P Parameter: Tissue Value: Germinating Seeds
  misc_feature: MA Experiment ID: 20000180 Result: Down-regulated in Transcription
  misc_feature: MA Experiment 20000180 PARAMETER Experiment Name: At_Germinating_Seeds_P Parameter: Age (hr) Value: 24 vs. 0
  misc_feature: MA Experiment 20000180 PARAMETER Experiment Name: At_Germinating_Seeds_P Parameter: Tissue Value: Germinating Seeds
  misc_feature: MA Experiment ID: 20000224 Result: Up-regulated in Transcription

SEQ ID NO: 31613 - protein, 144 aa, Arabidopsis thaliana; identical to SEQ ID NO: 28023
  peptide (1)..(144): Ceres Seq. ID no. 12333588
  misc_feature (63)..(116): Pfam Name: RNA polymerase Rpb6 Pfam Description: RNA polymerase Rpb6
  misc_feature (29)..(135): Homolog of NCBI NO: 13786166 NR Description: polymerase II [Rattus norvegicus]
  misc_feature (1)..(135): Homolog of NCBI NO: 6522686 NR Description: RNA polymerase common subunit RPB6 [Gallus gallus]
  misc_feature (1)..(135): Homolog of NCBI NO: 31214787 NR Description: ENSANGP00000017467 [Anopheles gambiae]
  misc_feature (3)..(137): Homolog of NCBI NO: 39597419 NR Description: Hypothetical protein CBG03063 [Caenorhabditis
  misc_feature (1)..(136): Homolog of NCBI NO: 17864588 NR Description: RNA polymerase II 18kD subunit CG1163-PA
  misc_feature (1)..(137): Homolog of NCBI NO: 17531543 NR Description: Dna-directed RNA polymerase Iib [Caenorhabditis
  misc_feature (1)..(143): Homolog of NCBI NO: 4960150 NR Description: DNA-directed RNA polymerase IIa [Nicotiana
  misc_feature (1)..(143): Homolog of NCBI NO: 22093730 NR Description: putative DNA-directed RNA polymerase Iib
  misc_feature (1)..(144): Homolog of NCBI NO: 15224039 NR Description: putative DNA-directed RNA polymerase II subunit
  misc_feature (1)..(144): Homolog of NCBI NO: 15242235 NR Description: DNA-directed RNA polymerase II subunit-like

SEQ ID NO: 31614 - protein, 112 aa, Arabidopsis thaliana; identical to SEQ ID NO: 28024
  peptide (1)..(112): Ceres Seq. ID no. 12333589
  misc_feature (31)..(84): Pfam Name: RNA polymerase Rpb6 Pfam Description: RNA polymerase Rpb6
  misc_feature (1)..(103): Homolog of NCBI NO: 13786166 NR Description: polymerase II [Rattus norvegicus]
  misc_feature (1)..(103): Homolog of NCBI NO: 6522686 NR Description: RNA polymerase common subunit RPB6 [Gallus gallus]
  misc_feature (1)..(103): Homolog of NCBI NO: 31214787 NR Description: ENSANGP00000017467 [Anopheles gambiae]
  misc_feature (1)..(105): Homolog of NCBI NO: 39597419 NR Description: Hypothetical protein CBG03063 [Caenorhabditis
  misc_feature (1)..(104): Homolog of NCBI NO: 17864588 NR Description: RNA polymerase II 18kD subunit CG1163-PA
  misc_feature (1)..(105): Homolog of NCBI NO: 17531543 NR Description: Dna-directed RNA polymerase Iib [Caenorhabditis
  misc_feature (1)..(111): Homolog of NCBI NO: 4960150 NR Description: DNA-directed RNA polymerase IIa [Nicotiana
  misc_feature (1)..(111): Homolog of NCBI NO: 22093730 NR Description: putative DNA-directed RNA polymerase Iib
  misc_feature (1)..(112): Homolog of NCBI NO: 15224039 NR Description: putative DNA-directed RNA polymerase II subunit
  misc_feature (1)..(112): Homolog of NCBI NO: 15242235 NR Description: DNA-directed RNA polymerase II subunit-like

SEQ ID NO: 31615 - protein, 80 aa, Arabidopsis thaliana; identical to SEQ ID NO: 28025
  peptide (1)..(80): Ceres Seq. ID no. 12333590
  misc_feature (1)..(52): Pfam Name: RNA polymerase Rpb6 Pfam Description: RNA polymerase Rpb6
  misc_feature (1)..(71): Homolog of NCBI NO: 13786166 NR Description: polymerase II [Rattus norvegicus]
  misc_feature (1)..(71): Homolog of NCBI NO: 6522686 NR Description: RNA polymerase common subunit RPB6 [Gallus gallus]
  misc_feature (1)..(71): Homolog of NCBI NO: 31214787 NR Description: ENSANGP00000017467 [Anopheles gambiae]
  misc_feature (1)..(73): Homolog of NCBI NO: 39597419 NR Description: Hypothetical protein CBG03063 [Caenorhabditis
  misc_feature (1)..(72): Homolog of NCBI NO: 17864588 NR Description: RNA polymerase II 18kD subunit CG1163-PA
  misc_feature (1)..(73): Homolog of NCBI NO: 17531543 NR Description: Dna-directed RNA polymerase Iib [Caenorhabditis
  misc_feature (1)..(79): Homolog of NCBI NO: 4960150 NR Description: DNA-directed RNA polymerase IIa [Nicotiana
  misc_feature (1)..(79): Homolog of NCBI NO: 22093730 NR Description: putative DNA-directed RNA polymerase Iib
  misc_feature (1)..(80): Homolog of NCBI NO: 15224039 NR Description: putative DNA-directed RNA polymerase II subunit
  misc_feature (1)..(80): Homolog of NCBI NO: 15242235 NR Description: DNA-directed RNA polymerase II subunit-like

SEQ ID NO: 31616 - DNA, 1153 bp, Arabidopsis thaliana; identical to SEQ ID NO: 28026
  misc_feature (1)..(1153): Ceres Seq. ID no. 12324234
  misc_feature: MA Experiment ID: 20000265 Result: Down-regulated in Transcription
  misc_feature: MA Experiment 20000265 PARAMETER Experiment Name: At_Open_Flower_P Parameter: Age (day) Value: 21
  misc_feature: MA Experiment 20000265 PARAMETER Experiment Name: At_Open_Flower_P Parameter: Plant Line Value: WS
  misc_feature: MA Experiment 20000265 PARAMETER Experiment Name: At_Open_Flower_P Parameter: Tissue Value: Closed Flower vs. Whole Plant
  misc_feature: MA Experiment ID: 20000286 Result: Down-regulated in Transcription
  misc_feature: MA Experiment 20000286 PARAMETER Experiment Name: At_Open_Flower_P Parameter: Age (day) Value: 21
  misc_feature: MA Experiment 20000286 PARAMETER Experiment Name: At_Open_Flower_P Parameter: Plant Line Value: WS
  misc_feature: MA Experiment 20000286 PARAMETER Experiment Name: At_Open_Flower_P Parameter: Tissue Value: Half Open vs. Whole Plant

SEQ ID NO: 31617 - protein, 228 aa, Arabidopsis thaliana; identical to SEQ ID NO: 28027
  peptide (1)..(228): Ceres Seq. ID no. 12324235
  misc_feature (21)..(137): Pfam Name: BAH domain Pfam Description: BAH domain
  misc_feature (1)..(187): Homolog of NCBI NO: 34904940 NR Description: OSJNBa0077M12.13 [Oryza sativa (japonica
  misc_feature (31)..(208): Homolog of NCBI NO: 15234729 NR Description: receptor like protein (fragment); protein id:
  misc_feature (26)..(208): Homolog of NCBI NO: 11292613 NR Description: receptor like protein - Arabidopsis thaliana
  misc_feature (5)..(222): Homolog of NCBI NO: 629783 NR Description: ES43 protein - barley
  misc_feature (1)..(212): Homolog of NCBI NO: 34897170 NR Description: putative DNA-binding protein
  misc_feature (1)..(212): Homolog of NCBI NO: 37573088 NR Description: receptor like protein [Oryza sativa (japonica
  misc_feature (1)..(212): Homolog of NCBI NO: 33146914 NR Description: putative ES43 protein [Oryza sativa (japonica
  misc_feature (1)..(208): Homolog of NCBI NO: 7484948 NR Description: ES43 protein homolog F19H22.200 - Arabidopsis
  misc_feature (1)..(228): Homolog of NCBI NO: 21595796 NR Description: ES43 like protein [Arabidopsis thaliana]
  misc_feature (1)..(228): Homolog of NCBI NO: 18420377 NR Description: ES43 like protein

SEQ ID NO: 31618 - protein, 198 aa, Arabidopsis thaliana; identical to SEQ ID NO: 28028
  peptide (1)..(198): Ceres Seq. ID no. 12324236
  misc_feature (1)..(107): Pfam Name: BAH domain Pfam Description: BAH domain
  misc_feature (1)..(157): Homolog of NCBI NO: 34904940 NR Description: OSJNBa0077M12.13 [Oryza sativa (japonica
  misc_feature (1)..(178): Homolog of NCBI NO: 15234729 NR Description: receptor like protein (fragment); protein id:
  misc_feature (1)..(178): Homolog of NCBI NO: 11292613 NR Description: receptor like protein - Arabidopsis thaliana
  misc_feature (1)..(192): Homolog of NCBI NO: 629783 NR Description: ES43 protein - barley
  misc_feature (1)..(182): Homolog of NCBI NO: 34897170 NR Description: putative DNA-binding protein
  misc_feature (1)..(182): Homolog of NCBI NO: 37573088 NR Description: receptor like protein [Oryza sativa (japonica
  misc_feature (1)..(182): Homolog of NCBI NO: 33146914 NR Description: putative ES43 protein [Oryza sativa (japonica
  misc_feature (1)..(178): Homolog of NCBI NO: 7484948 NR Description: ES43 protein homolog F19H22.200 - Arabidopsis
  misc_feature (1)..(198): Homolog of NCBI NO: 21595796 NR Description: ES43 like protein [Arabidopsis thaliana]
  misc_feature (1)..(198): Homolog of NCBI NO: 18420377 NR Description: ES43 like protein

SEQ ID NO: 31619 - DNA, 819 bp, Arabidopsis thaliana; identical to SEQ ID NO: 28029
  misc_feature (1)..(819): Ceres Seq. ID no. 13621966
  misc_feature: MA Experiment ID: 108577 Result: Up-regulated in Transcription
  misc_feature: MA Experiment 108577 PARAMETER Experiment Name: At_42deg_Heat_cDNA_P Parameter: Temperature (deg C) Value: 42 vs. 22
  misc_feature: MA Experiment 108577 PARAMETER Experiment Name: At_42deg_Heat_cDNA_P Parameter: Timepoint (hr) Value: 6
  misc_feature: MA Experiment 108577 PARAMETER Experiment Name: At_42deg_Heat_cDNA_P Parameter: Tissue Value: Aerial
  misc_feature: MA Experiment ID: 20000112 Result: Up-regulated in Transcription
  misc_feature: MA Experiment 20000112 PARAMETER Experiment Name: At_42deg_Heat_cDNA_P Parameter: Temperature (deg C) Value: 42 vs. 22
  misc_feature: MA Experiment 20000112 PARAMETER Experiment Name: At_42deg_Heat_cDNA_P Parameter: Timepoint (hr) Value: 2
  misc_feature: MA Experiment 20000112 PARAMETER Experiment Name: At_42deg_Heat_cDNA_P Parameter: Tissue Value: Aerial
  misc_feature: MA Experiment ID: 20000113 Result: Up-regulated in Transcription
  misc_feature: MA Experiment 20000113 PARAMETER Experiment Name: At_42deg_Heat_cDNA_P Parameter: Temperature (deg C) Value: 42 vs. 22
  misc_feature: MA Experiment 20000113 PARAMETER Experiment Name: At_42deg_Heat_cDNA_P Parameter: Timepoint (hr) Value: 8
  misc_feature: MA Experiment 20000113 PARAMETER Experiment Name: At_42deg_Heat_cDNA_P Parameter: Tissue Value: Aerial
  misc_feature: MA Experiment ID: 20000224 Result: Down-regulated in Transcription
  misc_feature: MA Experiment ID: 20001560 Result: Down-regulated in Transcription
  misc_feature: MA Experiment 20001560 PARAMETER Experiment Name: At_Drought_Soil_Dry_P Parameter: Age (day) Value: 28
  misc_feature: MA Experiment 20001560 PARAMETER Experiment Name: At_Drought_Soil_Dry_P Parameter: Organism Value: A. thaliana
  misc_feature: MA Experiment 20001560 PARAMETER Experiment Name: At_Drought_Soil_Dry_P Parameter: Plant Line Value: WS
  misc_feature: MA Experiment 20001560 PARAMETER Experiment Name: At_Drought_Soil_Dry_P Parameter: Post Timepoint (hr) Value: None
  misc_feature: MA Experiment 20001560 PARAMETER Experiment Name: At_Drought_Soil_Dry_P Parameter: Post-Treatment Value: None
  misc_feature: MA Experiment 20001560 PARAMETER Experiment Name: At_Drought_Soil_Dry_P Parameter: Timepoint (day) Value: 14
  misc_feature: MA Experiment 20001560 PARAMETER Experiment Name: At_Drought_Soil_Dry_P Parameter: Treatment Value: Drought vs. No Drought

SEQ ID NO: 31620 - protein, 168 aa, Arabidopsis thaliana; identical to SEQ ID NO: 28030
  peptide (1)..(168): Ceres Seq. ID no. 13621967
  misc_feature (1)..(165): Pfam Name: Translationally controlled tumour protein Pfam Description: Translationally controlled tumour protein
  misc_feature (1)..(168): Homolog of NCBI NO: 549063 NR Description: Translationally controlled tumor protein homolog
  misc_feature (1)..(168): Homolog of NCBI NO: 2507443 NR Description: Translationally controlled tumor protein homolog
  misc_feature (1)..(168): Homolog of NCBI NO: 9979196 NR Description: Translationally controlled tumor protein homolog
  misc_feature (1)..(168): Homolog of NCBI NO: 1174626 NR Description: TRANSLATIONALLY CONTROLLED TUMOR PROTEIN HOMOLOG
  misc_feature (1)..(168): Homolog of NCBI NO: 20140684 NR Description: Translationally controlled tumor protein homolog
  misc_feature (1)..(168): Homolog of NCBI NO: 21595816 NR Description: translationally controlled tumor protein-like
  misc_feature (1)..(168): Homolog of NCBI NO: 15228276 NR Description: translationally controlled tumor protein -related

SEQ ID NO: 31621 - DNA, 1087 bp, Arabidopsis thaliana; identical to SEQ ID NO: 28031
  misc_feature (1)..(1087): Ceres Seq. ID no. 13497134
  misc_feature: MA Experiment ID: 108434 Result: Down-regulated in Transcription
  misc_feature: MA Experiment 108434 PARAMETER Experiment Name: At_Root_Tips_cDNA_P Parameter: Tissue Value: Root Tips
  misc_feature: MA Experiment ID: 108435 Result: Down-regulated in Transcription
  misc_feature: MA Experiment 108435 PARAMETER Experiment Name: At_stm_Mutants_cDNA_P Parameter: Plant Line Value: wt Landsburg vs stm
  misc_feature: MA Experiment 108435 PARAMETER Experiment Name: At_stm_Mutants_cDNA_P Parameter: Tissue Value: Shoot Apical Meristem Region
  misc_feature: MA Experiment ID: 108462 Result: Up-regulated in Transcription
  misc_feature: MA Experiment 108462 PARAMETER Experiment Name: At_Germinating_Seeds_cDNA_P Parameter: Age (day) Value: 2 vs. 0
  misc_feature: MA Experiment 108462 PARAMETER Experiment Name: At_Germinating_Seeds_cDNA_P Parameter: Tissue Value: Germinating Seeds
  misc_feature: MA Experiment ID: 108463 Result: Up-regulated in Transcription
  misc_feature: MA Experiment 108463 PARAMETER Experiment Name: At_Germinating_Seeds_cDNA_P Parameter: Age (day) Value: 3 vs. 0
  misc_feature: MA Experiment 108463 PARAMETER Experiment Name: At_Germinating_Seeds_cDNA_P Parameter: Tissue Value: Germinating Seeds
  misc_feature: MA Experiment ID: 108501 Result: Down-regulated in Transcription
  misc_feature: MA Experiment 108501 PARAMETER Experiment Name: At_ap2_floral_buds_cDNA_P Parameter: Plant Line Value: ap2 (Ler.)
  misc_feature: MA Experiment 108501 PARAMETER Experiment Name: At_ap2_floral_buds_cDNA_P Parameter: Tissue Value: Closed Flower
  misc_feature: MA Experiment ID: 108561 Result: Up-regulated in Transcription
  misc_feature: MA Experiment 108561 PARAMETER Experiment Name: At_100uM_ABA_cDNA_P Parameter: Timepoint (hr) Value: 6
  misc_feature: MA Experiment 108561 PARAMETER Experiment Name: At_100uM_ABA_cDNA_P Parameter: Tissue Value: Aerial
  misc_feature: MA Experiment 108561 PARAMETER Experiment Name: At_100uM_ABA_cDNA_P Parameter: Treatment Value: 100uM ABA vs. No Treatment
  misc_feature: MA Experiment ID: 108574 Result: Down-regulated in Transcription
  misc_feature: MA Experiment 108574 PARAMETER Experiment Name: At_Wounding__cDNA_P Parameter: Timepoint (hr) Value: 1
  misc_feature: MA Experiment 108574 PARAMETER Experiment Name: At_Wounding__cDNA_P Parameter: Tissue Value: Aerial
  misc_feature: MA Experiment 108574 PARAMETER Experiment Name: At_Wounding__cDNA_P Parameter: Treatment Value: Wounding vs. No Wounding
  misc_feature: MA Experiment ID: 108594 Result: Up-regulated in Transcription
  misc_feature: MA Experiment 108594 PARAMETER Experiment Name: At_Ler-rhl_Root_cDNA_P Parameter: Plant Line Value: null
  misc_feature: MA Experiment ID: 108595 Result: Down-regulated in Transcription
  misc_feature: MA Experiment 108595 PARAMETER Experiment Name: At_Ler-pi_Ovule_cDNA_P Parameter: Plant Line Value: null
  misc_feature: MA Experiment ID: 108605 Result: Up-regulated in Transcription
  misc_feature: MA Experiment 108605 PARAMETER Experiment Name: At_100uM_ABA_cDNA_P Parameter: Timepoint (hr) Value: 6
  misc_feature: MA Experiment 108605 PARAMETER Experiment Name: At_100uM_ABA_cDNA_P Parameter: Tissue Value: Aerial
  misc_feature: MA Experiment 108605 PARAMETER Experiment Name: At_100uM_ABA_cDNA_P Parameter: Treatment Value: 100uM ABA vs. No Treatment
  misc_feature: MA Experiment ID: 20000069 Result: Up-regulated in Transcription
  misc_feature: MA Experiment 20000069 PARAMETER Experiment Name: At_100uM_ABA_Mutants_cDNA_P Parameter: Plant Line Value: CS23
  misc_feature: MA Experiment 20000069 PARAMETER Experiment Name: At_100uM_ABA_Mutants_cDNA_P Parameter: Timepoint (hr) Value: 6
  misc_feature: MA Experiment 20000069 PARAMETER Experiment Name: At_100uM_ABA_Mutants_cDNA_P Parameter: Tissue Value: Aerial
  misc_feature: MA Experiment 20000069 PARAMETER Experiment Name: At_100uM_ABA_Mutants_cDNA_P Parameter: Treatment Value: 100uM ABA vs. No Treatment
  misc_feature: MA Experiment ID: 20000070 Result: Up-regulated in Transcription
  misc_feature: MA Experiment 20000070 PARAMETER Experiment Name: At_100uM_ABA_Mutants_cDNA_P Parameter: Plant Line Value: CS24
  misc_feature: MA Experiment 20000070 PARAMETER Experiment Name: At_100uM_ABA_Mutants_cDNA_P Parameter: Timepoint (hr) Value: 6
  misc_feature: MA Experiment 20000070 PARAMETER Experiment Name: At_100uM_ABA_Mutants_cDNA_P Parameter: Tissue Value: Aerial
  misc_feature: MA Experiment 20000070 PARAMETER Experiment Name: At_100uM_ABA_Mutants_cDNA_P Parameter: Treatment Value: 100uM ABA vs. No Treatment
  misc_feature: MA Experiment ID: 20000071 Result: Up-regulated in Transcription
  misc_feature: MA Experiment 20000071 PARAMETER Experiment Name: At_100uM_ABA_Mutants_cDNA_P Parameter: Plant Line Value: CS8104
  misc_feature: MA Experiment 20000071 PARAMETER Experiment Name: At_100uM_ABA_Mutants_cDNA_P Parameter: Timepoint (hr) Value: 6
  misc_feature: MA Experiment 20000071 PARAMETER Experiment Name: At_100uM_ABA_Mutants_cDNA_P Parameter: Tissue Value: Aerial
  misc_feature: MA Experiment 20000071 PARAMETER Experiment Name: At_100uM_ABA_Mutants_cDNA_P Parameter: Treatment Value: 100uM ABA vs. No Treatment
  misc_feature: MA Experiment ID: 20000087 Result: Up-regulated in Transcription
  misc_feature: MA Experiment 20000087 PARAMETER Experiment Name: At_100uM_ABA_Mutants_cDNA_P Parameter: Plant Line Value: WS
  misc_feature: MA Experiment 20000087 PARAMETER Experiment Name: At_100uM_ABA_Mutants_cDNA_P Parameter: Timepoint (hr) Value: 6
  misc_feature: MA Experiment 20000087 PARAMETER Experiment Name: At_100uM_ABA_Mutants_cDNA_P Parameter: Tissue Value: Aerial
  misc_feature: MA Experiment 20000087 PARAMETER Experiment Name: At_100uM_ABA_Mutants_cDNA_P Parameter: Treatment Value: 100uM ABA vs. No Treatment
  misc_feature: MA Experiment ID: 20000117 Result: Up-regulated in Transcription
  misc_feature: MA Experiment 20000117 PARAMETER Experiment Name: At_100uM_ABA_Mutants_cDNA_P Parameter: Plant Line Value: Columbia
  misc_feature: MA Experiment 20000117 PARAMETER Experiment Name: At_100uM_ABA_Mutants_cDNA_P Parameter: Timepoint (hr) Value: 6
  misc_feature: MA Experiment 20000117 PARAMETER Experiment Name: At_100uM_ABA_Mutants_cDNA_P Parameter: Tissue Value: Aerial
  misc_feature: MA Experiment 20000117 PARAMETER Experiment Name: At_100uM_ABA_Mutants_cDNA_P Parameter: Treatment Value: 100uM ABA vs. No Treatment
  misc_feature: MA Experiment ID: 20000169 Result: Up-regulated in Transcription
  misc_feature: MA Experiment 20000169 PARAMETER Experiment Name: At_100uM_ABA_P Parameter: Age (day) Value: 14
  misc_feature: MA Experiment 20000169 PARAMETER Experiment Name: At_100uM_ABA_P Parameter: Organism Value: A. thaliana
  misc_feature: MA Experiment 20000169 PARAMETER Experiment Name: At_100uM_ABA_P Parameter: Plant Line Value: WS
  misc_feature: MA Experiment 20000169 PARAMETER Experiment Name: At_100uM_ABA_P Parameter: Timepoint (hr) Value: 6
  misc_feature: MA Experiment 20000169 PARAMETER Experiment Name: At_100uM_ABA_P Parameter: Tissue Value: Aerial
  misc_feature: MA Experiment 20000169 PARAMETER Experiment Name: At_100uM_ABA_P Parameter: Treatment Value: 100uM ABA vs. No Treatment
  misc_feature: MA Experiment ID: 20000173 Result: Down-regulated in Transcription
  misc_feature: MA Experiment 20000173 PARAMETER Experiment Name: At_42deg_Heat_P Parameter: Age (day) Value: 14
  misc_feature: MA Experiment 20000173 PARAMETER Experiment Name: At_42deg_Heat_P Parameter: Organism Value: A. thaliana
  misc_feature: MA Experiment 20000173 PARAMETER Experiment Name: At_42deg_Heat_P Parameter: Plant Line Value: WS
  misc_feature: MA Experiment 20000173 PARAMETER Experiment Name: At_42deg_Heat_P Parameter: Temperature (deg C) Value: 42 vs. 22
  misc_feature: MA Experiment 20000173 PARAMETER Experiment Name: At_42deg_Heat_P Parameter: Timepoint (hr) Value: 6
  misc_feature: MA Experiment 20000173 PARAMETER Experiment Name: At_42deg_Heat_P Parameter: Tissue Value: Aerial
  misc_feature: MA Experiment ID: 20000179 Result: Up-regulated in Transcription
  misc_feature: MA Experiment 20000179 PARAMETER Experiment Name: At_Germinating_Seeds_P Parameter: Age (hr) Value: 6 vs. 0
  misc_feature: MA Experiment 20000179 PARAMETER Experiment Name: At_Germinating_Seeds_P Parameter: Tissue Value: Germinating Seeds
  misc_feature: MA Experiment ID: 20000180 Result: Up-regulated in Transcription
  misc_feature: MA Experiment 20000180 PARAMETER Experiment Name: At_Germinating_Seeds_P Parameter: Age (hr) Value: 24 vs. 0
  misc_feature: MA Experiment 20000180 PARAMETER Experiment Name: At_Germinating_Seeds_P Parameter: Tissue Value: Germinating Seeds
  misc_feature: MA Experiment ID: 20000184 Result: Down-regulated in Transcription
  misc_feature: MA Experiment 20000184 PARAMETER Experiment Name: At_Shoots__P Parameter: Age (day) Value: 7
  misc_feature: MA Experiment 20000184 PARAMETER Experiment Name: At_Shoots__P Parameter: Tissue Value: Shoots vs. Whole Plant
  misc_feature: MA Experiment ID: 20000224 Result: Up-regulated in Transcription
  misc_feature: MA Experiment ID: 20000234 Result: Down-regulated in Transcription
  misc_feature: MA Experiment 20000234 PARAMETER Experiment Name: At_Siliques_P Parameter: Age (day) Value: 21
  misc_feature: MA Experiment 20000234 PARAMETER Experiment Name: At_Siliques_P Parameter: Organism Value: A. thaliana
  misc_feature: MA Experiment 20000234 PARAMETER Experiment Name: At_Siliques_P Parameter: Plant Line Value: WS
  misc_feature: MA Experiment 20000234 PARAMETER Experiment Name: At_Siliques_P Parameter: Tissue Value: Less Than 5mm Siliques vs. Whole Plant
  misc_feature: MA Experiment ID: 20000235 Result: Down-regulated in Transcription
  misc_feature: MA Experiment 20000235 PARAMETER Experiment Name: At_Siliques_P Parameter: Age (day) Value: 21
  misc_feature: MA Experiment 20000235 PARAMETER Experiment Name: At_Siliques_P Parameter: Organism Value: A. thaliana
  misc_feature: MA Experiment 20000235 PARAMETER Experiment Name: At_Siliques_P Parameter: Plant Line Value: WS
  misc_feature: MA Experiment 20000235 PARAMETER Experiment Name: At_Siliques_P Parameter: Tissue Value: 5-10mm Siliques vs. Whole Plant
  misc_feature: MA Experiment ID: 20000265 Result: Down-regulated in Transcription
  misc_feature: MA Experiment 20000265 PARAMETER Experiment Name: At_Open_Flower_P Parameter: Age (day) Value: 21
  misc_feature: MA Experiment 20000265 PARAMETER Experiment Name: At_Open_Flower_P Parameter: Plant Line Value: WS
  misc_feature: MA Experiment 20000265 PARAMETER Experiment Name: At_Open_Flower_P Parameter: Tissue Value: Closed Flower vs. Whole Plant
  misc_feature: MA Experiment ID: 20000437 Result: Up-regulated in Transcription
  misc_feature: MA Experiment 20000437 PARAMETER Experiment Name: At_Drought_P Parameter: Age (day) Value: 8
  misc_feature: MA Experiment 20000437 PARAMETER Experiment Name: At_Drought_P Parameter: Organism Value: A. thaliana
  misc_feature: MA Experiment 20000437 PARAMETER Experiment Name: At_Drought_P Parameter: Plant Line Value: WS
  misc_feature: MA Experiment 20000437 PARAMETER Experiment Name: At_Drought_P Parameter: Timepoint (hr) Value: 24
  misc_feature: MA Experiment 20000437 PARAMETER Experiment Name: At_Drought_P Parameter: Tissue Value: Whole Plant
  misc_feature: MA Experiment 20000437 PARAMETER Experiment Name: At_Drought_P Parameter: Treatment Value: Drought vs. No Drought
  misc_feature: MA Experiment ID: 20000573 Result: Up-regulated in Transcription
  misc_feature: MA Experiment 20000573 PARAMETER Experiment Name: At_100uM_ABA_Mutants__P Parameter: Organism Value: A. thaliana
  misc_feature: MA Experiment 20000573 PARAMETER Experiment Name: At_100uM_ABA_Mutants__P Parameter: Plant Line Value: CS22 vs. Ler wt
  misc_feature: MA Experiment 20000573 PARAMETER Experiment Name: At_100uM_ABA_Mutants__P Parameter: Timepoint (hr) Value: N/A
  misc_feature: MA Experiment 20000573 PARAMETER Experiment Name: At_100uM_ABA_Mutants__P Parameter: Tissue Value: Whole Plant
  misc_feature: MA Experiment 20000573 PARAMETER Experiment Name: At_100uM_ABA_Mutants__P Parameter: Treatment Value: None
  misc_feature: MA Experiment ID: 20000794 Result: Up-regulated in Transcription
  misc_feature: MA Experiment 20000794 PARAMETER Experiment Name: At_Petals_P Parameter: Age (day) Value: 23-25 days
  misc_feature: MA Experiment 20000794 PARAMETER Experiment Name: At_Petals_P Parameter: Plant Line Value: WS
  misc_feature: MA Experiment 20000794 PARAMETER Experiment Name: At_Petals_P Parameter: Tissue Value: Petals vs. Whole plant
  misc_feature: MA Experiment ID: 20001247 Result: Up-regulated in Transcription
  misc_feature: MA Experiment 20001247 PARAMETER Experiment Name: At_Far-red-induction_P Parameter: Age (day) Value: 7
  misc_feature: MA Experiment 20001247 PARAMETER Experiment Name: At_Far-red-induction_P Parameter: Light Value: Far-red vs. White
  misc_feature: MA Experiment 20001247 PARAMETER Experiment Name: At_Far-red-induction_P Parameter: Organism Value: A. thaliana
  misc_feature: MA Experiment 20001247 PARAMETER Experiment Name: At_Far-red-induction_P Parameter: Plant Line Value: Columbia
  misc_feature: MA Experiment 20001247 PARAMETER Experiment Name: At_Far-red-induction_P Parameter: Timepoint (hr) Value: 1
  misc_feature: MA Experiment 20001247 PARAMETER Experiment Name: At_Far-red-induction_P Parameter: Tissue Value: Whole Plant
  misc_feature: MA Experiment ID: 20001248 Result: Up-regulated in Transcription
  misc_feature: MA Experiment 20001248 PARAMETER Experiment Name: At_Far-red-induction_P Parameter: Age (day) Value: 7
  misc_feature: MA Experiment 20001248 PARAMETER Experiment Name: At_Far-red-induction_P Parameter: Light Value: Far-red vs. White
  misc_feature: MA Experiment 20001248 PARAMETER Experiment Name: At_Far-red-induction_P Parameter: Organism Value: A. thaliana
  misc_feature: MA Experiment 20001248 PARAMETER Experiment Name: At_Far-red-induction_P Parameter: Plant Line Value: Columbia
  misc_feature: MA Experiment 20001248 PARAMETER Experiment Name: At_Far-red-induction_P Parameter: Timepoint (hr) Value: 4
  misc_feature: MA Experiment 20001248 PARAMETER Experiment Name: At_Far-red-induction_P Parameter: Tissue Value: Whole Plant
  misc_feature: MA Experiment ID: 20001450 Result: Up-regulated in Transcription
  misc_feature: MA Experiment 20001450 PARAMETER Experiment Name: At_Far-red-induction_P Parameter: Age (day) Value: 7
  misc_feature: MA Experiment 20001450 PARAMETER Experiment Name: At_Far-red-induction_P Parameter: Light Value: Far-red vs. White
  misc_feature: MA Experiment 20001450 PARAMETER Experiment Name: At_Far-red-induction_P Parameter: Organism Value: A. thaliana
  misc_feature: MA Experiment 20001450 PARAMETER Experiment Name: At_Far-red-induction_P Parameter: Plant Line Value: Columbia
  misc_feature: MA Experiment 20001450 PARAMETER Experiment Name: At_Far-red-induction_P Parameter: Timepoint (hr) Value: 8
  misc_feature: MA Experiment 20001450 PARAMETER Experiment Name: At_Far-red-induction_P Parameter: Tissue Value: Whole Plant
  misc_feature: MA Experiment ID: 20001451 Result: Up-regulated in Transcription
  misc_feature: MA Experiment 20001451 PARAMETER Experiment Name: At_Far-red-induction_P Parameter: Age (day) Value: 7
  misc_feature: MA Experiment 20001451 PARAMETER Experiment Name: At_Far-red-induction_P Parameter: Light Value: Far-red vs. White
  misc_feature: MA Experiment 20001451 PARAMETER Experiment Name: At_Far-red-induction_P Parameter: Organism Value: A. thaliana
  misc_feature: MA Experiment 20001451 PARAMETER Experiment Name: At_Far-red-induction_P Parameter: Plant Line Value: Columbia
  misc_feature: MA Experiment 20001451 PARAMETER Experiment Name: At_Far-red-induction_P Parameter: Timepoint (hr) Value: 24
  misc_feature: MA Experiment 20001451 PARAMETER Experiment Name: At_Far-red-induction_P Parameter: Tissue Value: Whole Plant
  misc_feature: MA Experiment ID: 20001557 Result: Down-regulated in Transcription
  misc_feature: MA Experiment 20001557 PARAMETER Experiment Name: At_Drought_Soil_Dry_P Parameter: Age (day) Value: 27
  misc_feature: MA Experiment 20001557 PARAMETER Experiment Name: At_Drought_Soil_Dry_P Parameter: Organism Value: A. thaliana
  misc_feature: MA Experiment 20001557 PARAMETER Experiment Name: At_Drought_Soil_Dry_P Parameter: Plant Line Value: WS
  misc_feature: MA Experiment 20001557 PARAMETER Experiment Name: At_Drought_Soil_Dry_P Parameter: Post Timepoint (hr) Value: 3
  misc_feature: MA Experiment 20001557 PARAMETER Experiment Name: At_Drought_Soil_Dry_P Parameter: Post-Treatment Value: Re-Water vs. No Drought
  misc_feature: MA Experiment 20001557 PARAMETER Experiment Name: At_Drought_Soil_Dry_P Parameter: Timepoint (day) Value: 13
  misc_feature: MA Experiment 20001557 PARAMETER Experiment Name: At_Drought_Soil_Dry_P Parameter: Treatment Value: Drought vs. No Drought
  misc_feature: MA Experiment ID: 20001558 Result: Down-regulated in Transcription
  misc_feature: MA Experiment 20001558 PARAMETER Experiment Name: At_Drought_Soil_Dry_P Parameter: Age (day) Value: 27
  misc_feature: MA Experiment 20001558 PARAMETER Experiment Name: At_Drought_Soil_Dry_P Parameter: Organism Value: A. thaliana
  misc_feature: MA Experiment 20001558 PARAMETER Experiment Name: At_Drought_Soil_Dry_P Parameter: Plant Line Value: WS
  misc_feature: MA Experiment 20001558 PARAMETER Experiment Name: At_Drought_Soil_Dry_P Parameter: Post Timepoint (hr) Value: 6
  misc_feature: MA Experiment 20001558 PARAMETER Experiment Name: At_Drought_Soil_Dry_P Parameter: Post-Treatment Value: Re-Water vs. No Drought
  misc_feature: MA Experiment 20001558 PARAMETER Experiment Name: At_Drought_Soil_Dry_P Parameter: Timepoint (day) Value: 13
  misc_feature: MA Experiment 20001558 PARAMETER Experiment Name: At_Drought_Soil_Dry_P Parameter: Treatment Value: Drought vs. No Drought

SEQ ID NO: 31622 - protein, 317 aa, Arabidopsis thaliana; identical to SEQ ID NO: 28032
  peptide (1)..(317): Ceres Seq. ID no. 13497135
  misc_feature (85)..(299): Homolog of NCBI NO: 30685030 NR Description: CARBONIC ANHYDRASE 2 [Arabidopsis thaliana]
  misc_feature (85)..(299): Homolog of NCBI NO: 21903379 NR Description: Carbonic anhydrase 2 (Carbonate dehydratase 2)
  misc_feature (64)..(299): Homolog of NCBI NO: 27652186 NR Description: carbonic anhydrase 3 [Flaveria bidentis]
  misc_feature (94)..(311): Homolog of NCBI NO: 30698715 NR Description: carbonic anhydrase -related [Arabidopsis
  misc_feature (94)..(311): Homolog of NCBI NO: 15223141 NR Description: carbonic anhydrase -related [Arabidopsis
  misc_feature (84)..(317): Homolog of NCBI NO: 18418245 NR Description: carbonate dehydratase - like protein [Arabidopsis
  misc_feature (28)..(277): Homolog of NCBI NO: 21539555 NR Description: putative carbonic anhydrase [Arabidopsis
  misc_feature (28)..(277): Homolog of NCBI NO: 30696219 NR Description: carbonic anhydrase -related [Arabidopsis thaliana]
  misc_feature (28)..(317): Homolog of NCBI NO: 25404198 NR Description: probable carbonic anhydrase T18I24.9
  misc_feature (28)..(317): Homolog of NCBI NO: 30696223 NR Description: carbonic anhydrase -related [Arabidopsis

SEQ ID NO: 31623 - protein, 290 aa, Arabidopsis thaliana; identical to SEQ ID NO: 28033
  peptide (1)..(290): Ceres Seq. ID no. 13497136
  misc_feature (58)..(272): Homolog of NCBI NO: 30685030 NR Description: CARBONIC ANHYDRASE 2 [Arabidopsis thaliana]
  misc_feature (58)..(272): Homolog of NCBI NO: 21903379 NR Description: Carbonic anhydrase 2 (Carbonate dehydratase 2)
  misc_feature (37)..(272): Homolog of NCBI NO: 27652186 NR Description: carbonic anhydrase 3 [Flaveria bidentis]
  misc_feature (67)..(284): Homolog of NCBI NO: 30698715 NR Description: carbonic anhydrase -related [Arabidopsis
  misc_feature (67)..(284): Homolog of NCBI NO: 15223141 NR Description: carbonic anhydrase -related [Arabidopsis
  misc_feature (57)..(290): Homolog of NCBI NO: 18418245 NR Description: carbonate dehydratase - like protein [Arabidopsis
  misc_feature (1)..(250): Homolog of NCBI NO: 21539555 NR Description: putative carbonic anhydrase [Arabidopsis
  misc_feature (1)..(250): Homolog of NCBI NO: 30696219 NR Description: carbonic anhydrase -related [Arabidopsis thaliana]
  misc_feature (1)..(290): Homolog of NCBI NO: 25404198 NR Description: probable carbonic anhydrase T18I24.9
  misc_feature (1)..(290): Homolog of NCBI NO: 30696223 NR Description: carbonic anhydrase -related [Arabidopsis

SEQ ID NO: 31624 - protein, 239 aa, Arabidopsis thaliana; identical to SEQ ID NO: 28034
  peptide (1)..(239): Ceres Seq. ID no. 13497137
  misc_feature (7)..(221): Homolog of NCBI NO: 30685030 NR Description: CARBONIC ANHYDRASE 2 [Arabidopsis thaliana]
  misc_feature (7)..(221): Homolog of NCBI NO: 21903379 NR Description: Carbonic anhydrase 2 (Carbonate dehydratase 2)
  misc_feature (1)..(221): Homolog of NCBI NO: 27652186 NR Description: carbonic anhydrase 3 [Flaveria bidentis]
  misc_feature (16)..(233): Homolog of NCBI NO: 30698715 NR Description: carbonic anhydrase -related [Arabidopsis
  misc_feature (16)..(233): Homolog of NCBI NO: 15223141 NR Description: carbonic anhydrase -related [Arabidopsis
  misc_feature (6)..(239): Homolog of NCBI NO: 18418245 NR Description: carbonate dehydratase - like protein [Arabidopsis
  misc_feature (1)..(199): Homolog of NCBI NO: 21539555 NR Description: putative carbonic anhydrase [Arabidopsis
  misc_feature (1)..(199): Homolog of NCBI NO: 30696219 NR Description: carbonic anhydrase -related [Arabidopsis thaliana]
  misc_feature (1)..(239): Homolog of NCBI NO: 25404198 NR Description: probable carbonic anhydrase T18I24.9
  misc_feature (1)..(239): Homolog of NCBI NO: 30696223 NR Description: carbonic anhydrase -related [Arabidopsis

SEQ ID NO: 31625 - DNA, 1117 bp, Arabidopsis thaliana; identical to SEQ ID NO: 28035
  misc_feature (1)..(1117): Ceres Seq. ID no. 12371743
  misc_feature: MA Experiment ID: 108434 Result: Down-regulated in Transcription
  misc_feature: MA Experiment 108434 PARAMETER Experiment Name: At_Root_Tips_cDNA_P Parameter: Tissue Value: Root Tips
  misc_feature: MA Experiment ID: 108488 Result: Down-regulated in Transcription
  misc_feature: MA Experiment ID: 108574 Result: Up-regulated in Transcription
  misc_feature: MA Experiment 108574 PARAMETER Experiment Name: At_Wounding__cDNA_P Parameter: Timepoint (hr) Value: 1
  misc_feature: MA Experiment 108574 PARAMETER Experiment Name: At_Wounding__cDNA_P Parameter: Tissue Value: Aerial
  misc_feature: MA Experiment 108574 PARAMETER Experiment Name: At_Wounding__cDNA_P Parameter: Treatment Value: Wounding vs. No Wounding
  misc_feature: MA Experiment ID: 108595 Result: Up-regulated in Transcription
  misc_feature: MA Experiment 108595 PARAMETER Experiment Name: At_Ler-pi_Ovule_cDNA_P Parameter: Plant Line Value: null
  misc_feature: MA Experiment ID: 20000069 Result: Up-regulated in Transcription
  misc_feature: MA Experiment 20000069 PARAMETER Experiment Name: At_100uM_ABA_Mutants_cDNA_P Parameter: Plant Line Value: CS23
  misc_feature: MA Experiment 20000069 PARAMETER Experiment Name: At_100uM_ABA_Mutants_cDNA_P Parameter: Timepoint (hr) Value: 6
  misc_feature: MA Experiment 20000069 PARAMETER Experiment Name: At_100uM_ABA_Mutants_cDNA_P Parameter: Tissue Value: Aerial
  misc_feature: MA Experiment 20000069 PARAMETER Experiment Name: At_100uM_ABA_Mutants_cDNA_P Parameter: Treatment Value: 100uM ABA vs. No Treatment
  misc_feature: MA Experiment ID: 20000185 Result: Up-regulated in Transcription
  misc_feature: MA Experiment 20000185 PARAMETER Experiment Name: At_Roots__P Parameter: Age (day) Value: 7 vs. 21
  misc_feature: MA Experiment 20000185 PARAMETER Experiment Name: At_Roots__P Parameter: Organism Value: A. thaliana
  misc_feature: MA Experiment 20000185 PARAMETER Experiment Name: At_Roots__P Parameter: Tissue Value: Roots vs. Whole Plant
  misc_feature: MA Experiment ID: 20000265 Result: Up-regulated in Transcription
  misc_feature: MA Experiment 20000265 PARAMETER Experiment Name: At_Open_Flower_P Parameter: Age (day) Value: 21
  misc_feature: MA Experiment 20000265 PARAMETER Experiment Name: At_Open_Flower_P Parameter: Plant Line Value: WS
  misc_feature: MA Experiment 20000265 PARAMETER Experiment Name: At_Open_Flower_P Parameter: Tissue Value: Closed Flower vs. Whole Plant
  misc_feature: MA Experiment ID: 20000286 Result: Up-regulated in Transcription
  misc_feature: MA Experiment 20000286 PARAMETER Experiment Name: At_Open_Flower_P Parameter: Age (day) Value: 21
  misc_feature: MA Experiment 20000286 PARAMETER Experiment Name: At_Open_Flower_P Parameter: Plant Line Value: WS
  misc_feature: MA Experiment 20000286 PARAMETER Experiment Name: At_Open_Flower_P Parameter: Tissue Value: Half Open vs. Whole Plant
  misc_feature: MA Experiment ID: 20000437 Result: Up-regulated in Transcription
  misc_feature: MA Experiment 20000437 PARAMETER Experiment Name: At_Drought_P Parameter: Age (day) Value: 8
  misc_feature: MA Experiment 20000437 PARAMETER Experiment Name: At_Drought_P Parameter: Organism Value: A. thaliana
  misc_feature: MA Experiment 20000437 PARAMETER Experiment Name: At_Drought_P Parameter: Plant Line Value: WS
  misc_feature: MA Experiment 20000437 PARAMETER Experiment Name: At_Drought_P Parameter: Timepoint (hr) Value: 24
  misc_feature: MA Experiment 20000437 PARAMETER Experiment Name: At_Drought_P Parameter: Tissue Value: Whole Plant
  misc_feature: MA Experiment 20000437 PARAMETER Experiment Name: At_Drought_P Parameter: Treatment Value: Drought vs. No Drought
  misc_feature: MA Experiment ID: 20000439 Result: Up-regulated in Transcription
  misc_feature: MA Experiment 20000439 PARAMETER Experiment Name: At_Roots__P Parameter: Age (day) Value: 14 vs. 21
  misc_feature: MA Experiment 20000439 PARAMETER Experiment Name: At_Roots__P Parameter: Organism Value: A. thaliana
  misc_feature: MA Experiment 20000439 PARAMETER Experiment Name: At_Roots__P Parameter: Tissue Value: Roots vs. Whole Plant
  misc_feature: MA Experiment ID: 20001556 Result: Up-regulated in Transcription
  misc_feature: MA Experiment 20001556 PARAMETER Experiment Name: At_Drought_Soil_Dry_P Parameter: Age (day) Value: 26
  misc_feature: MA Experiment 20001556 PARAMETER Experiment Name: At_Drought_Soil_Dry_P Parameter: Organism Value: A. thaliana
  misc_feature: MA Experiment 20001556 PARAMETER Experiment Name: At_Drought_Soil_Dry_P Parameter: Plant Line Value: WS
  misc_feature: MA Experiment 20001556 PARAMETER Experiment Name: At_Drought_Soil_Dry_P Parameter: Post Timepoint (hr) Value: None
  misc_feature: MA Experiment 20001556 PARAMETER Experiment Name: At_Drought_Soil_Dry_P Parameter: Post-Treatment Value: None
  misc_feature: MA Experiment 20001556 PARAMETER Experiment Name: At_Drought_Soil_Dry_P Parameter: Timepoint (day) Value: 12
  misc_feature: MA Experiment 20001556 PARAMETER Experiment Name: At_Drought_Soil_Dry_P Parameter: Treatment Value: Drought vs. No Drought
  misc_feature: MA Experiment ID: 20001757 Result: Down-regulated in Transcription
  misc_feature: MA Experiment 20001757 PARAMETER Experiment Name: At_50mM_NH4NO3_L-to-H_P Parameter: Timepoint (hr) Value: 6
  misc_feature: MA Experiment 20001757 PARAMETER Experiment Name: At_50mM_NH4NO3_L-to-H_P Parameter: Tissue Value: Leaf
  misc_feature: MA Experiment 20001757 PARAMETER Experiment Name: At_50mM_NH4NO3_L-to-H_P Parameter: Treatment Value: 50mM NH4NO3 vs 100mM Mannitol
  misc_feature: MA Experiment ID: 20001904 Result: Up-regulated in Transcription
  misc_feature: MA Experiment 20001904 PARAMETER Experiment Name: At_Drought_Reproduction_P Parameter: Age (day) Value: 37
  misc_feature: MA Experiment 20001904 PARAMETER Experiment Name: At_Drought_Reproduction_P Parameter: Organism Value: A. thaliana
  misc_feature: MA Experiment 20001904 PARAMETER Experiment Name: At_Drought_Reproduction_P Parameter: Plant Line Value: WS
  misc_feature: MA Experiment 20001904 PARAMETER Experiment Name: At_Drought_Reproduction_P Parameter: Timepoint (day) Value: 7
  misc_feature: MA Experiment 20001904 PARAMETER Experiment Name: At_Drought_Reproduction_P Parameter: Tissue Value: Rosettes
  misc_feature: MA Experiment 20001904 PARAMETER Experiment Name: At_Drought_Reproduction_P Parameter: Treatment Value: Drought vs. No Drought
  misc_feature: MA Experiment ID: 20001905 Result: Up-regulated in Transcription
  misc_feature: MA Experiment 20001905 PARAMETER Experiment Name: At_Drought_Reproduction_P Parameter: Age (day) Value: 40
  misc_feature: MA Experiment 20001905 PARAMETER Experiment Name: At_Drought_Reproduction_P Parameter: Organism Value: A. thaliana
  misc_feature: MA Experiment 20001905 PARAMETER Experiment Name: At_Drought_Reproduction_P Parameter: Plant Line Value: WS
  misc_feature: MA Experiment 20001905 PARAMETER Experiment Name: At_Drought_Reproduction_P Parameter: Timepoint (day) Value: 10
  misc_feature: MA Experiment 20001905 PARAMETER Experiment Name: At_Drought_Reproduction_P Parameter: Tissue Value: Rosettes
  misc_feature: MA Experiment 20001905 PARAMETER Experiment Name: At_Drought_Reproduction_P Parameter: Treatment Value: Drought vs. No Drought

SEQ ID NO: 31626 - protein, 186 aa, Arabidopsis thaliana; identical to SEQ ID NO: 28036
  peptide (1)..(186): Ceres Seq. ID no. 12371744
  misc_feature (1)..(186): Pfam Name: Lanthionine synthetase C-like protein Pfam Description: Lanthionine synthetase C-like protein
  misc_feature (4)..(186): Homolog of NCBI NO: 21489937 NR Description: LanC (bacterial lantibiotic synthetase component
  misc_feature (1)..(186): Homolog of NCBI NO: 27924406 NR Description: Similar to LanC (bacterial lantibiotic synthetase
  misc_feature (4)..(186): Homolog of NCBI NO: 30681129 NR Description: expressed protein [Arabidopsis thaliana]
  misc_feature (4)..(186): Homolog of NCBI NO: 25411993 NR Description: hypothetical protein At2g20770 [imported] -
  misc_feature (4)..(186): Homolog of NCBI NO: 21742091 NR Description: OSJNBa0074L08.13 [Oryza sativa (japonica
  misc_feature (1)..(176): Homolog of NCBI NO: 15219126 NR Description: putative G protein-coupled receptor; protein id:
  misc_feature (4)..(176): Homolog of NCBI NO: 37535720 NR Description: putative lanthionine synthetase
  misc_feature (1)..(186): Homolog of NCBI NO: 8489877 NR Description: putative 7-transmembrane G-protein-coupled
  misc_feature (1)..(186): Homolog of NCBI NO: 15451140 NR Description: G protein-coupled receptor-like protein
  misc_feature (1)..(186): Homolog of NCBI NO: 15238395 NR Description: G protein-coupled receptor-like protein

SEQ ID NO: 31627 - DNA, 1202 bp, Arabidopsis thaliana; identical to SEQ ID NO: 28037
  misc_feature (1)..(1202): Ceres Seq. ID no. 13504859
  misc_feature: MA Experiment ID: 108668 Result: Up-regulated in Transcription
  misc_feature: MA Experiment 108668 PARAMETER Experiment Name: At_2mM_SA_cDNA_P Parameter: Plant Line Value: WS
  misc_feature: MA Experiment 108668 PARAMETER Experiment Name: At_2mM_SA_cDNA_P Parameter: Timepoint (hr) Value: 6
  misc_feature: MA Experiment 108668 PARAMETER Experiment Name: At_2mM_SA_cDNA_P Parameter: Treatment Value: 2mM SA vs. No Treatment
  misc_feature: MA Experiment ID: 20000182 Result: Up-regulated in Transcription
  misc_feature: MA Experiment 20000182 PARAMETER Experiment Name: At_2mM_SA_P Parameter: Age (day) Value: 14
  misc_feature: MA Experiment 20000182 PARAMETER Experiment Name: At_2mM_SA_P Parameter: Organism Value: A. thaliana
  misc_feature: MA Experiment 20000182 PARAMETER Experiment Name: At_2mM_SA_P Parameter: Plant Line Value: WS
  misc_feature: MA Experiment 20000182 PARAMETER Experiment Name: At_2mM_SA_P Parameter: Timepoint (hr) Value: 6
  misc_feature: MA Experiment 20000182 PARAMETER Experiment Name: At_2mM_SA_P Parameter: Tissue Value: Aerial
  misc_feature: MA Experiment 20000182 PARAMETER Experiment Name: At_2mM_SA_P Parameter: Treatment Value: 2mM SA vs. No Treatment
  misc_feature: MA Experiment ID: 20000438 Result: Down-regulated in Transcription
  misc_feature: MA Experiment 20000438 PARAMETER Experiment Name: At_Shoots__P Parameter: Age (day) Value: 14
  misc_feature: MA Experiment 20000438 PARAMETER Experiment Name: At_Shoots__P Parameter: Tissue Value: Shoots vs. Whole Plant
  misc_feature: MA Experiment ID: 20000573 Result: Down-regulated in Transcription
  misc_feature: MA Experiment 20000573 PARAMETER Experiment Name: At_100uM_ABA_Mutants__P Parameter: Organism Value: A. thaliana
  misc_feature: MA Experiment 20000573 PARAMETER Experiment Name: At_100uM_ABA_Mutants__P Parameter: Plant Line Value: CS22 vs. Ler wt
  misc_feature: MA Experiment 20000573 PARAMETER Experiment Name: At_100uM_ABA_Mutants__P Parameter: Timepoint (hr) Value: N/A
  misc_feature: MA Experiment 20000573 PARAMETER Experiment Name: At_100uM_ABA_Mutants__P Parameter: Tissue Value: Whole Plant
  misc_feature: MA Experiment 20000573 PARAMETER Experiment Name: At_100uM_ABA_Mutants__P Parameter: Treatment Value: None
  misc_feature: MA Experiment ID: 20000574 Result: Down-regulated in Transcription
  misc_feature: MA Experiment 20000574 PARAMETER Experiment Name: At_100uM_ABA_Mutants__P Parameter: Organism Value: A. thaliana
  misc_feature: MA Experiment 20000574 PARAMETER Experiment Name: At_100uM_ABA_Mutants__P Parameter: Plant Line Value: CS23 vs. Ler wt
  misc_feature: MA Experiment 20000574 PARAMETER Experiment Name: At_100uM_ABA_Mutants__P Parameter: Timepoint (hr) Value: N/A
  misc_feature: MA Experiment 20000574 PARAMETER Experiment Name: At_100uM_ABA_Mutants__P Parameter: Tissue Value: Whole Plant
  misc_feature: MA Experiment 20000574 PARAMETER Experiment Name: At_100uM_ABA_Mutants__P Parameter: Treatment Value: None

SEQ ID NO: 31628 - protein, 323 aa, Arabidopsis thaliana; identical to SEQ ID NO: 28038
  peptide (1)..(323): Ceres Seq. ID no. 13504860
  misc_feature (146)..(268): Pfam Name: 2OG-Fe(II) oxygenase superfamily Pfam Description: 2OG-Fe(II) oxygenase superfamily
  misc_feature (58)..(323): Homolog of NCBI NO: 34393269 NR Description: prolyl 4-hydroxylase alpha-1 subunit
  misc_feature (8)..(197): Homolog of NCBI NO: 24417248 NR Description: unknown [Arabidopsis thaliana]
  misc_feature (58)..(323): Homolog of NCBI NO: 29150365 NR Description: putative oxidoreductase [Oryza sativa (japonica
  misc_feature (58)..(125): Homolog of NCBI NO: 37534316 NR Description: unknown protein [Oryza sativa (japonica
  misc_feature (126)..(322): Homolog of NCBI NO: 37534316 NR Description: unknown protein [Oryza sativa (japonica
  misc_feature (67)..(321): Homolog of NCBI NO: 28393447 NR Description: putative prolyl 4-hydroxylase [Arabidopsis
  misc_feature (46)..(321): Homolog of NCBI NO: 30689216 NR Description: oxidoreductase, 2OG-Fe(II) oxygenase family
  misc_feature (42)..(323): Homolog of NCBI NO: 9294583 NR Description: prolyl 4-hydroxylase alpha subunit-like protein
  misc_feature (8)..(323): Homolog of NCBI NO: 18086437 NR Description: AT3g28480/MFJ20_16 [Arabidopsis thaliana]
  misc_feature (8)..(323): Homolog of NCBI NO: 18405808 NR Description: oxidoreductase, 2OG-Fe(II) oxygenase family

SEQ ID NO: 31629 - protein, 316 aa, Arabidopsis thaliana; identical to SEQ ID NO: 28039
  peptide (1)..(316): Ceres Seq. ID no. 13504861
  misc_feature (139)..(261): Pfam Name: 2OG-Fe(II) oxygenase superfamily Pfam Description: 2OG-Fe(II) oxygenase superfamily
  misc_feature (51)..(316): Homolog of NCBI NO: 34393269 NR Description: prolyl 4-hydroxylase alpha-1 subunit
  misc_feature (1)..(190): Homolog of NCBI NO: 24417248 NR Description: unknown [Arabidopsis thaliana]
  misc_feature (51)..(316): Homolog of NCBI NO: 29150365 NR Description: putative oxidoreductase [Oryza sativa (japonica
  misc_feature (51)..(118): Homolog of NCBI NO: 37534316 NR Description: unknown protein [Oryza sativa (japonica
  misc_feature (119)..(315): Homolog of NCBI NO: 37534316 NR Description: unknown protein [Oryza sativa (japonica
  misc_feature (60)..(314): Homolog of NCBI NO: 28393447 NR Description: putative prolyl 4-hydroxylase [Arabidopsis
  misc_feature (39)..(314): Homolog of NCBI NO: 30689216 NR Description: oxidoreductase, 2OG-Fe(II) oxygenase family
  misc_feature (35)..(316): Homolog of NCBI NO: 9294583 NR Description: prolyl 4-hydroxylase alpha subunit-like protein
  misc_feature (1)..(316): Homolog of NCBI NO: 18086437 NR Description: AT3g28480/MFJ20_16 [Arabidopsis thaliana]
  misc_feature (1)..(316): Homolog of NCBI NO: 18405808 NR Description: oxidoreductase, 2OG-Fe(II) oxygenase family

SEQ ID NO: 31630 - protein, 275 aa, Arabidopsis thaliana; identical to SEQ ID NO: 28040
  peptide (1)..(275): Ceres Seq. ID no. 13504862
  misc_feature (98)..(220): Pfam Name: 2OG-Fe(II) oxygenase superfamily Pfam Description: 2OG-Fe(II) oxygenase superfamily
  misc_feature (10)..(275): Homolog of NCBI NO: 34393269 NR Description: prolyl 4-hydroxylase alpha-1 subunit
  misc_feature (1)..(149): Homolog of NCBI NO: 24417248 NR Description: unknown [Arabidopsis thaliana]
  misc_feature (10)..(275): Homolog of NCBI NO: 29150365 NR Description: putative oxidoreductase [Oryza sativa (japonica
  misc_feature (10)..(77): Homolog of NCBI NO: 37534316 NR Description: unknown protein [Oryza sativa (japonica
  misc_feature (78)..(274): Homolog of NCBI NO: 37534316 NR Description: unknown protein [Oryza sativa (japonica
  misc_feature (19)..(273): Homolog of NCBI NO: 28393447 NR Description: putative prolyl 4-hydroxylase [Arabidopsis
  misc_feature (1)..(273): Homolog of NCBI NO: 30689216 NR Description: oxidoreductase, 2OG-Fe(II) oxygenase family
  misc_feature (1)..(275): Homolog of NCBI NO: 9294583 NR Description: prolyl 4-hydroxylase alpha subunit-like protein
  misc_feature (1)..(275): Homolog of NCBI NO: 18086437 NR Description: AT3g28480/MFJ20_16 [Arabidopsis thaliana]
  misc_feature (1)..(275): Homolog of NCBI NO: 18405808 NR Description: oxidoreductase, 2OG-Fe(II) oxygenase family

SEQ ID NO: 31631 - DNA, 1684 bp, Arabidopsis thaliana; identical to SEQ ID NO: 27249
  misc_feature (1)..(1684): Ceres Seq. ID no. 12739003
  misc_feature: MA Experiment ID: 108461 Result: Down-regulated in Transcription
  misc_feature: MA Experiment 108461 PARAMETER Experiment Name: At_Germinating_Seeds_cDNA_P Parameter: Age (day) Value: 1 vs. 0
  misc_feature: MA Experiment 108461 PARAMETER Experiment Name: At_Germinating_Seeds_cDNA_P Parameter: Tissue Value: Germinating Seeds
  misc_feature: MA Experiment ID: 108569 Result: Up-regulated in Transcription
  misc_feature: MA Experiment 108569 PARAMETER Experiment Name: At_0.001%_MeJA__cDNA_P Parameter: Timepoint (hr) Value: 6
  misc_feature: MA Experiment 108569 PARAMETER Experiment Name: At_0.001%_MeJA__cDNA_P Parameter: Tissue Value: Aerial
  misc_feature: MA Experiment 108569 PARAMETER Experiment Name: At_0.001%_MeJA__cDNA_P Parameter: Treatment Value: 0.001% MeJA vs. No Treatment
  misc_feature: MA Experiment ID: 108573 Result: Up-regulated in Transcription
  misc_feature: MA Experiment 108573 PARAMETER Experiment Name: At_Drought_cDNA_P Parameter: Timepoint (hr) Value: 6
  misc_feature: MA Experiment 108573 PARAMETER Experiment Name: At_Drought_cDNA_P Parameter: Tissue Value: Aerial
  misc_feature: MA Experiment 108573 PARAMETER Experiment Name: At_Drought_cDNA_P Parameter: Treatment Value: Drought vs. No Drought
  misc_feature: MA Experiment ID: 108579 Result: Down-regulated in Transcription
  misc_feature: MA Experiment 108579 PARAMETER Experiment Name: At_4deg_Cold_cDNA_P Parameter: Temperature (deg C) Value: 4 vs. 22
  misc_feature: MA Experiment 108579 PARAMETER Experiment Name: At_4deg_Cold_cDNA_P Parameter: Timepoint (hr) Value: 6
  misc_feature: MA Experiment 108579 PARAMETER Experiment Name: At_4deg_Cold_cDNA_P Parameter: Tissue Value: Aerial
  misc_feature: MA Experiment ID: 108585 Result: Up-regulated in Transcription
  misc_feature: MA Experiment 108585 PARAMETER Experiment Name: At_5mM_NaNP_cDNA_P Parameter: Timepoint (hr) Value: 6
  misc_feature: MA Experiment 108585 PARAMETER Experiment Name: At_5mM_NaNP_cDNA_P Parameter: Tissue Value: Aerial
  misc_feature: MA Experiment 108585 PARAMETER Experiment Name: At_5mM_NaNP_cDNA_P Parameter: Treatment Value: null
  misc_feature: MA Experiment ID: 20000069 Result: Down-regulated in Transcription
  misc_feature: MA Experiment 20000069 PARAMETER Experiment Name: At_100uM_ABA_Mutants_cDNA_P Parameter: Plant Line Value: CS23
  misc_feature: MA Experiment 20000069 PARAMETER Experiment Name: At_100uM_ABA_Mutants_cDNA_P Parameter: Timepoint (hr) Value: 6
  misc_feature: MA Experiment 20000069 PARAMETER Experiment Name: At_100uM_ABA_Mutants_cDNA_P Parameter: Tissue Value: Aerial
  misc_feature: MA Experiment 20000069 PARAMETER Experiment Name: At_100uM_ABA_Mutants_cDNA_P Parameter: Treatment Value: 100uM ABA vs. No Treatment
  misc_feature: MA Experiment ID: 20000087 Result: Down-regulated in Transcription
  misc_feature: MA Experiment 20000087 PARAMETER Experiment Name: At_100uM_ABA_Mutants_cDNA_P Parameter: Plant Line Value: WS
  misc_feature: MA Experiment 20000087 PARAMETER Experiment Name: At_100uM_ABA_Mutants_cDNA_P Parameter: Timepoint (hr) Value: 6
  misc_feature: MA Experiment 20000087 PARAMETER Experiment Name: At_100uM_ABA_Mutants_cDNA_P Parameter: Tissue Value: Aerial
  misc_feature: MA Experiment 20000087 PARAMETER Experiment Name: At_100uM_ABA_Mutants_cDNA_P Parameter: Treatment Value: 100uM ABA vs. No Treatment
  misc_feature: MA Experiment ID: 20000089 Result: Down-regulated in Transcription
  misc_feature: MA Experiment ID: 20000090 Result: Down-regulated in Transcription
  misc_feature: MA Experiment ID: 20000117 Result: Down-regulated in Transcription
  misc_feature: MA Experiment 20000117 PARAMETER Experiment Name: At_100uM_ABA_Mutants_cDNA_P Parameter: Plant Line Value: Columbia
  misc_feature: MA Experiment 20000117 PARAMETER Experiment Name: At_100uM_ABA_Mutants_cDNA_P Parameter: Timepoint (hr) Value: 6
  misc_feature: MA Experiment 20000117 PARAMETER Experiment Name: At_100uM_ABA_Mutants_cDNA_P Parameter: Tissue Value: Aerial
  misc_feature: MA Experiment 20000117 PARAMETER Experiment Name: At_100uM_ABA_Mutants_cDNA_P Parameter: Treatment Value: 100uM ABA vs. No Treatment
  misc_feature: MA Experiment ID: 20000180 Result: Down-regulated in Transcription
  misc_feature: MA Experiment 20000180 PARAMETER Experiment Name: At_Germinating_Seeds_P Parameter: Age (hr) Value: 24 vs. 0
  misc_feature: MA Experiment 20000180 PARAMETER Experiment Name: At_Germinating_Seeds_P Parameter: Tissue Value: Germinating Seeds
  misc_feature: MA Experiment ID: 20000184 Result: Up-regulated in Transcription
  misc_feature: MA Experiment 20000184 PARAMETER Experiment Name: At_Shoots__P Parameter: Age (day) Value: 7
  misc_feature: MA Experiment 20000184 PARAMETER Experiment Name: At_Shoots__P Parameter: Tissue Value: Shoots vs. Whole Plant
  misc_feature: MA Experiment ID: 20000794 Result: Up-regulated in Transcription
  misc_feature: MA Experiment 20000794 PARAMETER Experiment Name: At_Petals_P Parameter: Age (day) Value: 23-25 days
  misc_feature: MA Experiment 20000794 PARAMETER Experiment Name: At_Petals_P Parameter: Plant Line Value: WS
  misc_feature: MA Experiment 20000794 PARAMETER Experiment Name: At_Petals_P Parameter: Tissue Value: Petals vs. Whole plant
  misc_feature: MA Experiment ID: 20001911 Result: Up-regulated in Transcription
  misc_feature: MA Experiment 20001911 PARAMETER Experiment Name: At_Drought_Reproduction_P Parameter: Age (day) Value: 40
  misc_feature: MA Experiment 20001911 PARAMETER Experiment Name: At_Drought_Reproduction_P Parameter: Organism Value: A. thaliana
  misc_feature: MA Experiment 20001911 PARAMETER Experiment Name: At_Drought_Reproduction_P Parameter: Plant Line Value: WS
  misc_feature: MA Experiment 20001911 PARAMETER Experiment Name: At_Drought_Reproduction_P Parameter: Timepoint (day) Value: 10
  misc_feature: MA Experiment 20001911 PARAMETER Experiment Name: At_Drought_Reproduction_P Parameter: Tissue Value: Flowers
  misc_feature: MA Experiment 20001911 PARAMETER Experiment Name: At_Drought_Reproduction_P Parameter: Treatment Value: Drought vs. No Drought

SEQ ID NO: 31632 - protein, 332 aa, Arabidopsis thaliana; identical to SEQ ID NO: 27250
  peptide (1)..(332): Ceres Seq. ID no. 12739004
  misc_feature (1)..(330): Pfam Name: Sugar (and other) transporter Pfam Description: Sugar (and other) transporter
  misc_feature (1)..(330): Pfam Name: Sugar (and other) transporter Pfam Description: Sugar (and other) transporter
  misc_feature (1)..(327): Homolog of NCBI NO: 30695810 NR Description: sugar transporter, putative [Arabidopsis thaliana]
  misc_feature (1)..(29): Homolog of NCBI NO: 25409087 NR Description: probable sugar transporter [imported] -
  misc_feature (196)..(332): Homolog of NCBI NO: 25409087 NR Description: probable sugar transporter [imported] -
  misc_feature (1)..(330): Homolog of NCBI NO: 30679397 NR Description: sugar transporter family [Arabidopsis thaliana]
  misc_feature (1)..(330): Homolog of NCBI NO: 6729025 NR Description: putative sugar transporter [Arabidopsis thaliana]
  misc_feature (1)..(327): Homolog of NCBI NO: 30695810 NR Description: sugar transporter, putative [Arabidopsis thaliana]
  misc_feature (196)..(332): Homolog of NCBI NO: 25409087 NR Description: probable sugar transporter [imported] -
  misc_feature (1)..(330): Homolog of NCBI NO: 6729025 NR Description: putative sugar transporter [Arabidopsis thaliana]
  misc_feature (1)..(332): Homolog of NCBI NO: 18407508 NR Description: putative sugar transporter
  misc_feature (1)..(332): Homolog of NCBI NO: 21536914 NR Description: putative sugar transporter [Arabidopsis thaliana]
  misc_feature (1)..(331): Homolog of NCBI NO: 23504385 NR Description: putative sugar transporter [Lycopersicon
  misc_feature (1)..(330): Homolog of NCBI NO: 18419741 NR Description: sugar transporter - like protein
  misc_feature (1)..(330): Homolog of NCBI NO: 21592787 NR Description: sugar transporter-like protein [Arabidopsis
  misc_feature (1)..(330): Homolog of NCBI NO: 30679397 NR Description: sugar transporter family [Arabidopsis thaliana]
  misc_feature (1)..(29): Homolog of NCBI NO: 25409087 NR Description: probable sugar transporter [imported] -
  misc_feature (1)..(330): Homolog of NCBI NO: 21592787 NR Description: sugar transporter-like protein [Arabidopsis
  misc_feature (1)..(330): Homolog of NCBI NO: 18419741 NR Description: sugar transporter - like protein
  misc_feature (1)..(331): Homolog of NCBI NO: 23504385 NR Description: putative sugar transporter [Lycopersicon
  misc_feature (1)..(332): Homolog of NCBI NO: 21536914 NR Description: putative sugar transporter [Arabidopsis thaliana]
  misc_feature (1)..(332): Homolog of NCBI NO: 18407508 NR Description: putative sugar transporter

SEQ ID NO: 31633 - protein, 212 aa, Arabidopsis thaliana; identical to SEQ ID NO: 27251
  peptide (1)..(212): Ceres Seq. ID no. 12739005
  misc_feature (1)..(210): Pfam Name: Sugar (and other) transporter Pfam Description: Sugar (and other) transporter
  misc_feature (1)..(210): Pfam Name: Sugar (and other) transporter Pfam Description: Sugar (and other) transporter
  misc_feature (1)..(58): Homolog of NCBI NO: 25405762 NR Description: hypothetical protein T22H22.15 [imported] -
  misc_feature (1)..(207): Homolog of NCBI NO: 30695810 NR Description: sugar transporter, putative [Arabidopsis thaliana]
  misc_feature (76)..(212): Homolog of NCBI NO: 25409087 NR Description: probable sugar transporter [imported] -
  misc_feature (1)..(210): Homolog of NCBI NO: 30679397 NR Description: sugar transporter family [Arabidopsis thaliana]
  misc_feature (1)..(210): Homolog of NCBI NO: 6729025 NR Description: putative sugar transporter [Arabidopsis thaliana]
  misc_feature (1)..(58): Homolog of NCBI NO: 25405762 NR Description: hypothetical protein T22H22.15 [imported] -
  misc_feature (76)..(212): Homolog of NCBI NO: 25409087 NR Description: probable sugar transporter [imported] -
  misc_feature (1)..(210): Homolog of NCBI NO: 6729025 NR Description: putative sugar transporter [Arabidopsis thaliana]
  misc_feature (1)..(212): Homolog of NCBI NO: 18407508 NR Description: putative sugar transporter
  misc_feature (1)..(212): Homolog of NCBI NO: 21536914 NR Description: putative sugar transporter [Arabidopsis thaliana]
  misc_feature (1)..(211): Homolog of NCBI NO: 23504385 NR Description: putative sugar transporter [Lycopersicon
  misc_feature (1)..(210): Homolog of NCBI NO: 18419741 NR Description: sugar transporter - like protein
  misc_feature (1)..(210): Homolog of NCBI NO: 21592787 NR Description: sugar transporter-like protein [Arabidopsis
  misc_feature (1)..(210): Homolog of NCBI NO: 30679397 NR Description: sugar transporter family [Arabidopsis thaliana]
  misc_feature (1)..(207): Homolog of NCBI NO: 30695810 NR Description: sugar transporter, putative [Arabidopsis thaliana]
  misc_feature (1)..(210): Homolog of NCBI NO: 21592787 NR Description: sugar transporter-like protein [Arabidopsis
  misc_feature (1)..(210): Homolog of NCBI NO: 18419741 NR Description: sugar transporter - like protein
  misc_feature (1)..(211): Homolog of NCBI NO: 23504385 NR Description: putative sugar transporter [Lycopersicon
  misc_feature (1)..(212): Homolog of NCBI NO: 21536914 NR Description: putative sugar transporter [Arabidopsis thaliana]
  misc_feature (1)..(212): Homolog of NCBI NO: 18407508 NR Description: putative sugar transporter

SEQ ID NO: 31634 - protein, 193 aa, Arabidopsis thaliana; identical to SEQ ID NO: 27252
  peptide (1)..(193): Ceres Seq. ID no. 12739006
  misc_feature (1)..(191): Pfam Name: Sugar (and other) transporter Pfam Description: Sugar (and other) transporter
  misc_feature (1)..(191): Pfam Name: Sugar (and other) transporter Pfam Description: Sugar (and other) transporter
  misc_feature (1)..(39): Homolog of NCBI NO: 25405762 NR Description: hypothetical protein T22H22.15 [imported] -
  misc_feature (1)..(188): Homolog of NCBI NO: 30695810 NR Description: sugar transporter, putative [Arabidopsis thaliana]
  misc_feature (57)..(193): Homolog of NCBI NO: 25409087 NR Description: probable sugar transporter [imported] -
  misc_feature (1)..(191): Homolog of NCBI NO: 30679397 NR Description: sugar transporter family [Arabidopsis thaliana]
  misc_feature (1)..(191): Homolog of NCBI NO: 6729025 NR Description: putative sugar transporter [Arabidopsis thaliana]
  misc_feature (1)..(39): Homolog of NCBI NO: 25405762 NR Description: hypothetical protein T22H22.15 [imported] -
  misc_feature (57)..(193): Homolog of NCBI NO: 25409087 NR Description: probable sugar transporter [imported] -
  misc_feature (1)..(191): Homolog of NCBI NO: 6729025 NR Description: putative sugar transporter [Arabidopsis thaliana]
  misc_feature (1)..(193): Homolog of NCBI NO: 18407508 NR Description: putative sugar transporter
  misc_feature (1)..(193): Homolog of NCBI NO: 21536914 NR Description: putative sugar transporter [Arabidopsis thaliana]
  misc_feature (1)..(192): Homolog of NCBI NO: 23504385 NR Description: putative sugar transporter [Lycopersicon
  misc_feature (1)..(191): Homolog of NCBI NO: 18419741 NR Description: sugar transporter - like protein
  misc_feature (1)..(191): Homolog of NCBI NO: 21592787 NR Description: sugar transporter-like protein [Arabidopsis
  misc_feature (1)..(191): Homolog of NCBI NO: 30679397 NR Description: sugar transporter family [Arabidopsis thaliana]
  misc_feature (1)..(188): Homolog of NCBI NO: 30695810 NR Description: sugar transporter, putative [Arabidopsis thaliana]
  misc_feature (1)..(191): Homolog of NCBI NO: 21592787 NR Description: sugar transporter-like protein [Arabidopsis
  misc_feature (1)..(191): Homolog of NCBI NO: 18419741 NR Description: sugar transporter - like protein
  misc_feature (1)..(192): Homolog of NCBI NO: 23504385 NR Description: putative sugar transporter [Lycopersicon
  misc_feature (1)..(193): Homolog of NCBI NO: 21536914 NR Description: putative sugar transporter [Arabidopsis thaliana]
  misc_feature (1)..(193): Homolog of NCBI NO: 18407508 NR Description: putative sugar transporter

SEQ ID NO: 31635 - DNA, 1307 bp, Arabidopsis thaliana; identical to SEQ ID NO: 28045
  misc_feature (1)..(1307): Ceres Seq. ID no. 13493913
  misc_feature: MA Experiment ID: 20000307 Result: Up-regulated in Transcription
  misc_feature: MA Experiment 20000307 PARAMETER Experiment Name: At_Germinating_Seeds_Sub_P Parameter: Age (hr) Value: 24 vs. 0
  misc_feature: MA Experiment 20000307 PARAMETER Experiment Name: At_Germinating_Seeds_Sub_P Parameter: Organism Value: A. thaliana
  misc_feature: MA Experiment 20000307 PARAMETER Experiment Name: At_Germinating_Seeds_Sub_P Parameter: Plant Line Value: WS
  misc_feature: MA Experiment 20000307 PARAMETER Experiment Name: At_Germinating_Seeds_Sub_P Parameter: Tissue Value: Germinating Seeds
  misc_feature: MA Experiment ID: 20000314 Result: Up-regulated in Transcription
  misc_feature: MA Experiment 20000314 PARAMETER Experiment Name: At_14day_Shoots-Roots_Sub_P Parameter: Age (day) Value: 14
  misc_feature: MA Experiment 20000314 PARAMETER Experiment Name: At_14day_Shoots-Roots_Sub_P Parameter: Organism Value: A. thaliana
  misc_feature: MA Experiment 20000314 PARAMETER Experiment Name: At_14day_Shoots-Roots_Sub_P Parameter: Plant Line Value: WS
  misc_feature: MA Experiment 20000314 PARAMETER Experiment Name: At_14day_Shoots-Roots_Sub_P Parameter: Tissue Value: Roots vs. Whole Plant
  misc_feature: MA Experiment ID: 20000315 Result: Down-regulated in Transcription
  misc_feature: MA Experiment 20000315 PARAMETER Experiment Name: At_14day_Shoots-Roots_Sub_P Parameter: Age (day) Value: 14
  misc_feature: MA Experiment 20000315 PARAMETER Experiment Name: At_14day_Shoots-Roots_Sub_P Parameter: Organism Value: A. thaliana
  misc_feature: MA Experiment 20000315 PARAMETER Experiment Name: At_14day_Shoots-Roots_Sub_P Parameter: Plant Line Value: WS
  misc_feature: MA Experiment 20000315 PARAMETER Experiment Name: At_14day_Shoots-Roots_Sub_P Parameter: Tissue Value: Shoots vs. Whole Plant
  misc_feature: MA Experiment ID: 20000328 Result: Down-regulated in Transcription
  misc_feature: MA Experiment 20000328 PARAMETER Experiment Name: At_42deg_Heat_Sub_P Parameter: Age (day) Value: 14
  misc_feature: MA Experiment 20000328 PARAMETER Experiment Name: At_42deg_Heat_Sub_P Parameter: Organism Value: A. thaliana
  misc_feature: MA Experiment 20000328 PARAMETER Experiment Name: At_42deg_Heat_Sub_P Parameter: Plant Line Value: WS
  misc_feature: MA Experiment 20000328 PARAMETER Experiment Name: At_42deg_Heat_Sub_P Parameter: Temperature (deg C) Value: 42 vs. 22
  misc_feature: MA Experiment 20000328 PARAMETER Experiment Name: At_42deg_Heat_Sub_P Parameter: Timepoint (hr) Value: 6
  misc_feature: MA Experiment 20000328 PARAMETER Experiment Name: At_42deg_Heat_Sub_P Parameter: Tissue Value: Aerial
  misc_feature: MA Experiment ID: 20000355 Result: Down-regulated in Transcription
  misc_feature: MA Experiment 20000355 PARAMETER Experiment Name: At_Siliques_Sub_P Parameter: Age (day) Value: 21
  misc_feature: MA Experiment 20000355 PARAMETER Experiment Name: At_Siliques_Sub_P Parameter: Organism Value: A. thaliana
  misc_feature: MA Experiment 20000355 PARAMETER Experiment Name: At_Siliques_Sub_P Parameter: Plant Line Value: WS
  misc_feature: MA Experiment 20000355 PARAMETER Experiment Name: At_Siliques_Sub_P Parameter: Tissue Value: Less Than 5mm Siliques vs. Whole Plant
  misc_feature: MA Experiment ID: 20000440 Result: Down-regulated in Transcription
  misc_feature: MA Experiment 20000440 PARAMETER Experiment Name: At_Closed-Flower__Sub_P Parameter: Tissue Value: Closed Flower vs. Whole Plant

SEQ ID NO: 31636 - protein, 318 aa, Arabidopsis thaliana; identical to SEQ ID NO: 28046
  peptide (1)..(318): Ceres Seq. ID no. 13493914
  misc_feature (24)..(150): Pfam Name: No apical meristem (NAM) protein Pfam Description: No apical meristem (NAM) protein
  misc_feature (33)..(318): Homolog of NCBI NO: 21105757 NR Description: nam-like protein 14 [Petunia x hybrida]
  misc_feature (22)..(196): Homolog of NCBI NO: 21537315 NR Description: NAM, no apical meristem,-like protein
  misc_feature (14)..(196): Homolog of NCBI NO: 15240252 NR Description: NAM, no apical meristem, - like protein
  misc_feature (22)..(283): Homolog of NCBI NO: 30682054 NR Description: NAM (no apical meristem)-related protein
  misc_feature (17)..(283): Homolog of NCBI NO: 30682048 NR Description: NAM (no apical meristem)-related protein
  misc_feature (16)..(298): Homolog of NCBI NO: 21536866 NR Description: NAM / CUC2-like protein [Arabidopsis thaliana]
  misc_feature (1)..(298): Homolog of NCBI NO: 15241819 NR Description: NAM / CUC2 - like protein [Arabidopsis thaliana]
  misc_feature (1)..(318): Homolog of NCBI NO: 15228570 NR Description: hypothetical protein

SEQ ID NO: 31637 - protein, 196 aa, Arabidopsis thaliana; identical to SEQ ID NO: 28047
  peptide (1)..(196): Ceres Seq. ID no. 13493915
  misc_feature (1)..(196): Homolog of NCBI NO: 21105757 NR Description: nam-like protein 14 [Petunia x hybrida]
  misc_feature (1)..(74): Homolog of NCBI NO: 21537315 NR Description: NAM, no apical meristem,-like protein
  misc_feature (1)..(74): Homolog of NCBI NO: 15240252 NR Description: NAM, no apical meristem, - like protein
  misc_feature (1)..(161): Homolog of NCBI NO: 30682054 NR Description: NAM (no apical meristem)-related protein
  misc_feature (1)..(161): Homolog of NCBI NO: 30682048 NR Description: NAM (no apical meristem)-related protein
  misc_feature (1)..(176): Homolog of NCBI NO: 21536866 NR Description: NAM / CUC2-like protein [Arabidopsis thaliana]
  misc_feature (1)..(176): Homolog of NCBI NO: 15241819 NR Description: NAM / CUC2 - like protein [Arabidopsis thaliana]
  misc_feature (1)..(196): Homolog of NCBI NO: 15228570 NR Description: hypothetical protein

SEQ ID NO: 31638 - protein, 175 aa, Arabidopsis thaliana; identical to SEQ ID NO: 28048
  peptide (1)..(175): Ceres Seq. ID no. 13493916
  misc_feature (1)..(175): Homolog of NCBI NO: 21105757 NR Description: nam-like protein 14 [Petunia x hybrida]
  misc_feature (1)..(53): Homolog of NCBI NO: 21537315 NR Description: NAM, no apical meristem,-like protein
  misc_feature (1)..(53): Homolog of NCBI NO: 15240252 NR Description: NAM, no apical meristem, - like protein
  misc_feature (1)..(140): Homolog of NCBI NO: 30682054 NR Description: NAM (no apical meristem)-related protein
  misc_feature (1)..(140): Homolog of NCBI NO: 30682048 NR Description: NAM (no apical meristem)-related protein
  misc_feature (1)..(155): Homolog of NCBI NO: 21536866 NR Description: NAM / CUC2-like protein [Arabidopsis thaliana]
  misc_feature (1)..(155): Homolog of NCBI NO: 15241819 NR Description: NAM / CUC2 - like protein [Arabidopsis thaliana]
  misc_feature (1)..(175): Homolog of NCBI NO: 15228570 NR Description: hypothetical protein

SEQ ID NO: 31639 - DNA, 1023 bp, Arabidopsis thaliana; identical to SEQ ID NO: 28049
  misc_feature (1)..(1023): Ceres Seq. ID no. 12334086
  misc_feature: MA Experiment ID: 20000179 Result: Down-regulated in Transcription
  misc_feature: MA Experiment 20000179 PARAMETER Experiment Name: At_Germinating_Seeds_P Parameter: Age (hr) Value: 6 vs. 0
  misc_feature: MA Experiment 20000179 PARAMETER Experiment Name: At_Germinating_Seeds_P Parameter: Tissue Value: Germinating Seeds
  misc_feature: MA Experiment ID: 20000234 Result: Up-regulated in Transcription
  misc_feature: MA Experiment 20000234 PARAMETER Experiment Name: At_Siliques_P Parameter: Age (day) Value: 21
  misc_feature: MA Experiment 20000234 PARAMETER Experiment Name: At_Siliques_P Parameter: Organism Value: A. thaliana
  misc_feature: MA Experiment 20000234 PARAMETER Experiment Name: At_Siliques_P Parameter: Plant Line Value: WS
  misc_feature: MA Experiment 20000234 PARAMETER Experiment Name: At_Siliques_P Parameter: Tissue Value: Less Than 5mm Siliques vs. Whole Plant
  misc_feature: MA Experiment ID: 20001560 Result: Up-regulated in Transcription
  misc_feature: MA Experiment 20001560 PARAMETER Experiment Name: At_Drought_Soil_Dry_P Parameter: Age (day) Value: 28
  misc_feature: MA Experiment 20001560 PARAMETER Experiment Name: At_Drought_Soil_Dry_P Parameter: Organism Value: A. thaliana
  misc_feature: MA Experiment 20001560 PARAMETER Experiment Name: At_Drought_Soil_Dry_P Parameter: Plant Line Value: WS
  misc_feature: MA Experiment 20001560 PARAMETER Experiment Name: At_Drought_Soil_Dry_P Parameter: Post Timepoint (hr) Value: None
  misc_feature: MA Experiment 20001560 PARAMETER Experiment Name: At_Drought_Soil_Dry_P Parameter: Post-Treatment Value: None
  misc_feature: MA Experiment 20001560 PARAMETER Experiment Name: At_Drought_Soil_Dry_P Parameter: Timepoint (day) Value: 14
  misc_feature: MA Experiment 20001560 PARAMETER Experiment Name: At_Drought_Soil_Dry_P Parameter: Treatment Value: Drought vs. No Drought

SEQ ID NO: 31640 - protein, 289 aa, Arabidopsis thaliana; identical to SEQ ID NO: 28050
  peptide (1)..(289): Ceres Seq. ID no. 12334087
  misc_feature (71)..(256): Pfam Name: Proteasome A-type and B-type Pfam Description: Proteasome A-type and B-type
  misc_feature (173)..(289): Homolog of NCBI NO: 40743696 NR Description: hypothetical protein AN5793.2 [Aspergillus
  misc_feature (41)..(184): Homolog of NCBI NO: 40743696 NR Description: hypothetical protein AN5793.2 [Aspergillus
  misc_feature (41)..(287): Homolog of NCBI NO: 20810439 NR Description: proteasome (prosome, macropain) subunit, alpha
  misc_feature (41)..(287): Homolog of NCBI NO: 8394066 NR Description: proteasome (prosome, macropain) subunit, alpha
  misc_feature (43)..(285): Homolog of NCBI NO: 3914413 NR Description: Proteasome subunit alpha type 3
  misc_feature (41)..(289): Homolog of NCBI NO: 34909168 NR Description: proteasome subunit alpha type 3
  misc_feature (41)..(289): Homolog of NCBI NO: 14594925 NR Description: putative alpha7 proteasome subunit [Nicotiana
  misc_feature (41)..(289): Homolog of NCBI NO: 3914431 NR Description: Proteasome subunit alpha type 3 (20S proteasome subunit G) (20S proteasome subunit alpha-7) (Proteasome component
  misc_feature (41)..(289): Homolog of NCBI NO: 2511592 NR Description: multicatalytic endopeptidase complex, proteasome
  misc_feature (41)..(289): Homolog of NCBI NO: 15225839 NR Description: 20S proteasome alpha subunit G (PAG1)

SEQ ID NO: 31641 - protein, 249 aa, Arabidopsis thaliana; identical to SEQ ID NO: 28051
  peptide (1)..(249): Ceres Seq. ID no. 12334088
  misc_feature (31)..(216): Pfam Name: Proteasome A-type and B-type Pfam Description: Proteasome A-type and B-type
  misc_feature (133)..(249): Homolog of NCBI NO: 40743696 NR Description: hypothetical protein AN5793.2 [Aspergillus
  misc_feature (1)..(144): Homolog of NCBI NO: 40743696 NR Description: hypothetical protein AN5793.2 [Aspergillus
  misc_feature (1)..(247): Homolog of NCBI NO: 20810439 NR Description: proteasome (prosome, macropain) subunit, alpha
  misc_feature (1)..(247): Homolog of NCBI NO: 8394066 NR Description: proteasome (prosome, macropain) subunit, alpha
  misc_feature (3)..(245): Homolog of NCBI NO: 3914413 NR Description: Proteasome subunit alpha type 3
  misc_feature (1)..(249): Homolog of NCBI NO: 34909168 NR Description: proteasome subunit alpha type 3
  misc_feature (1)..(249): Homolog of NCBI NO: 14594925 NR Description: putative alpha7 proteasome subunit [Nicotiana
  misc_feature (1)..(249): Homolog of NCBI NO: 3914431 NR Description: Proteasome subunit alpha type 3 (20S proteasome subunit G) (20S proteasome subunit alpha-7) (Proteasome component
  misc_feature (1)..(249): Homolog of NCBI NO: 2511592 NR Description: multicatalytic endopeptidase complex, proteasome
  misc_feature (1)..(249): Homolog of NCBI NO: 15225839 NR Description: 20S proteasome alpha subunit G (PAG1)

SEQ ID NO: 31642 - protein, 202 aa, Arabidopsis thaliana; identical to SEQ ID NO: 28052
  peptide (1)..(202): Ceres Seq. ID no. 12334089
  misc_feature (1)..(169): Pfam Name: Proteasome A-type and B-type Pfam Description: Proteasome A-type and B-type
  misc_feature (86)..(202): Homolog of NCBI NO: 40743696 NR Description: hypothetical protein AN5793.2 [Aspergillus
  misc_feature (1)..(97): Homolog of NCBI NO: 40743696 NR Description: hypothetical protein AN5793.2 [Aspergillus
  misc_feature (1)..(200): Homolog of NCBI NO: 20810439 NR Description: proteasome (prosome, macropain) subunit, alpha
  misc_feature (1)..(200): Homolog of NCBI NO: 8394066 NR Description: proteasome (prosome, macropain) subunit, alpha
  misc_feature (1)..(198): Homolog of NCBI NO: 3914413 NR Description: Proteasome subunit alpha type 3
  misc_feature (1)..(202): Homolog of NCBI NO: 34909168 NR Description: proteasome subunit alpha type 3
  misc_feature (1)..(202): Homolog of NCBI NO: 14594925 NR Description: putative alpha7 proteasome subunit [Nicotiana
  misc_feature (1)..(202): Homolog of NCBI NO: 3914431 NR Description: Proteasome subunit alpha type 3 (20S proteasome subunit G) (20S proteasome subunit alpha-7) (Proteasome component
  misc_feature (1)..(202): Homolog of NCBI NO: 2511592 NR Description: multicatalytic endopeptidase complex, proteasome
  misc_feature (1)..(202): Homolog of NCBI NO: 15225839 NR Description: 20S proteasome alpha subunit G (PAG1)

SEQ ID NO: 31643 - DNA, 817 bp, Arabidopsis thaliana; identical to SEQ ID NO: 28053
  misc_feature (1)..(817): Ceres Seq. ID no. 12331774
  misc_feature: MA Experiment ID: 108434 Result: Up-regulated in Transcription
  misc_feature: MA Experiment 108434 PARAMETER Experiment Name: At_Root_Tips_cDNA_P Parameter: Tissue Value: Root Tips
  misc_feature: MA Experiment ID: 108463 Result: Down-regulated in Transcription
  misc_feature: MA Experiment 108463 PARAMETER Experiment Name: At_Germinating_Seeds_cDNA_P Parameter: Age (day) Value: 3 vs. 0
  misc_feature: MA Experiment 108463 PARAMETER Experiment Name: At_Germinating_Seeds_cDNA_P Parameter: Tissue Value: Germinating Seeds
  misc_feature: MA Experiment ID: 108464 Result: Down-regulated in Transcription
  misc_feature: MA Experiment 108464 PARAMETER Experiment Name: At_Germinating_Seeds_cDNA_P Parameter: Age (day) Value: 4 vs. 0
  misc_feature: MA Experiment 108464 PARAMETER Experiment Name: At_Germinating_Seeds_cDNA_P Parameter: Tissue Value: Germinating Seeds
  misc_feature: MA Experiment ID: 108573 Result: Down-regulated in Transcription
  misc_feature: MA Experiment 108573 PARAMETER Experiment Name: At_Drought_cDNA_P Parameter: Timepoint (hr) Value: 6
  misc_feature: MA Experiment 108573 PARAMETER Experiment Name: At_Drought_cDNA_P Parameter: Tissue Value: Aerial
  misc_feature: MA Experiment 108573 PARAMETER Experiment Name: At_Drought_cDNA_P Parameter: Treatment Value: Drought vs. No Drought
  misc_feature: MA Experiment ID: 108595 Result: Down-regulated in Transcription
  misc_feature: MA Experiment 108595 PARAMETER Experiment Name: At_Ler-pi_Ovule_cDNA_P Parameter: Plant Line Value: null
  misc_feature: MA Experiment ID: 20000071 Result: Down-regulated in Transcription
  misc_feature: MA Experiment 20000071 PARAMETER Experiment Name: At_100uM_ABA_Mutants_cDNA_P Parameter: Plant Line Value: CS8104
  misc_feature: MA Experiment 20000071 PARAMETER Experiment Name: At_100uM_ABA_Mutants_cDNA_P Parameter: Timepoint (hr) Value: 6
  misc_feature: MA Experiment 20000071 PARAMETER Experiment Name: At_100uM_ABA_Mutants_cDNA_P Parameter: Tissue Value: Aerial
  misc_feature: MA Experiment 20000071 PARAMETER Experiment Name: At_100uM_ABA_Mutants_cDNA_P Parameter: Treatment Value: 100uM ABA vs. No Treatment
  misc_feature: MA Experiment ID: 20001451 Result: Down-regulated in Transcription
  misc_feature: MA Experiment 20001451 PARAMETER Experiment Name: At_Far-red-induction_P Parameter: Age (day) Value: 7
  misc_feature: MA Experiment 20001451 PARAMETER Experiment Name: At_Far-red-induction_P Parameter: Light Value: Far-red vs. White
  misc_feature: MA Experiment 20001451 PARAMETER Experiment Name: At_Far-red-induction_P Parameter: Organism Value: A. thaliana
  misc_feature: MA Experiment 20001451 PARAMETER Experiment Name: At_Far-red-induction_P Parameter: Plant Line Value: Columbia
  misc_feature: MA Experiment 20001451 PARAMETER Experiment Name: At_Far-red-induction_P Parameter: Timepoint (hr) Value: 24
  misc_feature: MA Experiment 20001451 PARAMETER Experiment Name: At_Far-red-induction_P Parameter: Tissue Value: Whole Plant

SEQ ID NO: 31644 - protein, 209 aa, Arabidopsis thaliana; identical to SEQ ID NO: 28054
  peptide (1)..(209): Ceres Seq. ID no. 12331775
  misc_feature (19)..(195): Pfam Name: Ham1 family Pfam Description: Ham1 family
  misc_feature (17)..(111): Homolog of NCBI NO: 7510722 NR Description: hypothetical protein ZC395.7 - Caenorhabditis
  misc_feature (17)..(197): Homolog of NCBI NO: 39586542 NR Description: Hypothetical protein CBG21178 [Caenorhabditis
  misc_feature (11)..(195): Homolog of NCBI NO: 15626999 NR Description: inosine triphosphatase; Inosine triphosphatase-A
  misc_feature (11)..(195): Homolog of NCBI NO: 13398328 NR Description: inosine triphosphate pyrophosphatase [Homo
  misc_feature (11)..(195): Homolog of NCBI NO: 27732417 NR Description: similar to inosine triphosphatase; Inosine
  misc_feature (15)..(197): Homolog of NCBI NO: 19920712 NR Description: CG8891-PA [Drosophila melanogaster]
  misc_feature (4)..(205): Homolog of NCBI NO: 37535020 NR Description: putative HAM-1-like protein
  misc_feature (4)..(66): Homolog of NCBI NO: 7485688 NR Description: hypothetical protein F18A5.110 - Arabidopsis
  misc_feature (47)..(209): Homolog of NCBI NO: 7485688 NR Description: hypothetical protein F18A5.110 - Arabidopsis
  misc_feature (4)..(209): Homolog of NCBI NO: 18414065 NR Description: auxin-regulated protein

SEQ ID NO: 31645 - protein, 206 aa, Arabidopsis thaliana; identical to SEQ ID NO: 28055
  peptide (1)..(206): Ceres Seq. ID no. 12331776
  misc_feature (16)..(192): Pfam Name: Ham1 family Pfam Description: Ham1 family
  misc_feature (14)..(108): Homolog of NCBI NO: 7510722 NR Description: hypothetical protein ZC395.7 - Caenorhabditis
  misc_feature (14)..(194): Homolog of NCBI NO: 39586542 NR Description: Hypothetical protein CBG21178 [Caenorhabditis
  misc_feature (8)..(192): Homolog of NCBI NO: 15626999 NR Description: inosine triphosphatase; Inosine triphosphatase-A
  misc_feature (8)..(192): Homolog of NCBI NO: 13398328 NR Description: inosine triphosphate pyrophosphatase [Homo
  misc_feature (8)..(192): Homolog of NCBI NO: 27732417 NR Description: similar to inosine triphosphatase; Inosine
  misc_feature (12)..(194): Homolog of NCBI NO: 19920712 NR Description: CG8891-PA [Drosophila melanogaster]
  misc_feature (1)..(202): Homolog of NCBI NO: 37535020 NR Description: putative HAM-1-like protein
  misc_feature (1)..(63): Homolog of NCBI NO: 7485688 NR Description: hypothetical protein F18A5.110 - Arabidopsis
  misc_feature (44)..(206): Homolog of NCBI NO: 7485688 NR Description: hypothetical protein F18A5.110 - Arabidopsis
  misc_feature (1)..(206): Homolog of NCBI NO: 18414065 NR Description: auxin-regulated protein

SEQ ID NO: 31646 - DNA, 719 bp, Arabidopsis thaliana; identical to SEQ ID NO: 28056
  misc_feature (1)..(719): Ceres Seq. ID no. 13489970
  misc_feature: MA Experiment ID: 20000179 Result: Up-regulated in Transcription
  misc_feature: MA Experiment 20000179 PARAMETER Experiment Name: At_Germinating_Seeds_P Parameter: Age (hr) Value: 6 vs. 0
  misc_feature: MA Experiment 20000179 PARAMETER Experiment Name: At_Germinating_Seeds_P Parameter: Tissue Value: Germinating Seeds
  misc_feature: MA Experiment ID: 20000234 Result: Up-regulated in Transcription
  misc_feature: MA Experiment 20000234 PARAMETER Experiment Name: At_Siliques_P Parameter: Age (day) Value: 21
  misc_feature: MA Experiment 20000234 PARAMETER Experiment Name: At_Siliques_P Parameter: Organism Value: A. thaliana
  misc_feature: MA Experiment 20000234 PARAMETER Experiment Name: At_Siliques_P Parameter: Plant Line Value: WS
  misc_feature: MA Experiment 20000234 PARAMETER Experiment Name: At_Siliques_P Parameter: Tissue Value: Less Than 5mm Siliques vs. Whole Plant
  misc_feature: MA Experiment ID: 20000235 Result: Up-regulated in Transcription
  misc_feature: MA Experiment 20000235 PARAMETER Experiment Name: At_Siliques_P Parameter: Age (day) Value: 21
  misc_feature: MA Experiment 20000235 PARAMETER Experiment Name: At_Siliques_P Parameter: Organism Value: A. thaliana
  misc_feature: MA Experiment 20000235 PARAMETER Experiment Name: At_Siliques_P Parameter: Plant Line Value: WS
  misc_feature: MA Experiment 20000235 PARAMETER Experiment Name: At_Siliques_P Parameter: Tissue Value: 5-10mm Siliques vs. Whole Plant
  misc_feature: MA Experiment ID: 20000265 Result: Up-regulated in Transcription
  misc_feature: MA Experiment 20000265 PARAMETER Experiment Name: At_Open_Flower_P Parameter: Age (day) Value: 21
  misc_feature: MA Experiment 20000265 PARAMETER Experiment Name: At_Open_Flower_P Parameter: Plant Line Value: WS
  misc_feature: MA Experiment 20000265 PARAMETER Experiment Name: At_Open_Flower_P Parameter: Tissue Value: Closed Flower vs. Whole Plant
  misc_feature: MA Experiment ID: 20000286 Result: Up-regulated in Transcription
  misc_feature: MA Experiment 20000286 PARAMETER Experiment Name: At_Open_Flower_P Parameter: Age (day) Value: 21
  misc_feature: MA Experiment 20000286 PARAMETER Experiment Name: At_Open_Flower_P Parameter: Plant Line Value: WS
  misc_feature: MA Experiment 20000286 PARAMETER Experiment Name: At_Open_Flower_P Parameter: Tissue Value: Half Open vs. Whole Plant
  misc_feature: MA Experiment ID: 20001248 Result: Down-regulated in Transcription
  misc_feature: MA Experiment 20001248 PARAMETER Experiment Name: At_Far-red-induction_P Parameter: Age (day) Value: 7
  misc_feature: MA Experiment 20001248 PARAMETER Experiment Name: At_Far-red-induction_P Parameter: Light Value: Far-red vs. White
  misc_feature: MA Experiment 20001248 PARAMETER Experiment Name: At_Far-red-induction_P Parameter: Organism Value: A. thaliana
  misc_feature: MA Experiment 20001248 PARAMETER Experiment Name: At_Far-red-induction_P Parameter: Plant Line Value: Columbia
  misc_feature: MA Experiment 20001248 PARAMETER Experiment Name: At_Far-red-induction_P Parameter: Timepoint (hr) Value: 4
  misc_feature: MA Experiment 20001248 PARAMETER Experiment Name: At_Far-red-induction_P Parameter: Tissue Value: Whole Plant
  misc_feature: MA Experiment ID: 20001911 Result: Down-regulated in Transcription
  misc_feature: MA Experiment 20001911 PARAMETER Experiment Name: At_Drought_Reproduction_P Parameter: Age (day) Value: 40
  misc_feature: MA Experiment 20001911 PARAMETER Experiment Name: At_Drought_Reproduction_P Parameter: Organism Value: A. thaliana
  misc_feature: MA Experiment 20001911 PARAMETER Experiment Name: At_Drought_Reproduction_P Parameter: Plant Line Value: WS
  misc_feature: MA Experiment 20001911 PARAMETER Experiment Name: At_Drought_Reproduction_P Parameter: Timepoint (day) Value: 10
  misc_feature: MA Experiment 20001911 PARAMETER Experiment Name: At_Drought_Reproduction_P Parameter: Tissue Value: Flowers
  misc_feature: MA Experiment 20001911 PARAMETER Experiment Name: At_Drought_Reproduction_P Parameter: Treatment Value: Drought vs. No Drought

SEQ ID NO: 31647 - protein, 188 aa, Arabidopsis thaliana; identical to SEQ ID NO: 28057
  peptide (1)..(188): Ceres Seq. ID no. 13489971
  misc_feature (22)..(177): Homolog of NCBI NO: 34904288 NR Description: unnamed protein product [Oryza sativa (japonica
  misc_feature (73)..(181): Homolog of NCBI NO: 27685797 NR Description: similar to RIKEN cDNA 0610006O17
  misc_feature (36)..(188): Homolog of NCBI NO: 25408036 NR Description: hypothetical protein At2g29590 [imported] -
  misc_feature (36)..(188): Homolog of NCBI NO: 18402093 NR Description: thioesterase-related [Arabidopsis thaliana]
  misc_feature (73)..(181): Homolog of NCBI NO: 13385260 NR Description: thioesterase superfamily member 2 [Mus musculus]
  misc_feature (49)..(181): Homolog of NCBI NO: 8923812 NR Description: thioesterase superfamily member 2
  misc_feature (99)..(188): Homolog of NCBI NO: 20161439 NR Description: B1065E10.13 [Oryza sativa (japonica
  misc_feature (34)..(188): Homolog of NCBI NO: 21740488 NR Description: OSJNBa0006B20.3 [Oryza sativa (japonica
  misc_feature (34)..(187): Homolog of NCBI NO: 13605902 NR Description: At1g04290/F19P19_27 [Arabidopsis thaliana]
  misc_feature (34)..(188): Homolog of NCBI NO: 18379308 NR Description: thioesterase-related [Arabidopsis thaliana]

SEQ ID NO: 31648 - protein, 155 aa, Arabidopsis thaliana; identical to SEQ ID NO: 28058
  peptide (1)..(155): Ceres Seq. ID no. 13489972
  misc_feature (1)..(144): Homolog of NCBI NO: 34904288 NR Description: unnamed protein product [Oryza sativa (japonica
  misc_feature (40)..(148): Homolog of NCBI NO: 27685797 NR Description: similar to RIKEN cDNA 0610006O17
  misc_feature (3)..(155): Homolog of NCBI NO: 25408036 NR Description: hypothetical protein At2g29590 [imported] -
  misc_feature (3)..(155): Homolog of NCBI NO: 18402093 NR Description: thioesterase-related [Arabidopsis thaliana]
  misc_feature (40)..(148): Homolog of NCBI NO: 13385260 NR Description: thioesterase superfamily member 2 [Mus musculus]
  misc_feature (16)..(148): Homolog of NCBI NO: 8923812 NR Description: thioesterase superfamily member 2
  misc_feature (66)..(155): Homolog of NCBI NO: 20161439 NR Description: B1065E10.13 [Oryza sativa (japonica
  misc_feature (1)..(155): Homolog of NCBI NO: 21740488 NR Description: OSJNBa0006B20.3 [Oryza sativa (japonica
  misc_feature (1)..(154): Homolog of NCBI NO: 13605902 NR Description: At1g04290/F19P19_27 [Arabidopsis thaliana]
  misc_feature (1)..(155): Homolog of NCBI NO: 18379308 NR Description: thioesterase-related [Arabidopsis thaliana]

SEQ ID NO: 31649 - protein, 134 aa, Arabidopsis thaliana; identical to SEQ ID NO: 28059
  peptide (1)..(134): Ceres Seq. ID no. 13489973
  misc_feature (1)..(123): Homolog of NCBI NO: 34904288 NR Description: unnamed protein product [Oryza sativa (japonica
  misc_feature (19)..(127): Homolog of NCBI NO: 27685797 NR Description: similar to RIKEN cDNA 0610006O17
  misc_feature (1)..(134): Homolog of NCBI NO: 25408036 NR Description: hypothetical protein At2g29590 [imported] -
  misc_feature (1)..(134): Homolog of NCBI NO: 18402093 NR Description: thioesterase-related [Arabidopsis thaliana]
  misc_feature (19)..(127): Homolog of NCBI NO: 13385260 NR Description: thioesterase superfamily member 2 [Mus musculus]
  misc_feature (1)..(127): Homolog of NCBI NO: 8923812 NR Description: thioesterase superfamily member 2
  misc_feature (45)..(134): Homolog of NCBI NO: 20161439 NR Description: B1065E10.13 [Oryza sativa (japonica
  misc_feature (1)..(134): Homolog of NCBI NO: 21740488 NR Description: OSJNBa0006B20.3 [Oryza sativa (japonica
  misc_feature (1)..(133): Homolog of NCBI NO: 13605902 NR Description: At1g04290/F19P19_27 [Arabidopsis thaliana]
  misc_feature (1)..(134): Homolog of NCBI NO: 18379308 NR Description: thioesterase-related [Arabidopsis thaliana]

SEQ ID NO: 31650 - DNA, 665 bp, Arabidopsis thaliana; identical to SEQ ID NO: 28060
  misc_feature (1)..(665): Ceres Seq. ID no. 12420732
  misc_feature: MA Experiment ID: 108434 Result: Up-regulated in Transcription
  misc_feature: MA Experiment 108434 PARAMETER Experiment Name: At_Root_Tips_cDNA_P Parameter: Tissue Value: Root Tips
  misc_feature: MA Experiment ID: 108461 Result: Up-regulated in Transcription
  misc_feature: MA Experiment 108461 PARAMETER Experiment Name: At_Germinating_Seeds_cDNA_P Parameter: Age (day) Value: 1 vs. 0
  misc_feature: MA Experiment 108461 PARAMETER Experiment Name: At_Germinating_Seeds_cDNA_P Parameter: Tissue Value: Germinating Seeds
  misc_feature: MA Experiment ID: 108462 Result: Up-regulated in Transcription
  misc_feature: MA Experiment 108462 PARAMETER Experiment Name: At_Germinating_Seeds_cDNA_P Parameter: Age (day) Value: 2 vs. 0
  misc_feature: MA Experiment 108462 PARAMETER Experiment Name: At_Germinating_Seeds_cDNA_P Parameter: Tissue Value: Germinating Seeds
  misc_feature: MA Experiment ID: 108464 Result: Up-regulated in Transcription
  misc_feature: MA Experiment 108464 PARAMETER Experiment Name: At_Germinating_Seeds_cDNA_P Parameter: Age (day) Value: 4 vs. 0
  misc_feature: MA Experiment 108464 PARAMETER Experiment Name: At_Germinating_Seeds_cDNA_P Parameter: Tissue Value: Germinating Seeds
  misc_feature: MA Experiment ID: 108595 Result: Down-regulated in Transcription
  misc_feature: MA Experiment 108595 PARAMETER Experiment Name: At_Ler-pi_Ovule_cDNA_P Parameter: Plant Line Value: null
  misc_feature: MA Experiment ID: 20000224 Result: Down-regulated in Transcription
  misc_feature: MA Experiment ID: 20000306 Result: Up-regulated in Transcription
  misc_feature: MA Experiment 20000306 PARAMETER Experiment Name: At_Germinating_Seeds_Sub_P Parameter: Age (hr) Value: 6 vs. 0
  misc_feature: MA Experiment 20000306 PARAMETER Experiment Name: At_Germinating_Seeds_Sub_P Parameter: Organism Value: A. thaliana
  misc_feature: MA Experiment 20000306 PARAMETER Experiment Name: At_Germinating_Seeds_Sub_P Parameter: Plant Line Value: WS
  misc_feature: MA Experiment 20000306 PARAMETER Experiment Name: At_Germinating_Seeds_Sub_P Parameter: Tissue Value: Germinating Seeds
  misc_feature: MA Experiment ID: 20000307 Result: Up-regulated in Transcription
  misc_feature: MA Experiment 20000307 PARAMETER Experiment Name: At_Germinating_Seeds_Sub_P Parameter: Age (hr) Value: 24 vs. 0
  misc_feature: MA Experiment 20000307 PARAMETER Experiment Name: At_Germinating_Seeds_Sub_P Parameter: Organism Value: A. thaliana
  misc_feature: MA Experiment 20000307 PARAMETER Experiment Name: At_Germinating_Seeds_Sub_P Parameter: Plant Line Value: WS
  misc_feature: MA Experiment 20000307 PARAMETER Experiment Name: At_Germinating_Seeds_Sub_P Parameter: Tissue Value: Germinating Seeds

SEQ ID NO: 31651 - protein, 162 aa, Arabidopsis thaliana; identical to SEQ ID NO: 28061
  peptide (1)..(162): Ceres Seq. ID no. 12420733
  misc_feature (1)..(162): Homolog of NCBI NO: 18400762 NR Description: expressed protein
  misc_feature (24)..(161): Homolog of NCBI NO: 10176975 NR Description: protein; similar to unknown protein [Arabidopsis
  misc_feature (1)..(161): Homolog of NCBI NO: 22326856 NR Description: putative protein
  misc_feature (1)..(161): Homolog of NCBI NO: 17065406 NR Description: Unknown protein [Arabidopsis thaliana]
  misc_feature (1)..(162): Homolog of NCBI NO: 15233017 NR Description: unknown protein; protein id: At3g02900.1

SEQ ID NO: 31652 - DNA, 743 bp, Arabidopsis thaliana; identical to SEQ ID NO: 28062
  misc_feature (1)..(743): Ceres Seq. ID no. 12384626
  misc_feature: MA Experiment ID: 108434 Result: Down-regulated in Transcription
  misc_feature: MA Experiment 108434 PARAMETER Experiment Name: At_Root_Tips_cDNA_P Parameter: Tissue Value: Root Tips
  misc_feature: MA Experiment ID: 108488 Result: Down-regulated in Transcription
  misc_feature: MA Experiment ID: 108573 Result: Up-regulated in Transcription
  misc_feature: MA Experiment 108573 PARAMETER Experiment Name: At_Drought_cDNA_P Parameter: Timepoint (hr) Value: 6
  misc_feature: MA Experiment 108573 PARAMETER Experiment Name: At_Drought_cDNA_P Parameter: Tissue Value: Aerial
  misc_feature: MA Experiment 108573 PARAMETER Experiment Name: At_Drought_cDNA_P Parameter: Treatment Value: Drought vs. No Drought
  misc_feature: MA Experiment ID: 108668 Result: Up-regulated in Transcription
  misc_feature: MA Experiment 108668 PARAMETER Experiment Name: At_2mM_SA_cDNA_P Parameter: Plant Line Value: WS
  misc_feature: MA Experiment 108668 PARAMETER Experiment Name: At_2mM_SA_cDNA_P Parameter: Timepoint (hr) Value: 6
  misc_feature: MA Experiment 108668 PARAMETER Experiment Name: At_2mM_SA_cDNA_P Parameter: Treatment Value: 2mM SA vs. No Treatment
  misc_feature: MA Experiment ID: 20000113 Result: Up-regulated in Transcription
  misc_feature: MA Experiment 20000113 PARAMETER Experiment Name: At_42deg_Heat_cDNA_P Parameter: Temperature (deg C) Value: 42 vs. 22
  misc_feature: MA Experiment 20000113 PARAMETER Experiment Name: At_42deg_Heat_cDNA_P Parameter: Timepoint (hr) Value: 8
  misc_feature: MA Experiment 20000113 PARAMETER Experiment Name: At_42deg_Heat_cDNA_P Parameter: Tissue Value: Aerial
  misc_feature: MA Experiment ID: 20000173 Result: Up-regulated in Transcription
  misc_feature: MA Experiment 20000173 PARAMETER Experiment Name: At_42deg_Heat_P Parameter: Age (day) Value: 14
  misc_feature: MA Experiment 20000173 PARAMETER Experiment Name: At_42deg_Heat_P Parameter: Organism Value: A. thaliana
  misc_feature: MA Experiment 20000173 PARAMETER Experiment Name: At_42deg_Heat_P Parameter: Plant Line Value: WS
  misc_feature: MA Experiment 20000173 PARAMETER Experiment Name: At_42deg_Heat_P Parameter: Temperature (deg C) Value: 42 vs. 22
  misc_feature: MA Experiment 20000173 PARAMETER Experiment Name: At_42deg_Heat_P Parameter: Timepoint (hr) Value: 6
  misc_feature: MA Experiment 20000173 PARAMETER Experiment Name: At_42deg_Heat_P Parameter: Tissue Value: Aerial
  misc_feature: MA Experiment ID: 20000180 Result: Up-regulated in Transcription
  misc_feature: MA Experiment 20000180 PARAMETER Experiment Name: At_Germinating_Seeds_P Parameter: Age (hr) Value: 24 vs. 0
  misc_feature: MA Experiment 20000180 PARAMETER Experiment Name: At_Germinating_Seeds_P Parameter: Tissue Value: Germinating Seeds
  misc_feature: MA Experiment ID: 20000185 Result: Down-regulated in Transcription
  misc_feature: MA Experiment 20000185 PARAMETER Experiment Name: At_Roots__P Parameter: Age (day) Value: 7 vs. 21
  misc_feature: MA Experiment 20000185 PARAMETER Experiment Name: At_Roots__P Parameter: Organism Value: A. thaliana
  misc_feature: MA Experiment 20000185 PARAMETER Experiment Name: At_Roots__P Parameter: Tissue Value: Roots vs. Whole Plant
  misc_feature: MA Experiment ID: 20000234 Result: Down-regulated in Transcription
  misc_feature: MA Experiment 20000234 PARAMETER Experiment Name: At_Siliques_P Parameter: Age (day) Value: 21
  misc_feature: MA Experiment 20000234 PARAMETER Experiment Name: At_Siliques_P Parameter: Organism Value: A. thaliana
  misc_feature: MA Experiment 20000234 PARAMETER Experiment Name: At_Siliques_P Parameter: Plant Line Value: WS
  misc_feature: MA Experiment 20000234 PARAMETER Experiment Name: At_Siliques_P Parameter: Tissue Value: Less Than 5mm Siliques vs. Whole Plant
  misc_feature: MA Experiment ID: 20000437 Result: Up-regulated in Transcription
  misc_feature: MA Experiment 20000437 PARAMETER Experiment Name: At_Drought_P Parameter: Age (day) Value: 8
  misc_feature: MA Experiment 20000437 PARAMETER Experiment Name: At_Drought_P Parameter: Organism Value: A. thaliana
  misc_feature: MA Experiment 20000437 PARAMETER Experiment Name: At_Drought_P Parameter: Plant Line Value: WS
  misc_feature: MA Experiment 20000437 PARAMETER Experiment Name: At_Drought_P Parameter: Timepoint (hr) Value: 24
  misc_feature: MA Experiment 20000437 PARAMETER Experiment Name: At_Drought_P Parameter: Tissue Value: Whole Plant
  misc_feature: MA Experiment 20000437 PARAMETER Experiment Name: At_Drought_P Parameter: Treatment Value: Drought vs. No Drought
  misc_feature: MA Experiment ID: 20000438 Result: Down-regulated in Transcription
  misc_feature: MA Experiment 20000438 PARAMETER Experiment Name: At_Shoots__P Parameter: Age (day) Value: 14
  misc_feature: MA Experiment 20000438 PARAMETER Experiment Name: At_Shoots__P Parameter: Tissue Value: Shoots vs. Whole Plant
  misc_feature: MA Experiment ID: 20000439 Result: Down-regulated in Transcription
  misc_feature: MA Experiment 20000439 PARAMETER Experiment Name: At_Roots__P Parameter: Age (day) Value: 14 vs. 21
  misc_feature: MA Experiment 20000439 PARAMETER Experiment Name: At_Roots__P Parameter: Organism Value: A. thaliana
  misc_feature: MA Experiment 20000439 PARAMETER Experiment Name: At_Roots__P Parameter: Tissue Value: Roots vs. Whole Plant
  misc_feature: MA Experiment ID: 20000794 Result: Up-regulated in Transcription
  misc_feature: MA Experiment 20000794 PARAMETER Experiment Name: At_Petals_P Parameter: Age (day) Value: 23-25 days
  misc_feature: MA Experiment 20000794 PARAMETER Experiment Name: At_Petals_P Parameter: Plant Line Value: WS
  misc_feature: MA Experiment 20000794 PARAMETER Experiment Name: At_Petals_P Parameter: Tissue Value: Petals vs. Whole plant
  misc_feature: MA Experiment ID: 20001558 Result: Down-regulated in Transcription
  misc_feature: MA Experiment 20001558 PARAMETER Experiment Name: At_Drought_Soil_Dry_P Parameter: Age (day) Value: 27
  misc_feature: MA Experiment 20001558 PARAMETER Experiment Name: At_Drought_Soil_Dry_P Parameter: Organism Value: A. thaliana
  misc_feature: MA Experiment 20001558 PARAMETER Experiment Name: At_Drought_Soil_Dry_P Parameter: Plant Line Value: WS
  misc_feature: MA Experiment 20001558 PARAMETER Experiment Name: At_Drought_Soil_Dry_P Parameter: Post Timepoint (hr) Value: 6
  misc_feature: MA Experiment 20001558 PARAMETER Experiment Name: At_Drought_Soil_Dry_P Parameter: Post-Treatment Value: Re-Water vs. No Drought
  misc_feature: MA Experiment 20001558 PARAMETER Experiment Name: At_Drought_Soil_Dry_P Parameter: Timepoint (day) Value: 13
  misc_feature: MA Experiment 20001558 PARAMETER Experiment Name: At_Drought_Soil_Dry_P Parameter: Treatment Value: Drought vs. No Drought

SEQ ID NO: 31653 - protein, 183 aa, Arabidopsis thaliana; identical to SEQ ID NO: 28063
  peptide (1)..(183): Ceres Seq. ID no. 12384627
  misc_feature (155)..(180): Homolog of NCBI NO: 30681959 NR Description: ethylene-responsive protein -related [Arabidopsis
  misc_feature (31)..(155): Homolog of NCBI NO: 30681959 NR Description: ethylene-responsive protein -related [Arabidopsis
  misc_feature (31)..(180): Homolog of NCBI NO: 30681955 NR Description: ethylene-responsive protein -related [Arabidopsis
  misc_feature (31)..(180): Homolog of NCBI NO: 18399413 NR Description: ethylene-responsive protein, putative
  misc_feature (22)..(140): Homolog of NCBI NO: 15239780 NR Description: unknown protein; protein id: At5g49050.1
  misc_feature (22)..(182): Homolog of NCBI NO: 20067187 NR Description: putative universal stress protein USP1
  misc_feature (23)..(182): Homolog of NCBI NO: 22831145 NR Description: contains ESTs
  misc_feature (33)..(182): Homolog of NCBI NO: 38016525 NR Description: fiber protein Fb19 [Gossypium barbadense]
  misc_feature (22)..(183): Homolog of NCBI NO: 21555580 NR Description: unknown [Arabidopsis thaliana]
  misc_feature (22)..(183): Homolog of NCBI NO: 18407428 NR Description: expressed protein

SEQ ID NO: 31654 - protein, 162 aa, Arabidopsis thaliana; identical to SEQ ID NO: 26463
  peptide (1)..(162): Ceres Seq. ID no. 12384628
  misc_feature (134)..(159): Homolog of NCBI NO: 30681959 NR Description: ethylene-responsive protein -related [Arabidopsis
  misc_feature (10)..(134): Homolog of NCBI NO: 30681959 NR Description: ethylene-responsive protein -related [Arabidopsis
  misc_feature (10)..(159): Homolog of NCBI NO: 30681955 NR Description: ethylene-responsive protein -related [Arabidopsis
  misc_feature (10)..(159): Homolog of NCBI NO: 18399413 NR Description: ethylene-responsive protein, putative
  misc_feature (1)..(119): Homolog of NCBI NO: 15239780 NR Description: unknown protein; protein id: At5g49050.1
  misc_feature (1)..(161): Homolog of NCBI NO: 20067187 NR Description: putative universal stress protein USP1
  misc_feature (2)..(161): Homolog of NCBI NO: 22831145 NR Description: contains ESTs
  misc_feature (12)..(161): Homolog of NCBI NO: 38016525 NR Description: fiber protein Fb19 [Gossypium barbadense]
  misc_feature (1)..(162): Homolog of NCBI NO: 21555580 NR Description: unknown [Arabidopsis thaliana]
  misc_feature (1)..(162): Homolog of NCBI NO: 18407428 NR Description: expressed protein

SEQ ID NO: 31655 - protein, 153 aa, Arabidopsis thaliana; identical to SEQ ID NO: 26464
  peptide (1)..(153): Ceres Seq. ID no. 12384629
  misc_feature (125)..(150): Homolog of NCBI NO: 30681959 NR Description: ethylene-responsive protein -related [Arabidopsis
  misc_feature (1)..(125): Homolog of NCBI NO: 30681959 NR Description: ethylene-responsive protein -related [Arabidopsis
  misc_feature (1)..(150): Homolog of NCBI NO: 30681955 NR Description: ethylene-responsive protein -related [Arabidopsis
  misc_feature (1)..(150): Homolog of NCBI NO: 18399413 NR Description: ethylene-responsive protein, putative
  misc_feature (1)..(110): Homolog of NCBI NO: 15239780 NR Description: unknown protein; protein id: At5g49050.1
  misc_feature (1)..(152): Homolog of NCBI NO: 20067187 NR Description: putative universal stress protein USP1
  misc_feature (1)..(152): Homolog of NCBI NO: 22831145 NR Description: contains ESTs
  misc_feature (3)..(152): Homolog of NCBI NO: 38016525 NR Description: fiber protein Fb19 [Gossypium barbadense]
  misc_feature (1)..(153): Homolog of NCBI NO: 21555580 NR Description: unknown [Arabidopsis thaliana]
  misc_feature (1)..(153): Homolog of NCBI NO: 18407428 NR Description: expressed protein

SEQ ID NO: 31656 - DNA, 1362 bp, Arabidopsis thaliana; identical to SEQ ID NO: 28066
  misc_feature (1)..(1362): Ceres Seq. ID no. 13618728
  misc_feature: MA Experiment ID: 108434 Result: Up-regulated in Transcription
  misc_feature: MA Experiment 108434 PARAMETER Experiment Name: At_Root_Tips_cDNA_P Parameter: Tissue Value: Root Tips
  misc_feature: MA Experiment ID: 108461 Result: Down-regulated in Transcription
  misc_feature: MA Experiment 108461 PARAMETER Experiment Name: At_Germinating_Seeds_cDNA_P Parameter: Age (day) Value: 1 vs. 0
  misc_feature: MA Experiment 108461 PARAMETER Experiment Name: At_Germinating_Seeds_cDNA_P Parameter: Tissue Value: Germinating Seeds
  misc_feature: MA Experiment ID: 108462 Result: Down-regulated in Transcription
  misc_feature: MA Experiment 108462 PARAMETER Experiment Name: At_Germinating_Seeds_cDNA_P Parameter: Age (day) Value: 2 vs. 0
  misc_feature: MA Experiment 108462 PARAMETER Experiment Name: At_Germinating_Seeds_cDNA_P Parameter: Tissue Value: Germinating Seeds
  misc_feature: MA Experiment ID: 108463 Result: Down-regulated in Transcription
  misc_feature: MA Experiment 108463 PARAMETER Experiment Name: At_Germinating_Seeds_cDNA_P Parameter: Age (day) Value: 3 vs. 0
  misc_feature: MA Experiment 108463 PARAMETER Experiment Name: At_Germinating_Seeds_cDNA_P Parameter: Tissue Value: Germinating Seeds
  misc_feature: MA Experiment ID: 108464 Result: Down-regulated in Transcription
  misc_feature: MA Experiment 108464 PARAMETER Experiment Name: At_Germinating_Seeds_cDNA_P Parameter: Age (day) Value: 4 vs. 0
  misc_feature: MA Experiment 108464 PARAMETER Experiment Name: At_Germinating_Seeds_cDNA_P Parameter: Tissue Value: Germinating Seeds
  misc_feature: MA Experiment ID: 20000113 Result: Up-regulated in Transcription
  misc_feature: MA Experiment 20000113 PARAMETER Experiment Name: At_42deg_Heat_cDNA_P Parameter: Temperature (deg C) Value: 42 vs. 22
  misc_feature: MA Experiment 20000113 PARAMETER Experiment Name: At_42deg_Heat_cDNA_P Parameter: Timepoint (hr) Value: 8
  misc_feature: MA Experiment 20000113 PARAMETER Experiment Name: At_42deg_Heat_cDNA_P Parameter: Tissue Value: Aerial
  misc_feature: MA Experiment ID: 20001557 Result: Up-regulated in Transcription
  misc_feature: MA Experiment 20001557 PARAMETER Experiment Name: At_Drought_Soil_Dry_P Parameter: Age (day) Value: 27
  misc_feature: MA Experiment 20001557 PARAMETER Experiment Name: At_Drought_Soil_Dry_P Parameter: Organism Value: A. thaliana
  misc_feature: MA Experiment 20001557 PARAMETER Experiment Name: At_Drought_Soil_Dry_P Parameter: Plant Line Value: WS
  misc_feature: MA Experiment 20001557 PARAMETER Experiment Name: At_Drought_Soil_Dry_P Parameter: Post Timepoint (hr) Value: 3
  misc_feature: MA Experiment 20001557 PARAMETER Experiment Name: At_Drought_Soil_Dry_P Parameter: Post-Treatment Value: Re-Water vs. No Drought
  misc_feature: MA Experiment 20001557 PARAMETER Experiment Name: At_Drought_Soil_Dry_P Parameter: Timepoint (day) Value: 13
  misc_feature: MA Experiment 20001557 PARAMETER Experiment Name: At_Drought_Soil_Dry_P Parameter: Treatment Value: Drought vs. No Drought
  misc_feature: MA Experiment ID: 20001558 Result: Up-regulated in Transcription
  misc_feature: MA Experiment 20001558 PARAMETER Experiment Name: At_Drought_Soil_Dry_P Parameter: Age (day) Value: 27
  misc_feature: MA Experiment 20001558 PARAMETER Experiment Name: At_Drought_Soil_Dry_P Parameter: Organism Value: A. thaliana
  misc_feature: MA Experiment 20001558 PARAMETER Experiment Name: At_Drought_Soil_Dry_P Parameter: Plant Line Value: WS
  misc_feature: MA Experiment 20001558 PARAMETER Experiment Name: At_Drought_Soil_Dry_P Parameter: Post Timepoint (hr) Value: 6
  misc_feature: MA Experiment 20001558 PARAMETER Experiment Name: At_Drought_Soil_Dry_P Parameter: Post-Treatment Value: Re-Water vs. No Drought
  misc_feature: MA Experiment 20001558 PARAMETER Experiment Name: At_Drought_Soil_Dry_P Parameter: Timepoint (day) Value: 13
  misc_feature: MA Experiment 20001558 PARAMETER Experiment Name: At_Drought_Soil_Dry_P Parameter: Treatment Value: Drought vs. No Drought

SEQ ID NO: 31657 - protein, 362 aa, Arabidopsis thaliana; identical to SEQ ID NO: 28067
  peptide (1)..(362): Ceres Seq. ID no. 13618729
  misc_feature (28)..(337): Homolog of NCBI NO: 19114319 NR Description: hypothetical protein; similar to S. cerevisiae
  misc_feature (38)..(298): Homolog of NCBI NO: 40738933 NR Description: hypothetical protein AN6594.2 [Aspergillus
  misc_feature (37)..(78): Homolog of NCBI NO: 28829467 NR Description: similar to Homo sapiens (Human). HT-1080 protein
  misc_feature (94)..(321): Homolog of NCBI NO: 28829467 NR Description: similar to Homo sapiens (Human). HT-1080 protein
  misc_feature (30)..(355): Homolog of NCBI NO: 5174423 NR Description: D123 gene product [Homo sapiens]
  misc_feature (30)..(355): Homolog of NCBI NO: 23959082 NR Description: RIKEN cDNA G431001I09 [Mus musculus]
  misc_feature (30)..(355): Homolog of NCBI NO: 3551742 NR Description: HT-1080 protein [Homo sapiens]
  misc_feature (30)..(355): Homolog of NCBI NO: 19527052 NR Description: RIKEN cDNA G431001I09 [Mus musculus]
  misc_feature (30)..(355): Homolog of NCBI NO: 25742671 NR Description: D123 gene product [Rattus norvegicus]
  misc_feature (30)..(362): Homolog of NCBI NO: 15235584 NR Description: D123 -related protein [Arabidopsis thaliana]

SEQ ID NO: 31658 - protein, 333 aa, Arabidopsis thaliana; identical to SEQ ID NO: 28068
  peptide (1)..(333): Ceres Seq. ID no. 13618730
  misc_feature (1)..(308): Homolog of NCBI NO: 19114319 NR Description: hypothetical protein; similar to S. cerevisiae
  misc_feature (9)..(269): Homolog of NCBI NO: 40738933 NR Description: hypothetical protein AN6594.2 [Aspergillus
  misc_feature (8)..(49): Homolog of NCBI NO: 28829467 NR Description: similar to Homo sapiens (Human). HT-1080 protein
  misc_feature (65)..(292): Homolog of NCBI NO: 28829467 NR Description: similar to Homo sapiens (Human). HT-1080 protein
  misc_feature (1)..(326): Homolog of NCBI NO: 5174423 NR Description: D123 gene product [Homo sapiens]
  misc_feature (1)..(326): Homolog of NCBI NO: 23959082 NR Description: RIKEN cDNA G431001I09 [Mus musculus]
  misc_feature (1)..(326): Homolog of NCBI NO: 3551742 NR Description: HT-1080 protein [Homo sapiens]
  misc_feature (1)..(326): Homolog of NCBI NO: 19527052 NR Description: RIKEN cDNA G431001I09 [Mus musculus]
  misc_feature (1)..(326): Homolog of NCBI NO: 25742671 NR Description: D123 gene product [Rattus norvegicus]
  misc_feature (1)..(333): Homolog of NCBI NO: 15235584 NR Description: D123 -related protein [Arabidopsis thaliana]

SEQ ID NO: 31659 - protein, 277 aa, Arabidopsis thaliana; identical to SEQ ID NO: 28069
  peptide (1)..(277): Ceres Seq. ID no. 13618731
  misc_feature (1)..(250): Homolog of NCBI NO: 6323244 NR Description: Product of gene unknown; Ylr215cp [Saccharomyces
  misc_feature (1)..(252): Homolog of NCBI NO: 19114319 NR Description: hypothetical protein; similar to S. cerevisiae
  misc_feature (1)..(213): Homolog of NCBI NO: 40738933 NR Description: hypothetical protein AN6594.2 [Aspergillus
  misc_feature (9)..(236): Homolog of NCBI NO: 28829467 NR Description: similar to Homo sapiens (Human). HT-1080 protein
  misc_feature (1)..(270): Homolog of NCBI NO: 5174423 NR Description: D123 gene product [Homo sapiens]
  misc_feature (1)..(270): Homolog of NCBI NO: 23959082 NR Description: RIKEN cDNA G431001I09 [Mus musculus]
  misc_feature (1)..(270): Homolog of NCBI NO: 3551742 NR Description: HT-1080 protein [Homo sapiens]
  misc_feature (1)..(270): Homolog of NCBI NO: 19527052 NR Description: RIKEN cDNA G431001I09 [Mus musculus]
  misc_feature (1)..(270): Homolog of NCBI NO: 25742671 NR Description: D123 gene product [Rattus norvegicus]
  misc_feature (1)..(277): Homolog of NCBI NO: 15235584 NR Description: D123 -related protein [Arabidopsis thaliana]

SEQ ID NO: 31660 - DNA, 839 bp, Arabidopsis thaliana; identical to SEQ ID NO: 28070
  misc_feature (1)..(839): Ceres Seq. ID no. 12738877
  misc_feature: MA Experiment ID: 108434 Result: Up-regulated in Transcription
  misc_feature: MA Experiment 108434 PARAMETER Experiment Name: At_Root_Tips_cDNA_P Parameter: Tissue Value: Root Tips
  misc_feature: MA Experiment ID: 108461 Result: Down-regulated in Transcription
  misc_feature: MA Experiment 108461 PARAMETER Experiment Name: At_Germinating_Seeds_cDNA_P Parameter: Age (day) Value: 1 vs. 0
  misc_feature: MA Experiment 108461 PARAMETER Experiment Name: At_Germinating_Seeds_cDNA_P Parameter: Tissue Value: Germinating Seeds
  misc_feature: MA Experiment ID: 108462 Result: Down-regulated in Transcription
  misc_feature: MA Experiment 108462 PARAMETER Experiment Name: At_Germinating_Seeds_cDNA_P Parameter: Age (day) Value: 2 vs. 0
  misc_feature: MA Experiment 108462 PARAMETER Experiment Name: At_Germinating_Seeds_cDNA_P Parameter: Tissue Value: Germinating Seeds
  misc_feature: MA Experiment ID: 108463 Result: Down-regulated in Transcription
  misc_feature: MA Experiment 108463 PARAMETER Experiment Name: At_Germinating_Seeds_cDNA_P Parameter: Age (day) Value: 3 vs. 0
  misc_feature: MA Experiment 108463 PARAMETER Experiment Name: At_Germinating_Seeds_cDNA_P Parameter: Tissue Value: Germinating Seeds
  misc_feature: MA Experiment ID: 108464 Result: Down-regulated in Transcription
  misc_feature: MA Experiment 108464 PARAMETER Experiment Name: At_Germinating_Seeds_cDNA_P Parameter: Age (day) Value: 4 vs. 0
  misc_feature: MA Experiment 108464 PARAMETER Experiment Name: At_Germinating_Seeds_cDNA_P Parameter: Tissue Value: Germinating Seeds
  misc_feature: MA Experiment ID: 108488 Result: Up-regulated in Transcription
  misc_feature: MA Experiment ID: 108489 Result: Up-regulated in Transcription
  misc_feature: MA Experiment ID: 20000173 Result: Up-regulated in Transcription
  misc_feature: MA Experiment 20000173 PARAMETER Experiment Name: At_42deg_Heat_P Parameter: Age (day) Value: 14
  misc_feature: MA Experiment 20000173 PARAMETER Experiment Name: At_42deg_Heat_P Parameter: Organism Value: A. thaliana
  misc_feature: MA Experiment 20000173 PARAMETER Experiment Name: At_42deg_Heat_P Parameter: Plant Line Value: WS
  misc_feature: MA Experiment 20000173 PARAMETER Experiment Name: At_42deg_Heat_P Parameter: Temperature (deg C) Value: 42 vs. 22
  misc_feature: MA Experiment 20000173 PARAMETER Experiment Name: At_42deg_Heat_P Parameter: Timepoint (hr) Value: 6
  misc_feature: MA Experiment 20000173 PARAMETER Experiment Name: At_42deg_Heat_P Parameter: Tissue Value: Aerial
  misc_feature: MA Experiment ID: 20000184 Result: Up-regulated in Transcription
  misc_feature: MA Experiment 20000184 PARAMETER Experiment Name: At_Shoots__P Parameter: Age (day) Value: 7
  misc_feature: MA Experiment 20000184 PARAMETER Experiment Name: At_Shoots__P Parameter: Tissue Value: Shoots vs. Whole Plant
  misc_feature: MA Experiment ID: 20000794 Result: Down-regulated in Transcription
  misc_feature: MA Experiment 20000794 PARAMETER Experiment Name: At_Petals_P Parameter: Age (day) Value: 23-25 days
  misc_feature: MA Experiment 20000794 PARAMETER Experiment Name: At_Petals_P Parameter: Plant Line Value: WS
  misc_feature: MA Experiment 20000794 PARAMETER Experiment Name: At_Petals_P Parameter: Tissue Value: Petals vs. Whole plant
  misc_feature: MA Experiment ID: 20001560 Result: Up-regulated in Transcription
  misc_feature: MA Experiment 20001560 PARAMETER Experiment Name: At_Drought_Soil_Dry_P Parameter: Age (day) Value: 28
  misc_feature: MA Experiment 20001560 PARAMETER Experiment Name: At_Drought_Soil_Dry_P Parameter: Organism Value: A. thaliana
  misc_feature: MA Experiment 20001560 PARAMETER Experiment Name: At_Drought_Soil_Dry_P Parameter: Plant Line Value: WS
  misc_feature: MA Experiment 20001560 PARAMETER Experiment Name: At_Drought_Soil_Dry_P Parameter: Post Timepoint (hr) Value: None
  misc_feature: MA Experiment 20001560 PARAMETER Experiment Name: At_Drought_Soil_Dry_P Parameter: Post-Treatment Value: None
  misc_feature: MA Experiment 20001560 PARAMETER Experiment Name: At_Drought_Soil_Dry_P Parameter: Timepoint (day) Value: 14
  misc_feature: MA Experiment 20001560 PARAMETER Experiment Name: At_Drought_Soil_Dry_P Parameter: Treatment Value: Drought vs. No Drought
  misc_feature: MA Experiment ID: 20001757 Result: Up-regulated in Transcription
  misc_feature: MA Experiment 20001757 PARAMETER Experiment Name: At_50mM_NH4NO3_L-to-H_P Parameter: Timepoint (hr) Value: 6
  misc_feature: MA Experiment 20001757 PARAMETER Experiment Name: At_50mM_NH4NO3_L-to-H_P Parameter: Tissue Value: Leaf
  misc_feature: MA Experiment 20001757 PARAMETER Experiment Name: At_50mM_NH4NO3_L-to-H_P Parameter: Treatment Value: 50mM NH4NO3 vs 100mM Mannitol

SEQ ID NO: 31661 - protein, 240 aa, Arabidopsis thaliana; identical to SEQ ID NO: 28071
  peptide (1)..(240): Ceres Seq. ID no. 12738878
  misc_feature (87)..(240): Pfam Name: Ribosomal protein S7p/S5e Pfam Description: Ribosomal protein S7p/S5e
  misc_feature (49)..(240): Homolog of NCBI NO: 15294021 NR Description: 40S ribosomal protein S5 [Ictalurus punctatus]
  misc_feature (49)..(240): Homolog of NCBI NO: 34854534 NR Description: similar to ribosomal protein S5; 40S ribosomal
  misc_feature (49)..(240): Homolog of NCBI NO: 13904870 NR Description: ribosomal protein S5; 40S ribosomal protein S5
  misc_feature (49)..(240): Homolog of NCBI NO: 3717978 NR Description: 5S ribosomal protein [Mus musculus]
  misc_feature (33)..(240): Homolog of NCBI NO: 40748265 NR Description: 40S ribosomal protein S5 [Capsicum annuum]
  misc_feature (42)..(240): Homolog of NCBI NO: 34893994 NR Description: putative 40S ribosomal protein S5
  misc_feature (51)..(240): Homolog of NCBI NO: 6831665 NR Description: 40S RIBOSOMAL PROTEIN S5
  misc_feature (34)..(240): Homolog of NCBI NO: 15229897 NR Description: 40S ribosomal protein S5, putative
  misc_feature (34)..(240): Homolog of NCBI NO: 15228111 NR Description: 40S ribosomal protein S5
  misc_feature (34)..(240): Homolog of NCBI NO: 21617886 NR Description: 40S ribosomal protein S5 [Arabidopsis thaliana]

SEQ ID NO: 31662 - protein, 207 aa, Arabidopsis thaliana; identical to SEQ ID NO: 28072
  peptide (1)..(207): Ceres Seq. ID no. 12738879
  misc_feature (54)..(207): Pfam Name: Ribosomal protein S7p/S5e Pfam Description: Ribosomal protein S7p/S5e
  misc_feature (16)..(207): Homolog of NCBI NO: 15294021 NR Description: 40S ribosomal protein S5 [Ictalurus punctatus]
  misc_feature (16)..(207): Homolog of NCBI NO: 34854534 NR Description: similar to ribosomal protein S5; 40S ribosomal
  misc_feature (16)..(207): Homolog of NCBI NO: 13904870 NR Description: ribosomal protein S5; 40S ribosomal protein S5
  misc_feature (16)..(207): Homolog of NCBI NO: 3717978 NR Description: 5S ribosomal protein [Mus musculus]
  misc_feature (1)..(207): Homolog of NCBI NO: 40748265 NR Description: 40S ribosomal protein S5 [Capsicum annuum]
  misc_feature (9)..(207): Homolog of NCBI NO: 34893994 NR Description: putative 40S ribosomal protein S5
  misc_feature (18)..(207): Homolog of NCBI NO: 6831665 NR Description: 40S RIBOSOMAL PROTEIN S5
  misc_feature (1)..(207): Homolog of NCBI NO: 15229897 NR Description: 40S ribosomal protein S5, putative
  misc_feature (1)..(207): Homolog of NCBI NO: 15228111 NR Description: 40S ribosomal protein S5
  misc_feature (1)..(207): Homolog of NCBI NO: 21617886 NR Description: 40S ribosomal protein S5 [Arabidopsis thaliana]

SEQ ID NO: 31663 - protein, 128 aa, Arabidopsis thaliana; identical to SEQ ID NO: 28073
  peptide (1)..(128): Ceres Seq. ID no. 12738880
  misc_feature (1)..(128): Pfam Name: Ribosomal protein S7p/S5e Pfam Description: Ribosomal protein S7p/S5e
  misc_feature (1)..(128): Homolog of NCBI NO: 15294021 NR Description: 40S ribosomal protein S5 [Ictalurus punctatus]
  misc_feature (1)..(128): Homolog of NCBI NO: 34854534 NR Description: similar to ribosomal protein S5; 40S ribosomal
  misc_feature (1)..(128): Homolog of NCBI NO: 13904870 NR Description: ribosomal protein S5; 40S ribosomal protein S5
  misc_feature (1)..(128): Homolog of NCBI NO: 3717978 NR Description: 5S ribosomal protein [Mus musculus]
  misc_feature (1)..(128): Homolog of NCBI NO: 40748265 NR Description: 40S ribosomal protein S5 [Capsicum annuum]
  misc_feature (1)..(128): Homolog of NCBI NO: 34893994 NR Description: putative 40S ribosomal protein S5
  misc_feature (1)..(128): Homolog of NCBI NO: 6831665 NR Description: 40S RIBOSOMAL PROTEIN S5
  misc_feature (1)..(128): Homolog of NCBI NO: 15229897 NR Description: 40S ribosomal protein S5, putative
  misc_feature (1)..(128): Homolog of NCBI NO: 15228111 NR Description: 40S ribosomal protein S5
  misc_feature (1)..(128): Homolog of NCBI NO: 21617886 NR Description: 40S ribosomal protein S5 [Arabidopsis thaliana]

SEQ ID NO: 31664 - DNA, 750 bp, Arabidopsis thaliana; identical to SEQ ID NO: 28074
  misc_feature (1)..(750): Ceres Seq. ID no. 13580820
  misc_feature: MA Experiment ID: 108435 Result: Down-regulated in Transcription
  misc_feature: MA Experiment 108435 PARAMETER Experiment Name: At_stm_Mutants_cDNA_P Parameter: Plant Line Value: wt Landsburg vs stm
  misc_feature: MA Experiment 108435 PARAMETER Experiment Name: At_stm_Mutants_cDNA_P Parameter: Tissue Value: Shoot Apical Meristem Region
  misc_feature: MA Experiment ID: 108461 Result: Up-regulated in Transcription
  misc_feature: MA Experiment 108461 PARAMETER Experiment Name: At_Germinating_Seeds_cDNA_P Parameter: Age (day) Value: 1 vs. 0
  misc_feature: MA Experiment 108461 PARAMETER Experiment Name: At_Germinating_Seeds_cDNA_P Parameter: Tissue Value: Germinating Seeds
  misc_feature: MA Experiment ID: 108462 Result: Up-regulated in Transcription
  misc_feature: MA Experiment 108462 PARAMETER Experiment Name: At_Germinating_Seeds_cDNA_P Parameter: Age (day) Value: 2 vs. 0
  misc_feature: MA Experiment 108462 PARAMETER Experiment Name: At_Germinating_Seeds_cDNA_P Parameter: Tissue Value: Germinating Seeds
  misc_feature: MA Experiment ID: 108463 Result: Up-regulated in Transcription
  misc_feature: MA Experiment 108463 PARAMETER Experiment Name: At_Germinating_Seeds_cDNA_P Parameter: Age (day) Value: 3 vs. 0
  misc_feature: MA Experiment 108463 PARAMETER Experiment Name: At_Germinating_Seeds_cDNA_P Parameter: Tissue Value: Germinating Seeds
  misc_feature: MA Experiment ID: 108464 Result: Up-regulated in Transcription
  misc_feature: MA Experiment 108464 PARAMETER Experiment Name: At_Germinating_Seeds_cDNA_P Parameter: Age (day) Value: 4 vs. 0
  misc_feature: MA Experiment 108464 PARAMETER Experiment Name: At_Germinating_Seeds_cDNA_P Parameter: Tissue Value: Germinating Seeds
  misc_feature: MA Experiment ID: 108594 Result: Down-regulated in Transcription
  misc_feature: MA Experiment 108594 PARAMETER Experiment Name: At_Ler-rhl_Root_cDNA_P Parameter: Plant Line Value: null
  misc_feature: MA Experiment ID: 108595 Result: Down-regulated in Transcription
  misc_feature: MA Experiment 108595 PARAMETER Experiment Name: At_Ler-pi_Ovule_cDNA_P Parameter: Plant Line Value: null
  misc_feature: MA Experiment ID: 20000069 Result: Down-regulated in Transcription
  misc_feature: MA Experiment 20000069 PARAMETER Experiment Name: At_100uM_ABA_Mutants_cDNA_P Parameter: Plant Line Value: CS23
  misc_feature: MA Experiment 20000069 PARAMETER Experiment Name: At_100uM_ABA_Mutants_cDNA_P Parameter: Timepoint (hr) Value: 6
  misc_feature: MA Experiment 20000069 PARAMETER Experiment Name: At_100uM_ABA_Mutants_cDNA_P Parameter: Tissue Value: Aerial
  misc_feature: MA Experiment 20000069 PARAMETER Experiment Name: At_100uM_ABA_Mutants_cDNA_P Parameter: Treatment Value: 100uM ABA vs. No Treatment
  misc_feature: MA Experiment ID: 20000072 Result: Down-regulated in Transcription
  misc_feature: MA Experiment 20000072 PARAMETER Experiment Name: At_100uM_ABA_Mutants_cDNA_P Parameter: Plant Line Value: CS8105
  misc_feature: MA Experiment 20000072 PARAMETER Experiment Name: At_100uM_ABA_Mutants_cDNA_P Parameter: Timepoint (hr) Value: 6
  misc_feature: MA Experiment 20000072 PARAMETER Experiment Name: At_100uM_ABA_Mutants_cDNA_P Parameter: Tissue Value: Aerial
  misc_feature: MA Experiment 20000072 PARAMETER Experiment Name: At_100uM_ABA_Mutants_cDNA_P Parameter: Treatment Value: 100uM ABA vs. No Treatment
  misc_feature: MA Experiment ID: 20000087 Result: Down-regulated in Transcription
  misc_feature: MA Experiment 20000087 PARAMETER Experiment Name: At_100uM_ABA_Mutants_cDNA_P Parameter: Plant Line Value: WS
  misc_feature: MA Experiment 20000087 PARAMETER Experiment Name: At_100uM_ABA_Mutants_cDNA_P Parameter: Timepoint (hr) Value: 6
  misc_feature: MA Experiment 20000087 PARAMETER Experiment Name: At_100uM_ABA_Mutants_cDNA_P Parameter: Tissue Value: Aerial
  misc_feature: MA Experiment 20000087 PARAMETER Experiment Name: At_100uM_ABA_Mutants_cDNA_P Parameter: Treatment Value: 100uM ABA vs. No Treatment
  misc_feature: MA Experiment ID: 20000112 Result: Down-regulated in Transcription
  misc_feature: MA Experiment 20000112 PARAMETER Experiment Name: At_42deg_Heat_cDNA_P Parameter: Temperature (deg C) Value: 42 vs. 22
  misc_feature: MA Experiment 20000112 PARAMETER Experiment Name: At_42deg_Heat_cDNA_P Parameter: Timepoint (hr) Value: 2
  misc_feature: MA Experiment 20000112 PARAMETER Experiment Name: At_42deg_Heat_cDNA_P Parameter: Tissue Value: Aerial
  misc_feature: MA Experiment ID: 20000117 Result: Down-regulated in Transcription
  misc_feature: MA Experiment 20000117 PARAMETER Experiment Name: At_100uM_ABA_Mutants_cDNA_P Parameter: Plant Line Value: Columbia
  misc_feature: MA Experiment 20000117 PARAMETER Experiment Name: At_100uM_ABA_Mutants_cDNA_P Parameter: Timepoint (hr) Value: 6
  misc_feature: MA Experiment 20000117 PARAMETER Experiment Name: At_100uM_ABA_Mutants_cDNA_P Parameter: Tissue Value: Aerial
  misc_feature: MA Experiment 20000117 PARAMETER Experiment Name: At_100uM_ABA_Mutants_cDNA_P Parameter: Treatment Value: 100uM ABA vs. No Treatment
  misc_feature: MA Experiment ID: 20000171 Result: Down-regulated in Transcription
  misc_feature: MA Experiment 20000171 PARAMETER Experiment Name: At_42deg_Heat_P Parameter: Age (day) Value: 14
  misc_feature: MA Experiment 20000171 PARAMETER Experiment Name: At_42deg_Heat_P Parameter: Organism Value: A. thaliana
  misc_feature: MA Experiment 20000171 PARAMETER Experiment Name: At_42deg_Heat_P Parameter: Plant Line Value: WS
  misc_feature: MA Experiment 20000171 PARAMETER Experiment Name: At_42deg_Heat_P Parameter: Temperature (deg C) Value: 42 vs. 22
  misc_feature: MA Experiment 20000171 PARAMETER Experiment Name: At_42deg_Heat_P Parameter: Timepoint (hr) Value: 1
  misc_feature: MA Experiment 20000171 PARAMETER Experiment Name: At_42deg_Heat_P Parameter: Tissue Value: Aerial
  misc_feature: MA Experiment ID: 20000180 Result: Up-regulated in Transcription
  misc_feature: MA Experiment 20000180 PARAMETER Experiment Name: At_Germinating_Seeds_P Parameter: Age (hr) Value: 24 vs. 0
  misc_feature: MA Experiment 20000180 PARAMETER Experiment Name: At_Germinating_Seeds_P Parameter: Tissue Value: Germinating Seeds
  misc_feature: MA Experiment ID: 20000185 Result: Down-regulated in Transcription
  misc_feature: MA Experiment 20000185 PARAMETER Experiment Name: At_Roots__P Parameter: Age (day) Value: 7 vs. 21
  misc_feature: MA Experiment 20000185 PARAMETER Experiment Name: At_Roots__P Parameter: Organism Value: A. thaliana
  misc_feature: MA Experiment 20000185 PARAMETER Experiment Name: At_Roots__P Parameter: Tissue Value: Roots vs. Whole Plant
  misc_feature: MA Experiment ID: 20000234 Result: Down-regulated in Transcription
  misc_feature: MA Experiment 20000234 PARAMETER Experiment Name: At_Siliques_P Parameter: Age (day) Value: 21
  misc_feature: MA Experiment 20000234 PARAMETER Experiment Name: At_Siliques_P Parameter: Organism Value: A. thaliana
  misc_feature: MA Experiment 20000234 PARAMETER Experiment Name: At_Siliques_P Parameter: Plant Line Value: WS
  misc_feature: MA Experiment 20000234 PARAMETER Experiment Name: At_Siliques_P Parameter: Tissue Value: Less Than 5mm Siliques vs. Whole Plant
  misc_feature: MA Experiment ID: 20000264 Result: Down-regulated in Transcription
  misc_feature: MA Experiment 20000264 PARAMETER Experiment Name: At_Open_Flower_P Parameter: Age (day) Value: 21
  misc_feature: MA Experiment 20000264 PARAMETER Experiment Name: At_Open_Flower_P Parameter: Plant Line Value: WS
  misc_feature: MA Experiment 20000264 PARAMETER Experiment Name: At_Open_Flower_P Parameter: Tissue Value: Open Flower vs. Whole Plant
  misc_feature: MA Experiment ID: 20000439 Result: Down-regulated in Transcription
  misc_feature: MA Experiment 20000439 PARAMETER Experiment Name: At_Roots__P Parameter: Age (day) Value: 14 vs. 21
  misc_feature: MA Experiment 20000439 PARAMETER Experiment Name: At_Roots__P Parameter: Organism Value: A. thaliana
  misc_feature: MA Experiment 20000439 PARAMETER Experiment Name: At_Roots__P Parameter: Tissue Value: Roots vs. Whole Plant
  misc_feature: MA Experiment ID: 20000451 Result: Up-regulated in Transcription
  misc_feature: MA Experiment 20000451 PARAMETER Experiment Name: At_CS6879_Shoots-Roots_P Parameter: Age (day) Value: 14
  misc_feature: MA Experiment 20000451 PARAMETER Experiment Name: At_CS6879_Shoots-Roots_P Parameter: Organism Value: A. thaliana
  misc_feature: MA Experiment 20000451 PARAMETER Experiment Name: At_CS6879_Shoots-Roots_P Parameter: Plant Line Value: CS6879 vs. WS
  misc_feature: MA Experiment 20000451 PARAMETER Experiment Name: At_CS6879_Shoots-Roots_P Parameter: Tissue Value: Roots
  misc_feature: MA Experiment ID: 20000794 Result: Down-regulated in Transcription
  misc_feature: MA Experiment 20000794 PARAMETER Experiment Name: At_Petals_P Parameter: Age (day) Value: 23-25 days
  misc_feature: MA Experiment 20000794 PARAMETER Experiment Name: At_Petals_P Parameter: Plant Line Value: WS
  misc_feature: MA Experiment 20000794 PARAMETER Experiment Name: At_Petals_P Parameter: Tissue Value: Petals vs. Whole plant
  misc_feature: MA Experiment ID: 20001248 Result: Up-regulated in Transcription
  misc_feature: MA Experiment 20001248 PARAMETER Experiment Name: At_Far-red-induction_P Parameter: Age (day) Value: 7
  misc_feature: MA Experiment 20001248 PARAMETER Experiment Name: At_Far-red-induction_P Parameter: Light Value: Far-red vs. White
  misc_feature: MA Experiment 20001248 PARAMETER Experiment Name: At_Far-red-induction_P Parameter: Organism Value: A. thaliana
  misc_feature: MA Experiment 20001248 PARAMETER Experiment Name: At_Far-red-induction_P Parameter: Plant Line Value: Columbia
  misc_feature: MA Experiment 20001248 PARAMETER Experiment Name: At_Far-red-induction_P Parameter: Timepoint (hr) Value: 4
  misc_feature: MA Experiment 20001248 PARAMETER Experiment Name: At_Far-red-induction_P Parameter: Tissue Value: Whole Plant
  misc_feature: MA Experiment ID: 20001451 Result: Down-regulated in Transcription
  misc_feature: MA Experiment 20001451 PARAMETER Experiment Name: At_Far-red-induction_P Parameter: Age (day) Value: 7
  misc_feature: MA Experiment 20001451 PARAMETER Experiment Name: At_Far-red-induction_P Parameter: Light Value: Far-red vs. White
  misc_feature: MA Experiment 20001451 PARAMETER Experiment Name: At_Far-red-induction_P Parameter: Organism Value: A. thaliana
  misc_feature: MA Experiment 20001451 PARAMETER Experiment Name: At_Far-red-induction_P Parameter: Plant Line Value: Columbia
  misc_feature: MA Experiment 20001451 PARAMETER Experiment Name: At_Far-red-induction_P Parameter: Timepoint (hr) Value: 24
  misc_feature: MA Experiment 20001451 PARAMETER Experiment Name: At_Far-red-induction_P Parameter: Tissue Value: Whole Plant
  misc_feature: MA Experiment ID: 20001557 Result: Up-regulated in Transcription
  misc_feature: MA Experiment 20001557 PARAMETER Experiment Name: At_Drought_Soil_Dry_P Parameter: Age (day) Value: 27
  misc_feature: MA Experiment 20001557 PARAMETER Experiment Name: At_Drought_Soil_Dry_P Parameter: Organism Value: A. thaliana
  misc_feature: MA Experiment 20001557 PARAMETER Experiment Name: At_Drought_Soil_Dry_P Parameter: Plant Line Value: WS
  misc_feature: MA Experiment 20001557 PARAMETER Experiment Name: At_Drought_Soil_Dry_P Parameter: Post Timepoint (hr) Value: 3
  misc_feature: MA Experiment 20001557 PARAMETER Experiment Name: At_Drought_Soil_Dry_P Parameter: Post-Treatment Value: Re-Water vs. No Drought
  misc_feature: MA Experiment 20001557 PARAMETER Experiment Name: At_Drought_Soil_Dry_P Parameter: Timepoint (day) Value: 13
  misc_feature: MA Experiment 20001557 PARAMETER Experiment Name: At_Drought_Soil_Dry_P Parameter: Treatment Value: Drought vs. No Drought
  misc_feature: MA Experiment ID: 20001558 Result: Up-regulated in Transcription
  misc_feature: MA Experiment 20001558 PARAMETER Experiment Name: At_Drought_Soil_Dry_P Parameter: Age (day) Value: 27
  misc_feature: MA Experiment 20001558 PARAMETER Experiment Name: At_Drought_Soil_Dry_P Parameter: Organism Value: A. thaliana
  misc_feature: MA Experiment 20001558 PARAMETER Experiment Name: At_Drought_Soil_Dry_P Parameter: Plant Line Value: WS
  misc_feature: MA Experiment 20001558 PARAMETER Experiment Name: At_Drought_Soil_Dry_P Parameter: Post Timepoint (hr) Value: 6
  misc_feature: MA Experiment 20001558 PARAMETER Experiment Name: At_Drought_Soil_Dry_P Parameter: Post-Treatment Value: Re-Water vs. No Drought
  misc_feature: MA Experiment 20001558 PARAMETER Experiment Name: At_Drought_Soil_Dry_P Parameter: Timepoint (day) Value: 13
  misc_feature: MA Experiment 20001558 PARAMETER Experiment Name: At_Drought_Soil_Dry_P Parameter: Treatment Value: Drought vs. No Drought
  misc_feature: MA Experiment ID: 20001757 Result: Up-regulated in Transcription
  misc_feature: MA Experiment 20001757 PARAMETER Experiment Name: At_50mM_NH4NO3_L-to-H_P Parameter: Timepoint (hr) Value: 6
  misc_feature: MA Experiment 20001757 PARAMETER Experiment Name: At_50mM_NH4NO3_L-to-H_P Parameter: Tissue Value: Leaf
  misc_feature: MA Experiment 20001757 PARAMETER Experiment Name: At_50mM_NH4NO3_L-to-H_P Parameter: Treatment Value: 50mM NH4NO3 vs 100mM Mannitol
  misc_feature: MA Experiment ID: 20001904 Result: Down-regulated in Transcription
  misc_feature: MA Experiment 20001904 PARAMETER Experiment Name: At_Drought_Reproduction_P Parameter: Age (day) Value: 37
  misc_feature: MA Experiment 20001904 PARAMETER Experiment Name: At_Drought_Reproduction_P Parameter: Organism Value: A. thaliana
  misc_feature: MA Experiment 20001904 PARAMETER Experiment Name: At_Drought_Reproduction_P Parameter: Plant Line Value: WS
  misc_feature: MA Experiment 20001904 PARAMETER Experiment Name: At_Drought_Reproduction_P Parameter: Timepoint (day) Value: 7
  misc_feature: MA Experiment 20001904 PARAMETER Experiment Name: At_Drought_Reproduction_P Parameter: Tissue Value: Rosettes
  misc_feature: MA Experiment 20001904 PARAMETER Experiment Name: At_Drought_Reproduction_P Parameter: Treatment Value: Drought vs. No Drought
  misc_feature: MA Experiment ID: 20001906 Result: Down-regulated in Transcription
  misc_feature: MA Experiment 20001906 PARAMETER Experiment Name: At_Drought_Reproduction_P Parameter: Age (day) Value: 35
  misc_feature: MA Experiment 20001906 PARAMETER Experiment Name: At_Drought_Reproduction_P Parameter: Organism Value: A. thaliana
  misc_feature: MA Experiment 20001906 PARAMETER Experiment Name: At_Drought_Reproduction_P Parameter: Plant Line Value: WS
  misc_feature: MA Experiment 20001906 PARAMETER Experiment Name: At_Drought_Reproduction_P Parameter: Timepoint (day) Value: 5
  misc_feature: MA Experiment 20001906 PARAMETER Experiment Name: At_Drought_Reproduction_P Parameter: Tissue Value: Siliques
  misc_feature: MA Experiment 20001906 PARAMETER Experiment Name: At_Drought_Reproduction_P Parameter: Treatment Value: Drought vs. No Drought
  misc_feature: MA Experiment ID: 20001910 Result: Down-regulated in Transcription
  misc_feature: MA Experiment 20001910 PARAMETER Experiment Name: At_Drought_Reproduction_P Parameter: Age (day) Value: 37
  misc_feature: MA Experiment 20001910 PARAMETER Experiment Name: At_Drought_Reproduction_P Parameter: Organism Value: A. thaliana
  misc_feature: MA Experiment 20001910 PARAMETER Experiment Name: At_Drought_Reproduction_P Parameter: Plant Line Value: WS
  misc_feature: MA Experiment 20001910 PARAMETER Experiment Name: At_Drought_Reproduction_P Parameter: Timepoint (day) Value: 7
  misc_feature: MA Experiment 20001910 PARAMETER Experiment Name: At_Drought_Reproduction_P Parameter: Tissue Value: Flowers
  misc_feature: MA Experiment 20001910 PARAMETER Experiment Name: At_Drought_Reproduction_P Parameter: Treatment Value: Drought vs. No Drought
  misc_feature: MA Experiment ID: 20001911 Result: Down-regulated in Transcription
  misc_feature: MA Experiment 20001911 PARAMETER Experiment Name: At_Drought_Reproduction_P Parameter: Age (day) Value: 40
  misc_feature: MA Experiment 20001911 PARAMETER Experiment Name: At_Drought_Reproduction_P Parameter: Organism Value: A. thaliana
  misc_feature: MA Experiment 20001911 PARAMETER Experiment Name: At_Drought_Reproduction_P Parameter: Plant Line Value: WS
  misc_feature: MA Experiment 20001911 PARAMETER Experiment Name: At_Drought_Reproduction_P Parameter: Timepoint (day) Value: 10
  misc_feature: MA Experiment 20001911 PARAMETER Experiment Name: At_Drought_Reproduction_P Parameter: Tissue Value: Flowers
  misc_feature: MA Experiment 20001911 PARAMETER Experiment Name: At_Drought_Reproduction_P Parameter: Treatment Value: Drought vs. No Drought

SEQ ID NO: 31665 - protein, 118 aa, Arabidopsis thaliana; identical to SEQ ID NO: 28075
  peptide (1)..(118): Ceres Seq. ID no. 13580821
  misc_feature (29)..(114): Pfam Name: Protease inhibitor/seed storage/LTP family Pfam Description: Protease inhibitor/seed storage/LTP family
  misc_feature (1)..(118): Homolog of NCBI NO: 2497737 NR Description: NONSPECIFIC LIPID-TRANSFER PROTEIN 3 PRECURSOR
  misc_feature (1)..(118): Homolog of NCBI NO: 15224898 NR Description: nonspecific lipid transfer protein 2 (LTP 2)
  misc_feature (1)..(118): Homolog of NCBI NO: 2497736 NR Description: NONSPECIFIC LIPID-TRANSFER PROTEIN 2 PRECURSOR
  misc_feature (1)..(118): Homolog of NCBI NO: 2497738 NR Description: NONSPECIFIC LIPID-TRANSFER PROTEIN A PRECURSOR
  misc_feature (1)..(118): Homolog of NCBI NO: 2497739 NR Description: NONSPECIFIC LIPID-TRANSFER PROTEIN B PRECURSOR
  misc_feature (1)..(118): Homolog of NCBI NO: 11273805 NR Description: lipid transfer protein [imported] - wild cabbage
  misc_feature (1)..(118): Homolog of NCBI NO: 2497735 NR Description: NONSPECIFIC LIPID-TRANSFER PROTEIN 1 PRECURSOR
  misc_feature (1)..(118): Homolog of NCBI NO: 15224899 NR Description: nonspecific lipid transfer protein 1 (LTP 1)
  misc_feature (15)..(118): Homolog of NCBI NO: 21617887 NR Description: non-specific lipid transfer protein [Arabidopsis
  misc_feature (1)..(118): Homolog of NCBI NO: 15230533 NR Description: nonspecific lipid transfer protein 5 (LTP 5)

SEQ ID NO: 31666 - protein, 104 aa, Arabidopsis thaliana; identical to SEQ ID NO: 28076
  peptide (1)..(104): Ceres Seq. ID no. 13580822
  misc_feature (15)..(100): Pfam Name: Protease inhibitor/seed storage/LTP family Pfam Description: Protease inhibitor/seed storage/LTP family
  misc_feature (1)..(104): Homolog of NCBI NO: 2497737 NR Description: NONSPECIFIC LIPID-TRANSFER PROTEIN 3 PRECURSOR
  misc_feature (1)..(104): Homolog of NCBI NO: 15224898 NR Description: nonspecific lipid transfer protein 2 (LTP 2)
  misc_feature (1)..(104): Homolog of NCBI NO: 2497736 NR Description: NONSPECIFIC LIPID-TRANSFER PROTEIN 2 PRECURSOR
  misc_feature (1)..(104): Homolog of NCBI NO: 2497738 NR Description: NONSPECIFIC LIPID-TRANSFER PROTEIN A PRECURSOR
  misc_feature (1)..(104): Homolog of NCBI NO: 2497739 NR Description: NONSPECIFIC LIPID-TRANSFER PROTEIN B PRECURSOR
  misc_feature (1)..(104): Homolog of NCBI NO: 11273805 NR Description: lipid transfer protein [imported] - wild cabbage
  misc_feature (1)..(104): Homolog of NCBI NO: 2497735 NR Description: NONSPECIFIC LIPID-TRANSFER PROTEIN 1 PRECURSOR
  misc_feature (1)..(104): Homolog of NCBI NO: 15224899 NR Description: nonspecific lipid transfer protein 1 (LTP 1)
  misc_feature (1)..(104): Homolog of NCBI NO: 21617887 NR Description: non-specific lipid transfer protein [Arabidopsis
  misc_feature (1)..(104): Homolog of NCBI NO: 15230533 NR Description: nonspecific lipid transfer protein 5 (LTP 5)

SEQ ID NO: 31667 - protein, 98 aa, Arabidopsis thaliana; identical to SEQ ID NO: 28077
  peptide (1)..(98): Ceres Seq. ID no. 13580823
  misc_feature (9)..(94): Pfam Name: Protease inhibitor/seed storage/LTP family Pfam Description: Protease inhibitor/seed storage/LTP family
  misc_feature (1)..(98): Homolog of NCBI NO: 2497737 NR Description: NONSPECIFIC LIPID-TRANSFER PROTEIN 3 PRECURSOR
  misc_feature (1)..(98): Homolog of NCBI NO: 15224898 NR Description: nonspecific lipid transfer protein 2 (LTP 2)
  misc_feature (1)..(98): Homolog of NCBI NO: 2497736 NR Description: NONSPECIFIC LIPID-TRANSFER PROTEIN 2 PRECURSOR
  misc_feature (1)..(98): Homolog of NCBI NO: 2497738 NR Description: NONSPECIFIC LIPID-TRANSFER PROTEIN A PRECURSOR
  misc_feature (1)..(98): Homolog of NCBI NO: 2497739 NR Description: NONSPECIFIC LIPID-TRANSFER PROTEIN B PRECURSOR
  misc_feature (1)..(98): Homolog of NCBI NO: 11273805 NR Description: lipid transfer protein [imported] - wild cabbage
  misc_feature (1)..(98): Homolog of NCBI NO: 2497735 NR Description: NONSPECIFIC LIPID-TRANSFER PROTEIN 1 PRECURSOR
  misc_feature (1)..(98): Homolog of NCBI NO: 15224899 NR Description: nonspecific lipid transfer protein 1 (LTP 1)
  misc_feature (1)..(98): Homolog of NCBI NO: 21617887 NR Description: non-specific lipid transfer protein [Arabidopsis
  misc_feature (1)..(98): Homolog of NCBI NO: 15230533 NR Description: nonspecific lipid transfer protein 5 (LTP 5)

SEQ ID NO: 31668 - DNA, 1482 bp, Arabidopsis thaliana; identical to SEQ ID NO: 28078
  misc_feature (1)..(1482): Ceres Seq. ID no. 12324908
  misc_feature: MA Experiment ID: 108434 Result: Up-regulated in Transcription
  misc_feature: MA Experiment 108434 PARAMETER Experiment Name: At_Root_Tips_cDNA_P Parameter: Tissue Value: Root Tips
  misc_feature: MA Experiment ID: 108461 Result: Down-regulated in Transcription
  misc_feature: MA Experiment 108461 PARAMETER Experiment Name: At_Germinating_Seeds_cDNA_P Parameter: Age (day) Value: 1 vs. 0
  misc_feature: MA Experiment 108461 PARAMETER Experiment Name: At_Germinating_Seeds_cDNA_P Parameter: Tissue Value: Germinating Seeds
  misc_feature: MA Experiment ID: 108462 Result: Down-regulated in Transcription
  misc_feature: MA Experiment 108462 PARAMETER Experiment Name: At_Germinating_Seeds_cDNA_P Parameter: Age (day) Value: 2 vs. 0
  misc_feature: MA Experiment 108462 PARAMETER Experiment Name: At_Germinating_Seeds_cDNA_P Parameter: Tissue Value: Germinating Seeds
  misc_feature: MA Experiment ID: 108463 Result: Down-regulated in Transcription
  misc_feature: MA Experiment 108463 PARAMETER Experiment Name: At_Germinating_Seeds_cDNA_P Parameter: Age (day) Value: 3 vs. 0
  misc_feature: MA Experiment 108463 PARAMETER Experiment Name: At_Germinating_Seeds_cDNA_P Parameter: Tissue Value: Germinating Seeds
  misc_feature: MA Experiment ID: 108585 Result: Down-regulated in Transcription
  misc_feature: MA Experiment 108585 PARAMETER Experiment Name: At_5mM_NaNP_cDNA_P Parameter: Timepoint (hr) Value: 6
  misc_feature: MA Experiment 108585 PARAMETER Experiment Name: At_5mM_NaNP_cDNA_P Parameter: Tissue Value: Aerial
  misc_feature: MA Experiment 108585 PARAMETER Experiment Name: At_5mM_NaNP_cDNA_P Parameter: Treatment Value: null
  misc_feature: MA Experiment ID: 20000179 Result: Down-regulated in Transcription
  misc_feature: MA Experiment 20000179 PARAMETER Experiment Name: At_Germinating_Seeds_P Parameter: Age (hr) Value: 6 vs. 0
  misc_feature: MA Experiment 20000179 PARAMETER Experiment Name: At_Germinating_Seeds_P Parameter: Tissue Value: Germinating Seeds
  misc_feature: MA Experiment ID: 20000180 Result: Down-regulated in Transcription
  misc_feature: MA Experiment 20000180 PARAMETER Experiment Name: At_Germinating_Seeds_P Parameter: Age (hr) Value: 24 vs. 0
  misc_feature: MA Experiment 20000180 PARAMETER Experiment Name: At_Germinating_Seeds_P Parameter: Tissue Value: Germinating Seeds
  misc_feature: MA Experiment ID: 20000227 Result: Up-regulated in Transcription
  misc_feature: MA Experiment 20000227 PARAMETER Experiment Name: At_Root-Tips-vs-Tops_P Parameter: Tissue Value: Root Tips vs. Root Tops
  misc_feature: MA Experiment ID: 20000234 Result: Up-regulated in Transcription
  misc_feature: MA Experiment 20000234 PARAMETER Experiment Name: At_Siliques_P Parameter: Age (day) Value: 21
  misc_feature: MA Experiment 20000234 PARAMETER Experiment Name: At_Siliques_P Parameter: Organism Value: A. thaliana
  misc_feature: MA Experiment 20000234 PARAMETER Experiment Name: At_Siliques_P Parameter: Plant Line Value: WS
  misc_feature: MA Experiment 20000234 PARAMETER Experiment Name: At_Siliques_P Parameter: Tissue Value: Less Than 5mm Siliques vs. Whole Plant
  misc_feature: MA Experiment ID: 20000264 Result: Up-regulated in Transcription
  misc_feature: MA Experiment 20000264 PARAMETER Experiment Name: At_Open_Flower_P Parameter: Age (day) Value: 21
  misc_feature: MA Experiment 20000264 PARAMETER Experiment Name: At_Open_Flower_P Parameter: Plant Line Value: WS
  misc_feature: MA Experiment 20000264 PARAMETER Experiment Name: At_Open_Flower_P Parameter: Tissue Value: Open Flower vs. Whole Plant
  misc_feature: MA Experiment ID: 20001557 Result: Up-regulated in Transcription
  misc_feature: MA Experiment 20001557 PARAMETER Experiment Name: At_Drought_Soil_Dry_P Parameter: Age (day) Value: 27
  misc_feature: MA Experiment 20001557 PARAMETER Experiment Name: At_Drought_Soil_Dry_P Parameter: Organism Value: A. thaliana
  misc_feature: MA Experiment 20001557 PARAMETER Experiment Name: At_Drought_Soil_Dry_P Parameter: Plant Line Value: WS
  misc_feature: MA Experiment 20001557 PARAMETER Experiment Name: At_Drought_Soil_Dry_P Parameter: Post Timepoint (hr) Value: 3
  misc_feature: MA Experiment 20001557 PARAMETER Experiment Name: At_Drought_Soil_Dry_P Parameter: Post-Treatment Value: Re-Water vs. No Drought
  misc_feature: MA Experiment 20001557 PARAMETER Experiment Name: At_Drought_Soil_Dry_P Parameter: Timepoint (day) Value: 13
  misc_feature: MA Experiment 20001557 PARAMETER Experiment Name: At_Drought_Soil_Dry_P Parameter: Treatment Value: Drought vs. No Drought
  misc_feature: MA Experiment ID: 20001558 Result: Up-regulated in Transcription
  misc_feature: MA Experiment 20001558 PARAMETER Experiment Name: At_Drought_Soil_Dry_P Parameter: Age (day) Value: 27
  misc_feature: MA Experiment 20001558 PARAMETER Experiment Name: At_Drought_Soil_Dry_P Parameter: Organism Value: A. thaliana
  misc_feature: MA Experiment 20001558 PARAMETER Experiment Name: At_Drought_Soil_Dry_P Parameter: Plant Line Value: WS
  misc_feature: MA Experiment 20001558 PARAMETER Experiment Name: At_Drought_Soil_Dry_P Parameter: Post Timepoint (hr) Value: 6
  misc_feature: MA Experiment 20001558 PARAMETER Experiment Name: At_Drought_Soil_Dry_P Parameter: Post-Treatment Value: Re-Water vs. No Drought
  misc_feature: MA Experiment 20001558 PARAMETER Experiment Name: At_Drought_Soil_Dry_P Parameter: Timepoint (day) Value: 13
  misc_feature: MA Experiment 20001558 PARAMETER Experiment Name: At_Drought_Soil_Dry_P Parameter: Treatment Value: Drought vs. No Drought

SEQ ID NO: 31669 - protein, 418 aa, Arabidopsis thaliana; identical to SEQ ID NO: 28079
  peptide (1)..(418): Ceres Seq. ID no. 12324909
  misc_feature (138)..(172): Pfam Name: PPR repeat Pfam Description: PPR repeat
  misc_feature (1)..(371): Homolog of NCBI NO: 21617993 NR Description: unknown [Arabidopsis thaliana]
  misc_feature (6)..(376): Homolog of NCBI NO: 26453140 NR Description: unknown protein [Arabidopsis thaliana]
  misc_feature (6)..(376): Homolog of NCBI NO: 25406637 NR Description: hypothetical protein F18B13.23 [imported] -
  misc_feature (6)..(376): Homolog of NCBI NO: 15220068 NR Description: hypothetical protein; protein id: At1g80150.1
  misc_feature (11)..(371): Homolog of NCBI NO: 15222796 NR Description: unknown protein
  misc_feature (8)..(389): Homolog of NCBI NO: 21553755 NR Description: putative membrane-associated salt-inducible
  misc_feature (11)..(389): Homolog of NCBI NO: 18407365 NR Description: expressed protein
  misc_feature (1)..(397): Homolog of NCBI NO: 25455786 NR Description: membrane-associated salt-inducible protein like
  misc_feature (1)..(397): Homolog of NCBI NO: 15234493 NR Description: salt-inducible like protein
  misc_feature (1)..(418): Homolog of NCBI NO: 18398767 NR Description: expressed protein

SEQ ID NO: 31670 - protein, 386 aa, Arabidopsis thaliana; identical to SEQ ID NO: 28080
  peptide (1)..(386): Ceres Seq. ID no. 12324910
  misc_feature (106)..(140): Pfam Name: PPR repeat Pfam Description: PPR repeat
  misc_feature (1)..(339): Homolog of NCBI NO: 21617993 NR Description: unknown [Arabidopsis thaliana]
  misc_feature (1)..(344): Homolog of NCBI NO: 26453140 NR Description: unknown protein [Arabidopsis thaliana]
  misc_feature (1)..(344): Homolog of NCBI NO: 25406637 NR Description: hypothetical protein F18B13.23 [imported] -
  misc_feature (1)..(344): Homolog of NCBI NO: 15220068 NR Description: hypothetical protein; protein id: At1g80150.1
  misc_feature (1)..(339): Homolog of NCBI NO: 15222796 NR Description: unknown protein
  misc_feature (1)..(357): Homolog of NCBI NO: 21553755 NR Description: putative membrane-associated salt-inducible
  misc_feature (1)..(357): Homolog of NCBI NO: 18407365 NR Description: expressed protein
  misc_feature (1)..(365): Homolog of NCBI NO: 25455786 NR Description: membrane-associated salt-inducible protein like
  misc_feature (1)..(365): Homolog of NCBI NO: 15234493 NR Description: salt-inducible like protein
  misc_feature (1)..(386): Homolog of NCBI NO: 18398767 NR Description: expressed protein

SEQ ID NO: 31671 - protein, 349 aa, Arabidopsis thaliana; identical to SEQ ID NO: 28081
  peptide (1)..(349): Ceres Seq. ID no. 12324911
  misc_feature (69)..(103): Pfam Name: PPR repeat Pfam Description: PPR repeat
  misc_feature (1)..(302): Homolog of NCBI NO: 21617993 NR Description: unknown [Arabidopsis thaliana]
  misc_feature (1)..(307): Homolog of NCBI NO: 26453140 NR Description: unknown protein [Arabidopsis thaliana]
  misc_feature (1)..(307): Homolog of NCBI NO: 25406637 NR Description: hypothetical protein F18B13.23 [imported] -
  misc_feature (1)..(307): Homolog of NCBI NO: 15220068 NR Description: hypothetical protein; protein id: At1g80150.1
  misc_feature (1)..(302): Homolog of NCBI NO: 15222796 NR Description: unknown protein
  misc_feature (1)..(320): Homolog of NCBI NO: 21553755 NR Description: putative membrane-associated salt-inducible
  misc_feature (1)..(320): Homolog of NCBI NO: 18407365 NR Description: expressed protein
  misc_feature (1)..(328): Homolog of NCBI NO: 25455786 NR Description: membrane-associated salt-inducible protein like
  misc_feature (1)..(328): Homolog of NCBI NO: 15234493 NR Description: salt-inducible like protein
  misc_feature (1)..(349): Homolog of NCBI NO: 18398767 NR Description: expressed protein

SEQ ID NO: 31672 - DNA, 700 bp, Arabidopsis thaliana; identical to SEQ ID NO: 28082
  misc_feature (1)..(700): Ceres Seq. ID no. 12423258
  misc_feature: MA Experiment ID: 108435 Result: Down-regulated in Transcription
  misc_feature: MA Experiment 108435 PARAMETER Experiment Name: At_stm_Mutants_cDNA_P Parameter: Plant Line Value: wt Landsburg vs stm
  misc_feature: MA Experiment 108435 PARAMETER Experiment Name: At_stm_Mutants_cDNA_P Parameter: Tissue Value: Shoot Apical Meristem Region
  misc_feature: MA Experiment ID: 108461 Result: Up-regulated in Transcription
  misc_feature: MA Experiment 108461 PARAMETER Experiment Name: At_Germinating_Seeds_cDNA_P Parameter: Age (day) Value: 1 vs. 0
  misc_feature: MA Experiment 108461 PARAMETER Experiment Name: At_Germinating_Seeds_cDNA_P Parameter: Tissue Value: Germinating Seeds
  misc_feature: MA Experiment ID: 108462 Result: Up-regulated in Transcription
  misc_feature: MA Experiment 108462 PARAMETER Experiment Name: At_Germinating_Seeds_cDNA_P Parameter: Age (day) Value: 2 vs. 0
  misc_feature: MA Experiment 108462 PARAMETER Experiment Name: At_Germinating_Seeds_cDNA_P Parameter: Tissue Value: Germinating Seeds
  misc_feature: MA Experiment ID: 108463 Result: Up-regulated in Transcription
  misc_feature: MA Experiment 108463 PARAMETER Experiment Name: At_Germinating_Seeds_cDNA_P Parameter: Age (day) Value: 3 vs. 0
  misc_feature: MA Experiment 108463 PARAMETER Experiment Name: At_Germinating_Seeds_cDNA_P Parameter: Tissue Value: Germinating Seeds
  misc_feature: MA Experiment ID: 108501 Result: Down-regulated in Transcription
  misc_feature: MA Experiment 108501 PARAMETER Experiment Name: At_ap2_floral_buds_cDNA_P Parameter: Plant Line Value: ap2 (Ler.)
  misc_feature: MA Experiment 108501 PARAMETER Experiment Name: At_ap2_floral_buds_cDNA_P Parameter: Tissue Value: Closed Flower
  misc_feature: MA Experiment ID: 108577 Result: Down-regulated in Transcription
  misc_feature: MA Experiment 108577 PARAMETER Experiment Name: At_42deg_Heat_cDNA_P Parameter: Temperature (deg C) Value: 42 vs. 22
  misc_feature: MA Experiment 108577 PARAMETER Experiment Name: At_42deg_Heat_cDNA_P Parameter: Timepoint (hr) Value: 6
  misc_feature: MA Experiment 108577 PARAMETER Experiment Name: At_42deg_Heat_cDNA_P Parameter: Tissue Value: Aerial
  misc_feature: MA Experiment ID: 108594 Result: Up-regulated in Transcription
  misc_feature: MA Experiment 108594 PARAMETER Experiment Name: At_Ler-rhl_Root_cDNA_P Parameter: Plant Line Value: null
  misc_feature: MA Experiment ID: 108595 Result: Down-regulated in Transcription
  misc_feature: MA Experiment 108595 PARAMETER Experiment Name: At_Ler-pi_Ovule_cDNA_P Parameter: Plant Line Value: null
  misc_feature: MA Experiment ID: 20000069 Result: Up-regulated in Transcription
  misc_feature: MA Experiment 20000069 PARAMETER Experiment Name: At_100uM_ABA_Mutants_cDNA_P Parameter: Plant Line Value: CS23
  misc_feature: MA Experiment 20000069 PARAMETER Experiment Name: At_100uM_ABA_Mutants_cDNA_P Parameter: Timepoint (hr) Value: 6
  misc_feature: MA Experiment 20000069 PARAMETER Experiment Name: At_100uM_ABA_Mutants_cDNA_P Parameter: Tissue Value: Aerial
  misc_feature: MA Experiment 20000069 PARAMETER Experiment Name: At_100uM_ABA_Mutants_cDNA_P Parameter: Treatment Value: 100uM ABA vs. No Treatment
  misc_feature: MA Experiment ID: 20000089 Result: Up-regulated in Transcription
  misc_feature: MA Experiment ID: 20000090 Result: Up-regulated in Transcription
  misc_feature: MA Experiment ID: 20000111 Result: Down-regulated in Transcription
  misc_feature: MA Experiment 20000111 PARAMETER Experiment Name: At_42deg_Heat_cDNA_P Parameter: Temperature (deg C) Value: 42 vs. 22
  misc_feature: MA Experiment 20000111 PARAMETER Experiment Name: At_42deg_Heat_cDNA_P Parameter: Timepoint (hr) Value: 6
  misc_feature: MA Experiment 20000111 PARAMETER Experiment Name: At_42deg_Heat_cDNA_P Parameter: Tissue Value: Aerial
  misc_feature: MA Experiment ID: 20000112 Result: Down-regulated in Transcription
  misc_feature: MA Experiment 20000112 PARAMETER Experiment Name: At_42deg_Heat_cDNA_P Parameter: Temperature (deg C) Value: 42 vs. 22
  misc_feature: MA Experiment 20000112 PARAMETER Experiment Name: At_42deg_Heat_cDNA_P Parameter: Timepoint (hr) Value: 2
  misc_feature: MA Experiment 20000112 PARAMETER Experiment Name: At_42deg_Heat_cDNA_P Parameter: Tissue Value: Aerial
  misc_feature: MA Experiment ID: 20000113 Result: Down-regulated in Transcription
  misc_feature: MA Experiment 20000113 PARAMETER Experiment Name: At_42deg_Heat_cDNA_P Parameter: Temperature (deg C) Value: 42 vs. 22
  misc_feature: MA Experiment 20000113 PARAMETER Experiment Name: At_42deg_Heat_cDNA_P Parameter: Timepoint (hr) Value: 8
  misc_feature: MA Experiment 20000113 PARAMETER Experiment Name: At_42deg_Heat_cDNA_P Parameter: Tissue Value: Aerial
  misc_feature: MA Experiment ID: 20000173 Result: Down-regulated in Transcription
  misc_feature: MA Experiment 20000173 PARAMETER Experiment Name: At_42deg_Heat_P Parameter: Age (day) Value: 14
  misc_feature: MA Experiment 20000173 PARAMETER Experiment Name: At_42deg_Heat_P Parameter: Organism Value: A. thaliana
  misc_feature: MA Experiment 20000173 PARAMETER Experiment Name: At_42deg_Heat_P Parameter: Plant Line Value: WS
  misc_feature: MA Experiment 20000173 PARAMETER Experiment Name: At_42deg_Heat_P Parameter: Temperature (deg C) Value: 42 vs. 22
  misc_feature: MA Experiment 20000173 PARAMETER Experiment Name: At_42deg_Heat_P Parameter: Timepoint (hr) Value: 6
  misc_feature: MA Experiment 20000173 PARAMETER Experiment Name: At_42deg_Heat_P Parameter: Tissue Value: Aerial
  misc_feature: MA Experiment ID: 20000180 Result: Up-regulated in Transcription
  misc_feature: MA Experiment 20000180 PARAMETER Experiment Name: At_Germinating_Seeds_P Parameter: Age (hr) Value: 24 vs. 0
  misc_feature: MA Experiment 20000180 PARAMETER Experiment Name: At_Germinating_Seeds_P Parameter: Tissue Value: Germinating Seeds
  misc_feature: MA Experiment ID: 20000182 Result: Down-regulated in Transcription
  misc_feature: MA Experiment 20000182 PARAMETER Experiment Name: At_2mM_SA_P Parameter: Age (day) Value: 14
  misc_feature: MA Experiment 20000182 PARAMETER Experiment Name: At_2mM_SA_P Parameter: Organism Value: A. thaliana
  misc_feature: MA Experiment 20000182 PARAMETER Experiment Name: At_2mM_SA_P Parameter: Plant Line Value: WS
  misc_feature: MA Experiment 20000182 PARAMETER Experiment Name: At_2mM_SA_P Parameter: Timepoint (hr) Value: 6
  misc_feature: MA Experiment 20000182 PARAMETER Experiment Name: At_2mM_SA_P Parameter: Tissue Value: Aerial
  misc_feature: MA Experiment 20000182 PARAMETER Experiment Name: At_2mM_SA_P Parameter: Treatment Value: 2mM SA vs. No Treatment
  misc_feature: MA Experiment ID: 20000185 Result: Down-regulated in Transcription
  misc_feature: MA Experiment 20000185 PARAMETER Experiment Name: At_Roots__P Parameter: Age (day) Value: 7 vs. 21
  misc_feature: MA Experiment 20000185 PARAMETER Experiment Name: At_Roots__P Parameter: Organism Value: A. thaliana
  misc_feature: MA Experiment 20000185 PARAMETER Experiment Name: At_Roots__P Parameter: Tissue Value: Roots vs. Whole Plant
  misc_feature: MA Experiment ID: 20000224 Result: Down-regulated in Transcription
  misc_feature: MA Experiment ID: 20000234 Result: Down-regulated in Transcription
  misc_feature: MA Experiment 20000234 PARAMETER Experiment Name: At_Siliques_P Parameter: Age (day) Value: 21
  misc_feature: MA Experiment 20000234 PARAMETER Experiment Name: At_Siliques_P Parameter: Organism Value: A. thaliana
  misc_feature: MA Experiment 20000234 PARAMETER Experiment Name: At_Siliques_P Parameter: Plant Line Value: WS
  misc_feature: MA Experiment 20000234 PARAMETER Experiment Name: At_Siliques_P Parameter: Tissue Value: Less Than 5mm Siliques vs. Whole Plant
  misc_feature: MA Experiment ID: 20000264 Result: Down-regulated in Transcription
  misc_feature: MA Experiment 20000264 PARAMETER Experiment Name: At_Open_Flower_P Parameter: Age (day) Value: 21
  misc_feature: MA Experiment 20000264 PARAMETER Experiment Name: At_Open_Flower_P Parameter: Plant Line Value: WS
  misc_feature: MA Experiment 20000264 PARAMETER Experiment Name: At_Open_Flower_P Parameter: Tissue Value: Open Flower vs. Whole Plant
  misc_feature: MA Experiment ID: 20000265 Result: Down-regulated in Transcription
  misc_feature: MA Experiment 20000265 PARAMETER Experiment Name: At_Open_Flower_P Parameter: Age (day) Value: 21
  misc_feature: MA Experiment 20000265 PARAMETER Experiment Name: At_Open_Flower_P Parameter: Plant Line Value: WS
  misc_feature: MA Experiment 20000265 PARAMETER Experiment Name: At_Open_Flower_P Parameter: Tissue Value: Closed Flower vs. Whole Plant
  misc_feature: MA Experiment ID: 20000286 Result: Down-regulated in Transcription
  misc_feature: MA Experiment 20000286 PARAMETER Experiment Name: At_Open_Flower_P Parameter: Age (day) Value: 21
  misc_feature: MA Experiment 20000286 PARAMETER Experiment Name: At_Open_Flower_P Parameter: Plant Line Value: WS
  misc_feature: MA Experiment 20000286 PARAMETER Experiment Name: At_Open_Flower_P Parameter: Tissue Value: Half Open vs. Whole Plant
  misc_feature: MA Experiment ID: 20000439 Result: Down-regulated in Transcription
  misc_feature: MA Experiment 20000439 PARAMETER Experiment Name: At_Roots__P Parameter: Age (day) Value: 14 vs. 21
  misc_feature: MA Experiment 20000439 PARAMETER Experiment Name: At_Roots__P Parameter: Organism Value: A. thaliana
  misc_feature: MA Experiment 20000439 PARAMETER Experiment Name: At_Roots__P Parameter: Tissue Value: Roots vs. Whole Plant
  misc_feature: MA Experiment ID: 20000452 Result: Up-regulated in Transcription
  misc_feature: MA Experiment 20000452 PARAMETER Experiment Name: At_CS6879_Shoots-Roots_P Parameter: Age (day) Value: 14
  misc_feature: MA Experiment 20000452 PARAMETER Experiment Name: At_CS6879_Shoots-Roots_P Parameter: Organism Value: A. thaliana
  misc_feature: MA Experiment 20000452 PARAMETER Experiment Name: At_CS6879_Shoots-Roots_P Parameter: Plant Line Value: CS6879 vs. WS
  misc_feature: MA Experiment 20000452 PARAMETER Experiment Name: At_CS6879_Shoots-Roots_P Parameter: Tissue Value: Shoots
  misc_feature: MA Experiment ID: 20000794 Result: Down-regulated in Transcription
  misc_feature: MA Experiment 20000794 PARAMETER Experiment Name: At_Petals_P Parameter: Age (day) Value: 23-25 days
  misc_feature: MA Experiment 20000794 PARAMETER Experiment Name: At_Petals_P Parameter: Plant Line Value: WS
  misc_feature: MA Experiment 20000794 PARAMETER Experiment Name: At_Petals_P Parameter: Tissue Value: Petals vs. Whole plant
  misc_feature: MA Experiment ID: 20001248 Result: Up-regulated in Transcription
  misc_feature: MA Experiment 20001248 PARAMETER Experiment Name: At_Far-red-induction_P Parameter: Age (day) Value: 7
  misc_feature: MA Experiment 20001248 PARAMETER Experiment Name: At_Far-red-induction_P Parameter: Light Value: Far-red vs. White
  misc_feature: MA Experiment 20001248 PARAMETER Experiment Name: At_Far-red-induction_P Parameter: Organism Value: A. thaliana
  misc_feature: MA Experiment 20001248 PARAMETER Experiment Name: At_Far-red-induction_P Parameter: Plant Line Value: Columbia
  misc_feature: MA Experiment 20001248 PARAMETER Experiment Name: At_Far-red-induction_P Parameter: Timepoint (hr) Value: 4
  misc_feature: MA Experiment 20001248 PARAMETER Experiment Name: At_Far-red-induction_P Parameter: Tissue Value: Whole Plant
  misc_feature: MA Experiment ID: 20001450 Result: Up-regulated in Transcription
  misc_feature: MA Experiment 20001450 PARAMETER Experiment Name: At_Far-red-induction_P Parameter: Age (day) Value: 7
  misc_feature: MA Experiment 20001450 PARAMETER Experiment Name: At_Far-red-induction_P Parameter: Light Value: Far-red vs. White
  misc_feature: MA Experiment 20001450 PARAMETER Experiment Name: At_Far-red-induction_P Parameter: Organism Value: A. thaliana
  misc_feature: MA Experiment 20001450 PARAMETER Experiment Name: At_Far-red-induction_P Parameter: Plant Line Value: Columbia
  misc_feature: MA Experiment 20001450 PARAMETER Experiment Name: At_Far-red-induction_P Parameter: Timepoint (hr) Value: 8
  misc_feature: MA Experiment 20001450 PARAMETER Experiment Name: At_Far-red-induction_P Parameter: Tissue Value: Whole Plant
  misc_feature: MA Experiment ID: 20001555 Result: Down-regulated in Transcription
  misc_feature: MA Experiment 20001555 PARAMETER Experiment Name: At_Drought_Soil_Dry_P Parameter: Age (day) Value: 24
  misc_feature: MA Experiment 20001555 PARAMETER Experiment Name: At_Drought_Soil_Dry_P Parameter: Organism Value: A. thaliana
  misc_feature: MA Experiment 20001555 PARAMETER Experiment Name: At_Drought_Soil_Dry_P Parameter: Plant Line Value: WS
  misc_feature: MA Experiment 20001555 PARAMETER Experiment Name: At_Drought_Soil_Dry_P Parameter: Post Timepoint (hr) Value: None
  misc_feature: MA Experiment 20001555 PARAMETER Experiment Name: At_Drought_Soil_Dry_P Parameter: Post-Treatment Value: None
  misc_feature: MA Experiment 20001555 PARAMETER Experiment Name: At_Drought_Soil_Dry_P Parameter: Timepoint (day) Value: 10
  misc_feature: MA Experiment 20001555 PARAMETER Experiment Name: At_Drought_Soil_Dry_P Parameter: Treatment Value: Drought vs. No Drought
  misc_feature: MA Experiment ID: 20001556 Result: Down-regulated in Transcription
  misc_feature: MA Experiment 20001556 PARAMETER Experiment Name: At_Drought_Soil_Dry_P Parameter: Age (day) Value: 26
  misc_feature: MA Experiment 20001556 PARAMETER Experiment Name: At_Drought_Soil_Dry_P Parameter: Organism Value: A. thaliana
  misc_feature: MA Experiment 20001556 PARAMETER Experiment Name: At_Drought_Soil_Dry_P Parameter: Plant Line Value: WS
  misc_feature: MA Experiment 20001556 PARAMETER Experiment Name: At_Drought_Soil_Dry_P Parameter: Post Timepoint (hr) Value: None
  misc_feature: MA Experiment 20001556 PARAMETER Experiment Name: At_Drought_Soil_Dry_P Parameter: Post-Treatment Value: None
  misc_feature: MA Experiment 20001556 PARAMETER Experiment Name: At_Drought_Soil_Dry_P Parameter: Timepoint (day) Value: 12
  misc_feature: MA Experiment 20001556 PARAMETER Experiment Name: At_Drought_Soil_Dry_P Parameter: Treatment Value: Drought vs. No Drought
  misc_feature: MA Experiment ID: 20001557 Result: Down-regulated in Transcription
  misc_feature: MA Experiment 20001557 PARAMETER Experiment Name: At_Drought_Soil_Dry_P Parameter: Age (day) Value: 27
  misc_feature: MA Experiment 20001557 PARAMETER Experiment Name: At_Drought_Soil_Dry_P Parameter: Organism Value: A. thaliana
  misc_feature: MA Experiment 20001557 PARAMETER Experiment Name: At_Drought_Soil_Dry_P Parameter: Plant Line Value: WS
  misc_feature: MA Experiment 20001557 PARAMETER Experiment Name: At_Drought_Soil_Dry_P Parameter: Post Timepoint (hr) Value: 3
  misc_feature: MA Experiment 20001557 PARAMETER Experiment Name: At_Drought_Soil_Dry_P Parameter: Post-Treatment Value: Re-Water vs. No Drought
  misc_feature: MA Experiment 20001557 PARAMETER Experiment Name: At_Drought_Soil_Dry_P Parameter: Timepoint (day) Value: 13
  misc_feature: MA Experiment 20001557 PARAMETER Experiment Name: At_Drought_Soil_Dry_P Parameter: Treatment Value: Drought vs. No Drought
  misc_feature: MA Experiment ID: 20001558 Result: Down-regulated in Transcription
  misc_feature: MA Experiment 20001558 PARAMETER Experiment Name: At_Drought_Soil_Dry_P Parameter: Age (day) Value: 27
  misc_feature: MA Experiment 20001558 PARAMETER Experiment Name: At_Drought_Soil_Dry_P Parameter: Organism Value: A. thaliana
  misc_feature: MA Experiment 20001558 PARAMETER Experiment Name: At_Drought_Soil_Dry_P Parameter: Plant Line Value: WS
  misc_feature: MA Experiment 20001558 PARAMETER Experiment Name: At_Drought_Soil_Dry_P Parameter: Post Timepoint (hr) Value: 6
  misc_feature: MA Experiment 20001558 PARAMETER Experiment Name: At_Drought_Soil_Dry_P Parameter: Post-Treatment Value: Re-Water vs. No Drought
  misc_feature: MA Experiment 20001558 PARAMETER Experiment Name: At_Drought_Soil_Dry_P Parameter: Timepoint (day) Value: 13
  misc_feature: MA Experiment 20001558 PARAMETER Experiment Name: At_Drought_Soil_Dry_P Parameter: Treatment Value: Drought vs. No Drought
  misc_feature: MA Experiment ID: 20001559 Result: Down-regulated in Transcription
  misc_feature: MA Experiment 20001559 PARAMETER Experiment Name: At_Drought_Soil_Dry_P Parameter: Age (day) Value: 28
  misc_feature: MA Experiment 20001559 PARAMETER Experiment Name: At_Drought_Soil_Dry_P Parameter: Organism Value: A. thaliana
  misc_feature: MA Experiment 20001559 PARAMETER Experiment Name: At_Drought_Soil_Dry_P Parameter: Plant Line Value: WS
  misc_feature: MA Experiment 20001559 PARAMETER Experiment Name: At_Drought_Soil_Dry_P Parameter: Post Timepoint (hr) Value: 29
  misc_feature: MA Experiment 20001559 PARAMETER Experiment Name: At_Drought_Soil_Dry_P Parameter: Post-Treatment Value: Re-Water vs. No Drought
  misc_feature: MA Experiment 20001559 PARAMETER Experiment Name: At_Drought_Soil_Dry_P Parameter: Timepoint (day) Value: 14
  misc_feature: MA Experiment 20001559 PARAMETER Experiment Name: At_Drought_Soil_Dry_P Parameter: Treatment Value: Drought vs. No Drought
  misc_feature: MA Experiment ID: 20001757 Result: Up-regulated in Transcription
  misc_feature: MA Experiment 20001757 PARAMETER Experiment Name: At_50mM_NH4NO3_L-to-H_P Parameter: Timepoint (hr) Value: 6
  misc_feature: MA Experiment 20001757 PARAMETER Experiment Name: At_50mM_NH4NO3_L-to-H_P Parameter: Tissue Value: Leaf
  misc_feature: MA Experiment 20001757 PARAMETER Experiment Name: At_50mM_NH4NO3_L-to-H_P Parameter: Treatment Value: 50mM NH4NO3 vs 100mM Mannitol
  misc_feature: MA Experiment ID: 20001904 Result: Down-regulated in Transcription
  misc_feature: MA Experiment 20001904 PARAMETER Experiment Name: At_Drought_Reproduction_P Parameter: Age (day) Value: 37
  misc_feature: MA Experiment 20001904 PARAMETER Experiment Name: At_Drought_Reproduction_P Parameter: Organism Value: A. thaliana
  misc_feature: MA Experiment 20001904 PARAMETER Experiment Name: At_Drought_Reproduction_P Parameter: Plant Line Value: WS
  misc_feature: MA Experiment 20001904 PARAMETER Experiment Name: At_Drought_Reproduction_P Parameter: Timepoint (day) Value: 7
  misc_feature: MA Experiment 20001904 PARAMETER Experiment Name: At_Drought_Reproduction_P Parameter: Tissue Value: Rosettes
  misc_feature: MA Experiment 20001904 PARAMETER Experiment Name: At_Drought_Reproduction_P Parameter: Treatment Value: Drought vs. No Drought
  misc_feature: MA Experiment ID: 20001906 Result: Down-regulated in Transcription
  misc_feature: MA Experiment 20001906 PARAMETER Experiment Name: At_Drought_Reproduction_P Parameter: Age (day) Value: 35
  misc_feature: MA Experiment 20001906 PARAMETER Experiment Name: At_Drought_Reproduction_P Parameter: Organism Value: A. thaliana
  misc_feature: MA Experiment 20001906 PARAMETER Experiment Name: At_Drought_Reproduction_P Parameter: Plant Line Value: WS
  misc_feature: MA Experiment 20001906 PARAMETER Experiment Name: At_Drought_Reproduction_P Parameter: Timepoint (day) Value: 5
  misc_feature: MA Experiment 20001906 PARAMETER Experiment Name: At_Drought_Reproduction_P Parameter: Tissue Value: Siliques
  misc_feature: MA Experiment 20001906 PARAMETER Experiment Name: At_Drought_Reproduction_P Parameter: Treatment Value: Drought vs. No Drought

SEQ ID NO: 31673 - protein, 129 aa, Arabidopsis thaliana; identical to SEQ ID NO: 28083
  peptide (1)..(129): Ceres Seq. ID no. 12423259
  misc_feature (22)..(127): Homolog of NCBI NO: 14719330 NR Description: unknown protein [Oryza sativa]
  misc_feature (1)..(81): Homolog of NCBI NO: 15241706 NR Description: putative protein
  misc_feature (1)..(129): Homolog of NCBI NO: 11762216 NR Description: AT5g02160 [Arabidopsis thaliana]

SEQ ID NO: 31674 - DNA, 1277 bp, Arabidopsis thaliana; identical to SEQ ID NO: 28084
  misc_feature (1)..(1277): Ceres Seq. ID no. 12324789
  misc_feature: MA Experiment ID: 108433 Result: Down-regulated in Transcription
  misc_feature: MA Experiment 108433 PARAMETER Experiment Name: At_rhl_Mutant2_cDNA_P Parameter: Age (day) Value: 7
  misc_feature: MA Experiment 108433 PARAMETER Experiment Name: At_rhl_Mutant2_cDNA_P Parameter: Organism Value: A. thaliana
  misc_feature: MA Experiment 108433 PARAMETER Experiment Name: At_rhl_Mutant2_cDNA_P Parameter: Plant Line Value: rhl Mutant vs. wt landsburg
  misc_feature: MA Experiment 108433 PARAMETER Experiment Name: At_rhl_Mutant2_cDNA_P Parameter: Tissue Value: Roots
  misc_feature: MA Experiment ID: 108434 Result: Up-regulated in Transcription
  misc_feature: MA Experiment 108434 PARAMETER Experiment Name: At_Root_Tips_cDNA_P Parameter: Tissue Value: Root Tips
  misc_feature: MA Experiment ID: 108464 Result: Down-regulated in Transcription
  misc_feature: MA Experiment 108464 PARAMETER Experiment Name: At_Germinating_Seeds_cDNA_P Parameter: Age (day) Value: 4 vs. 0
  misc_feature: MA Experiment 108464 PARAMETER Experiment Name: At_Germinating_Seeds_cDNA_P Parameter: Tissue Value: Germinating Seeds
  misc_feature: MA Experiment ID: 108576 Result: Up-regulated in Transcription
  misc_feature: MA Experiment 108576 PARAMETER Experiment Name: At_42deg_Heat_cDNA_P Parameter: Temperature (deg C) Value: 42 vs. 22
  misc_feature: MA Experiment 108576 PARAMETER Experiment Name: At_42deg_Heat_cDNA_P Parameter: Timepoint (hr) Value: 1
  misc_feature: MA Experiment 108576 PARAMETER Experiment Name: At_42deg_Heat_cDNA_P Parameter: Tissue Value: Aerial
  misc_feature: MA Experiment ID: 108577 Result: Up-regulated in Transcription
  misc_feature: MA Experiment 108577 PARAMETER Experiment Name: At_42deg_Heat_cDNA_P Parameter: Temperature (deg C) Value: 42 vs. 22
  misc_feature: MA Experiment 108577 PARAMETER Experiment Name: At_42deg_Heat_cDNA_P Parameter: Timepoint (hr) Value: 6
  misc_feature: MA Experiment 108577 PARAMETER Experiment Name: At_42deg_Heat_cDNA_P Parameter: Tissue Value: Aerial
  misc_feature: MA Experiment ID: 108579 Result: Up-regulated in Transcription
  misc_feature: MA Experiment 108579 PARAMETER Experiment Name: At_4deg_Cold_cDNA_P Parameter: Temperature (deg C) Value: 4 vs. 22
  misc_feature: MA Experiment 108579 PARAMETER Experiment Name: At_4deg_Cold_cDNA_P Parameter: Timepoint (hr) Value: 6
  misc_feature: MA Experiment 108579 PARAMETER Experiment Name: At_4deg_Cold_cDNA_P Parameter: Tissue Value: Aerial
  misc_feature: MA Experiment ID: 108595 Result: Up-regulated in Transcription
  misc_feature: MA Experiment 108595 PARAMETER Experiment Name: At_Ler-pi_Ovule_cDNA_P Parameter: Plant Line Value: null
  misc_feature: MA Experiment ID: 108607 Result: Down-regulated in Transcription
  misc_feature: MA Experiment 108607 PARAMETER Experiment Name: At_100uM_ABA_cDNA_P Parameter: Timepoint (hr) Value: 4
  misc_feature: MA Experiment 108607 PARAMETER Experiment Name: At_100uM_ABA_cDNA_P Parameter: Tissue Value: Aerial
  misc_feature: MA Experiment 108607 PARAMETER Experiment Name: At_100uM_ABA_cDNA_P Parameter: Treatment Value: 100uM ABA vs. No Treatment
  misc_feature: MA Experiment ID: 108668 Result: Down-regulated in Transcription
  misc_feature: MA Experiment 108668 PARAMETER Experiment Name: At_2mM_SA_cDNA_P Parameter: Plant Line Value: WS
  misc_feature: MA Experiment 108668 PARAMETER Experiment Name: At_2mM_SA_cDNA_P Parameter: Timepoint (hr) Value: 6
  misc_feature: MA Experiment 108668 PARAMETER Experiment Name: At_2mM_SA_cDNA_P Parameter: Treatment Value: 2mM SA vs. No Treatment
  misc_feature: MA Experiment ID: 20000070 Result: Down-regulated in Transcription
  misc_feature: MA Experiment 20000070 PARAMETER Experiment Name: At_100uM_ABA_Mutants_cDNA_P Parameter: Plant Line Value: CS24
  misc_feature: MA Experiment 20000070 PARAMETER Experiment Name: At_100uM_ABA_Mutants_cDNA_P Parameter: Timepoint (hr) Value: 6
  misc_feature: MA Experiment 20000070 PARAMETER Experiment Name: At_100uM_ABA_Mutants_cDNA_P Parameter: Tissue Value: Aerial
  misc_feature: MA Experiment 20000070 PARAMETER Experiment Name: At_100uM_ABA_Mutants_cDNA_P Parameter: Treatment Value: 100uM ABA vs. No Treatment
  misc_feature: MA Experiment ID: 20000093 Result: Up-regulated in Transcription
  misc_feature: MA Experiment 20000093 PARAMETER Experiment Name: At_42deg_Heat_cDNA_P Parameter: Temperature (deg C) Value: 42 vs. 22
  misc_feature: MA Experiment 20000093 PARAMETER Experiment Name: At_42deg_Heat_cDNA_P Parameter: Timepoint (hr) Value: 0.5
  misc_feature: MA Experiment 20000093 PARAMETER Experiment Name: At_42deg_Heat_cDNA_P Parameter: Tissue Value: Aerial
  misc_feature: MA Experiment ID: 20000111 Result: Up-regulated in Transcription
  misc_feature: MA Experiment 20000111 PARAMETER Experiment Name: At_42deg_Heat_cDNA_P Parameter: Temperature (deg C) Value: 42 vs. 22
  misc_feature: MA Experiment 20000111 PARAMETER Experiment Name: At_42deg_Heat_cDNA_P Parameter: Timepoint (hr) Value: 6
  misc_feature: MA Experiment 20000111 PARAMETER Experiment Name: At_42deg_Heat_cDNA_P Parameter: Tissue Value: Aerial
  misc_feature: MA Experiment ID: 20000112 Result: Up-regulated in Transcription
  misc_feature: MA Experiment 20000112 PARAMETER Experiment Name: At_42deg_Heat_cDNA_P Parameter: Temperature (deg C) Value: 42 vs. 22
  misc_feature: MA Experiment 20000112 PARAMETER Experiment Name: At_42deg_Heat_cDNA_P Parameter: Timepoint (hr) Value: 2
  misc_feature: MA Experiment 20000112 PARAMETER Experiment Name: At_42deg_Heat_cDNA_P Parameter: Tissue Value: Aerial
  misc_feature: MA Experiment ID: 20000113 Result: Up-regulated in Transcription
  misc_feature: MA Experiment 20000113 PARAMETER Experiment Name: At_42deg_Heat_cDNA_P Parameter: Temperature (deg C) Value: 42 vs. 22
  misc_feature: MA Experiment 20000113 PARAMETER Experiment Name: At_42deg_Heat_cDNA_P Parameter: Timepoint (hr) Value: 8
  misc_feature: MA Experiment 20000113 PARAMETER Experiment Name: At_42deg_Heat_cDNA_P Parameter: Tissue Value: Aerial
  misc_feature: MA Experiment ID: 20000144 Result: Up-regulated in Transcription
  misc_feature: MA Experiment 20000144 PARAMETER Experiment Name: At_42deg_Heat_cDNA_P Parameter: Temperature (deg C) Value: 42 vs. 22
  misc_feature: MA Experiment 20000144 PARAMETER Experiment Name: At_42deg_Heat_cDNA_P Parameter: Timepoint (hr) Value: 1
  misc_feature: MA Experiment 20000144 PARAMETER Experiment Name: At_42deg_Heat_cDNA_P Parameter: Tissue Value: Aerial
  misc_feature: MA Experiment ID: 20000171 Result: Up-regulated in Transcription
  misc_feature: MA Experiment 20000171 PARAMETER Experiment Name: At_42deg_Heat_P Parameter: Age (day) Value: 14
  misc_feature: MA Experiment 20000171 PARAMETER Experiment Name: At_42deg_Heat_P Parameter: Organism Value: A. thaliana
  misc_feature: MA Experiment 20000171 PARAMETER Experiment Name: At_42deg_Heat_P Parameter: Plant Line Value: WS
  misc_feature: MA Experiment 20000171 PARAMETER Experiment Name: At_42deg_Heat_P Parameter: Temperature (deg C) Value: 42 vs. 22
  misc_feature: MA Experiment 20000171 PARAMETER Experiment Name: At_42deg_Heat_P Parameter: Timepoint (hr) Value: 1
  misc_feature: MA Experiment 20000171 PARAMETER Experiment Name: At_42deg_Heat_P Parameter: Tissue Value: Aerial
  misc_feature: MA Experiment ID: 20000173 Result: Up-regulated in Transcription
  misc_feature: MA Experiment 20000173 PARAMETER Experiment Name: At_42deg_Heat_P Parameter: Age (day) Value: 14
  misc_feature: MA Experiment 20000173 PARAMETER Experiment Name: At_42deg_Heat_P Parameter: Organism Value: A. thaliana
  misc_feature: MA Experiment 20000173 PARAMETER Experiment Name: At_42deg_Heat_P Parameter: Plant Line Value: WS
  misc_feature: MA Experiment 20000173 PARAMETER Experiment Name: At_42deg_Heat_P Parameter: Temperature (deg C) Value: 42 vs. 22
  misc_feature: MA Experiment 20000173 PARAMETER Experiment Name: At_42deg_Heat_P Parameter: Timepoint (hr) Value: 6
  misc_feature: MA Experiment 20000173 PARAMETER Experiment Name: At_42deg_Heat_P Parameter: Tissue Value: Aerial
  misc_feature: MA Experiment ID: 20000179 Result: Up-regulated in Transcription
  misc_feature: MA Experiment 20000179 PARAMETER Experiment Name: At_Germinating_Seeds_P Parameter: Age (hr) Value: 6 vs. 0
  misc_feature: MA Experiment 20000179 PARAMETER Experiment Name: At_Germinating_Seeds_P Parameter: Tissue Value: Germinating Seeds
  misc_feature: MA Experiment ID: 20000180 Result: Up-regulated in Transcription
  misc_feature: MA Experiment 20000180 PARAMETER Experiment Name: At_Germinating_Seeds_P Parameter: Age (hr) Value: 24 vs. 0
  misc_feature: MA Experiment 20000180 PARAMETER Experiment Name: At_Germinating_Seeds_P Parameter: Tissue Value: Germinating Seeds
  misc_feature: MA Experiment ID: 20000182 Result: Down-regulated in Transcription
  misc_feature: MA Experiment 20000182 PARAMETER Experiment Name: At_2mM_SA_P Parameter: Age (day) Value: 14
  misc_feature: MA Experiment 20000182 PARAMETER Experiment Name: At_2mM_SA_P Parameter: Organism Value: A. thaliana
  misc_feature: MA Experiment 20000182 PARAMETER Experiment Name: At_2mM_SA_P Parameter: Plant Line Value: WS
  misc_feature: MA Experiment 20000182 PARAMETER Experiment Name: At_2mM_SA_P Parameter: Timepoint (hr) Value: 6
  misc_feature: MA Experiment 20000182 PARAMETER Experiment Name: At_2mM_SA_P Parameter: Tissue Value: Aerial
  misc_feature: MA Experiment 20000182 PARAMETER Experiment Name: At_2mM_SA_P Parameter: Treatment Value: 2mM SA vs. No Treatment
  misc_feature: MA Experiment ID: 20000185 Result: Up-regulated in Transcription
  misc_feature: MA Experiment 20000185 PARAMETER Experiment Name: At_Roots__P Parameter: Age (day) Value: 7 vs. 21
  misc_feature: MA Experiment 20000185 PARAMETER Experiment Name: At_Roots__P Parameter: Organism Value: A. thaliana
  misc_feature: MA Experiment 20000185 PARAMETER Experiment Name: At_Roots__P Parameter: Tissue Value: Roots vs. Whole Plant
  misc_feature: MA Experiment ID: 20000227 Result: Up-regulated in Transcription
  misc_feature: MA Experiment 20000227 PARAMETER Experiment Name: At_Root-Tips-vs-Tops_P Parameter: Tissue Value: Root Tips vs. Root Tops
  misc_feature: MA Experiment ID: 20000234 Result: Up-regulated in Transcription
  misc_feature: MA Experiment 20000234 PARAMETER Experiment Name: At_Siliques_P Parameter: Age (day) Value: 21
  misc_feature: MA Experiment 20000234 PARAMETER Experiment Name: At_Siliques_P Parameter: Organism Value: A. thaliana
  misc_feature: MA Experiment 20000234 PARAMETER Experiment Name: At_Siliques_P Parameter: Plant Line Value: WS
  misc_feature: MA Experiment 20000234 PARAMETER Experiment Name: At_Siliques_P Parameter: Tissue Value: Less Than 5mm Siliques vs. Whole Plant
  misc_feature: MA Experiment ID: 20000235 Result: Up-regulated in Transcription
  misc_feature: MA Experiment 20000235 PARAMETER Experiment Name: At_Siliques_P Parameter: Age (day) Value: 21
  misc_feature: MA Experiment 20000235 PARAMETER Experiment Name: At_Siliques_P Parameter: Organism Value: A. thaliana
  misc_feature: MA Experiment 20000235 PARAMETER Experiment Name: At_Siliques_P Parameter: Plant Line Value: WS
  misc_feature: MA Experiment 20000235 PARAMETER Experiment Name: At_Siliques_P Parameter: Tissue Value: 5-10mm Siliques vs. Whole Plant
  misc_feature: MA Experiment ID: 20000264 Result: Up-regulated in Transcription
  misc_feature: MA Experiment 20000264 PARAMETER Experiment Name: At_Open_Flower_P Parameter: Age (day) Value: 21
  misc_feature: MA Experiment 20000264 PARAMETER Experiment Name: At_Open_Flower_P Parameter: Plant Line Value: WS
  misc_feature: MA Experiment 20000264 PARAMETER Experiment Name: At_Open_Flower_P Parameter: Tissue Value: Open Flower vs. Whole Plant
  misc_feature: MA Experiment ID: 20000265 Result: Up-regulated in Transcription
  misc_feature: MA Experiment 20000265 PARAMETER Experiment Name: At_Open_Flower_P Parameter: Age (day) Value: 21
  misc_feature: MA Experiment 20000265 PARAMETER Experiment Name: At_Open_Flower_P Parameter: Plant Line Value: WS
  misc_feature: MA Experiment 20000265 PARAMETER Experiment Name: At_Open_Flower_P Parameter: Tissue Value: Closed Flower vs. Whole Plant
  misc_feature: MA Experiment ID: 20000286 Result: Up-regulated in Transcription
  misc_feature: MA Experiment 20000286 PARAMETER Experiment Name: At_Open_Flower_P Parameter: Age (day) Value: 21
  misc_feature: MA Experiment 20000286 PARAMETER Experiment Name: At_Open_Flower_P Parameter: Plant Line Value: WS
  misc_feature: MA Experiment 20000286 PARAMETER Experiment Name: At_Open_Flower_P Parameter: Tissue Value: Half Open vs. Whole Plant
  misc_feature: MA Experiment ID: 20000451 Result: Up-regulated in Transcription
  misc_feature: MA Experiment 20000451 PARAMETER Experiment Name: At_CS6879_Shoots-Roots_P Parameter: Age (day) Value: 14
  misc_feature: MA Experiment 20000451 PARAMETER Experiment Name: At_CS6879_Shoots-Roots_P Parameter: Organism Value: A. thaliana
  misc_feature: MA Experiment 20000451 PARAMETER Experiment Name: At_CS6879_Shoots-Roots_P Parameter: Plant Line Value: CS6879 vs. WS
  misc_feature: MA Experiment 20000451 PARAMETER Experiment Name: At_CS6879_Shoots-Roots_P Parameter: Tissue Value: Roots
  misc_feature: MA Experiment ID: 20001557 Result: Up-regulated in Transcription
  misc_feature: MA Experiment 20001557 PARAMETER Experiment Name: At_Drought_Soil_Dry_P Parameter: Age (day) Value: 27
  misc_feature: MA Experiment 20001557 PARAMETER Experiment Name: At_Drought_Soil_Dry_P Parameter: Organism Value: A. thaliana
  misc_feature: MA Experiment 20001557 PARAMETER Experiment Name: At_Drought_Soil_Dry_P Parameter: Plant Line Value: WS
  misc_feature: MA Experiment 20001557 PARAMETER Experiment Name: At_Drought_Soil_Dry_P Parameter: Post Timepoint (hr) Value: 3
  misc_feature: MA Experiment 20001557 PARAMETER Experiment Name: At_Drought_Soil_Dry_P Parameter: Post-Treatment Value: Re-Water vs. No Drought
  misc_feature: MA Experiment 20001557 PARAMETER Experiment Name: At_Drought_Soil_Dry_P Parameter: Timepoint (day) Value: 13
  misc_feature: MA Experiment 20001557 PARAMETER Experiment Name: At_Drought_Soil_Dry_P Parameter: Treatment Value: Drought vs. No Drought
  misc_feature: MA Experiment ID: 20001558 Result: Up-regulated in Transcription
  misc_feature: MA Experiment 20001558 PARAMETER Experiment Name: At_Drought_Soil_Dry_P Parameter: Age (day) Value: 27
  misc_feature: MA Experiment 20001558 PARAMETER Experiment Name: At_Drought_Soil_Dry_P Parameter: Organism Value: A. thaliana
  misc_feature: MA Experiment 20001558 PARAMETER Experiment Name: At_Drought_Soil_Dry_P Parameter: Plant Line Value: WS
  misc_feature: MA Experiment 20001558 PARAMETER Experiment Name: At_Drought_Soil_Dry_P Parameter: Post Timepoint (hr) Value: 6
  misc_feature: MA Experiment 20001558 PARAMETER Experiment Name: At_Drought_Soil_Dry_P Parameter: Post-Treatment Value: Re-Water vs. No Drought
  misc_feature: MA Experiment 20001558 PARAMETER Experiment Name: At_Drought_Soil_Dry_P Parameter: Timepoint (day) Value: 13
  misc_feature: MA Experiment 20001558 PARAMETER Experiment Name: At_Drought_Soil_Dry_P Parameter: Treatment Value: Drought vs. No Drought
  misc_feature: MA Experiment ID: 20001560 Result: Up-regulated in Transcription
  misc_feature: MA Experiment 20001560 PARAMETER Experiment Name: At_Drought_Soil_Dry_P Parameter: Age (day) Value: 28
  misc_feature: MA Experiment 20001560 PARAMETER Experiment Name: At_Drought_Soil_Dry_P Parameter: Organism Value: A. thaliana
  misc_feature: MA Experiment 20001560 PARAMETER Experiment Name: At_Drought_Soil_Dry_P Parameter: Plant Line Value: WS
  misc_feature: MA Experiment 20001560 PARAMETER Experiment Name: At_Drought_Soil_Dry_P Parameter: Post Timepoint (hr) Value: None
  misc_feature: MA Experiment 20001560 PARAMETER Experiment Name: At_Drought_Soil_Dry_P Parameter: Post-Treatment Value: None
  misc_feature: MA Experiment 20001560 PARAMETER Experiment Name: At_Drought_Soil_Dry_P Parameter: Timepoint (day) Value: 14
  misc_feature: MA Experiment 20001560 PARAMETER Experiment Name: At_Drought_Soil_Dry_P Parameter: Treatment Value: Drought vs. No Drought
  misc_feature: MA Experiment ID: 20001911 Result: Down-regulated in Transcription
  misc_feature: MA Experiment 20001911 PARAMETER Experiment Name: At_Drought_Reproduction_P Parameter: Age (day) Value: 40
  misc_feature: MA Experiment 20001911 PARAMETER Experiment Name: At_Drought_Reproduction_P Parameter: Organism Value: A. thaliana
  misc_feature: MA Experiment 20001911 PARAMETER Experiment Name: At_Drought_Reproduction_P Parameter: Plant Line Value: WS
  misc_feature: MA Experiment 20001911 PARAMETER Experiment Name: At_Drought_Reproduction_P Parameter: Timepoint (day) Value: 10
  misc_feature: MA Experiment 20001911 PARAMETER Experiment Name: At_Drought_Reproduction_P Parameter: Tissue Value: Flowers
  misc_feature: MA Experiment 20001911 PARAMETER Experiment Name: At_Drought_Reproduction_P Parameter: Treatment Value: Drought vs. No Drought

SEQ ID NO: 31675 - protein, 356 aa, Arabidopsis thaliana; identical to SEQ ID NO: 28085
  peptide (1)..(356): Ceres Seq. ID no. 12324790
  misc_feature (49)..(334): Pfam Name: Aminotransferase class IV Pfam Description: Aminotransferase class IV
  misc_feature (19)..(351): Homolog of NCBI NO: 18408919 NR Description: branched-chain-amino-acid transaminase -like
  misc_feature (10)..(351): Homolog of NCBI NO: 26391655 NR Description: Branched-chain amino acid aminotransferase 5,
  misc_feature (19)..(352): Homolog of NCBI NO: 34902362 NR Description: Putative aminotransferase
  misc_feature (1)..(351): Homolog of NCBI NO: 6319167 NR Description: branched-chain amino acid aminotransferase
  misc_feature (4)..(352): Homolog of NCBI NO: 27311239 NR Description: Unknown protein [Oryza sativa (japonica
  misc_feature (1)..(352): Homolog of NCBI NO: 15218409 NR Description: tat-binding protein, putative
  misc_feature (1)..(352): Homolog of NCBI NO: 15230923 NR Description: branched-chain amino acid aminotransferase,
  misc_feature (1)..(356): Homolog of NCBI NO: 15222881 NR Description: branched-chain amino acid aminotransferase,
  misc_feature (1)..(356): Homolog of NCBI NO: 21617893 NR Description: branched-chain amino acid aminotransferase,
  misc_feature (1)..(356): Homolog of NCBI NO: 15222882 NR Description: branched-chain amino acid aminotransferase,

SEQ ID NO: 31676 - protein, 321 aa, Arabidopsis thaliana; identical to SEQ ID NO: 28086
  peptide (1)..(321): Ceres Seq. ID no. 12324791
  misc_feature (14)..(299): Pfam Name: Aminotransferase class IV Pfam Description: Aminotransferase class IV
  misc_feature (1)..(316): Homolog of NCBI NO: 18408919 NR Description: branched-chain-amino-acid transaminase -like
  misc_feature (1)..(316): Homolog of NCBI NO: 26391655 NR Description: Branched-chain amino acid aminotransferase 5,
  misc_feature (1)..(317): Homolog of NCBI NO: 34902362 NR Description: Putative aminotransferase
  misc_feature (1)..(316): Homolog of NCBI NO: 6319167 NR Description: branched-chain amino acid aminotransferase
  misc_feature (1)..(317): Homolog of NCBI NO: 27311239 NR Description: Unknown protein [Oryza sativa (japonica
  misc_feature (1)..(317): Homolog of NCBI NO: 15218409 NR Description: tat-binding protein, putative
  misc_feature (1)..(317): Homolog of NCBI NO: 15230923 NR Description: branched-chain amino acid aminotransferase,
  misc_feature (1)..(321): Homolog of NCBI NO: 15222881 NR Description: branched-chain amino acid aminotransferase,
  misc_feature (1)..(321): Homolog of NCBI NO: 21617893 NR Description: branched-chain amino acid aminotransferase,
  misc_feature (1)..(321): Homolog of NCBI NO: 15222882 NR Description: branched-chain amino acid aminotransferase,

SEQ ID NO: 31677 - protein, 258 aa, Arabidopsis thaliana; identical to SEQ ID NO: 28087
  peptide (1)..(258): Ceres Seq. ID no. 12324792
  misc_feature (1)..(236): Pfam Name: Aminotransferase class IV Pfam Description: Aminotransferase class IV
  misc_feature (1)..(253): Homolog of NCBI NO: 18408919 NR Description: branched-chain-amino-acid transaminase -like
  misc_feature (1)..(253): Homolog of NCBI NO: 26391655 NR Description: Branched-chain amino acid aminotransferase 5,
  misc_feature (1)..(254): Homolog of NCBI NO: 34902362 NR Description: Putative aminotransferase
  misc_feature (1)..(253): Homolog of NCBI NO: 6319167 NR Description: branched-chain amino acid aminotransferase
  misc_feature (1)..(254): Homolog of NCBI NO: 27311239 NR Description: Unknown protein [Oryza sativa (japonica
  misc_feature (1)..(254): Homolog of NCBI NO: 15218409 NR Description: tat-binding protein, putative
  misc_feature (1)..(254): Homolog of NCBI NO: 15230923 NR Description: branched-chain amino acid aminotransferase,
  misc_feature (1)..(258): Homolog of NCBI NO: 15222881 NR Description: branched-chain amino acid aminotransferase,
  misc_feature (1)..(258): Homolog of NCBI NO: 21617893 NR Description: branched-chain amino acid aminotransferase,
  misc_feature (1)..(258): Homolog of NCBI NO: 15222882 NR Description: branched-chain amino acid aminotransferase,

SEQ ID NO: 31678 - DNA, 1067 bp, Arabidopsis thaliana; identical to SEQ ID NO: 28088
  misc_feature (1)..(1067): Ceres Seq. ID no. 13646184
  misc_feature: MA Experiment ID: 20000234 Result: Down-regulated in Transcription
  misc_feature: MA Experiment 20000234 PARAMETER Experiment Name: At_Siliques_P Parameter: Age (day) Value: 21
  misc_feature: MA Experiment 20000234 PARAMETER Experiment Name: At_Siliques_P Parameter: Organism Value: A. thaliana
  misc_feature: MA Experiment 20000234 PARAMETER Experiment Name: At_Siliques_P Parameter: Plant Line Value: WS
  misc_feature: MA Experiment 20000234 PARAMETER Experiment Name: At_Siliques_P Parameter: Tissue Value: Less Than 5mm Siliques vs. Whole Plant
  misc_feature: MA Experiment ID: 20000235 Result: Down-regulated in Transcription
  misc_feature: MA Experiment 20000235 PARAMETER Experiment Name: At_Siliques_P Parameter: Age (day) Value: 21
  misc_feature: MA Experiment 20000235 PARAMETER Experiment Name: At_Siliques_P Parameter: Organism Value: A. thaliana
  misc_feature: MA Experiment 20000235 PARAMETER Experiment Name: At_Siliques_P Parameter: Plant Line Value: WS
  misc_feature: MA Experiment 20000235 PARAMETER Experiment Name: At_Siliques_P Parameter: Tissue Value: 5-10mm Siliques vs. Whole Plant
  misc_feature: MA Experiment ID: 20000265 Result: Down-regulated in Transcription
  misc_feature: MA Experiment 20000265 PARAMETER Experiment Name: At_Open_Flower_P Parameter: Age (day) Value: 21
  misc_feature: MA Experiment 20000265 PARAMETER Experiment Name: At_Open_Flower_P Parameter: Plant Line Value: WS
  misc_feature: MA Experiment 20000265 PARAMETER Experiment Name: At_Open_Flower_P Parameter: Tissue Value: Closed Flower vs. Whole Plant
  misc_feature: MA Experiment ID: 20000286 Result: Down-regulated in Transcription
  misc_feature: MA Experiment 20000286 PARAMETER Experiment Name: At_Open_Flower_P Parameter: Age (day) Value: 21
  misc_feature: MA Experiment 20000286 PARAMETER Experiment Name: At_Open_Flower_P Parameter: Plant Line Value: WS
  misc_feature: MA Experiment 20000286 PARAMETER Experiment Name: At_Open_Flower_P Parameter: Tissue Value: Half Open vs. Whole Plant
  misc_feature: MA Experiment ID: 20000438 Result: Down-regulated in Transcription
  misc_feature: MA Experiment 20000438 PARAMETER Experiment Name: At_Shoots__P Parameter: Age (day) Value: 14
  misc_feature: MA Experiment 20000438 PARAMETER Experiment Name: At_Shoots__P Parameter: Tissue Value: Shoots vs. Whole Plant
  misc_feature: MA Experiment ID: 20001757 Result: Down-regulated in Transcription
  misc_feature: MA Experiment 20001757 PARAMETER Experiment Name: At_50mM_NH4NO3_L-to-H_P Parameter: Timepoint (hr) Value: 6
  misc_feature: MA Experiment 20001757 PARAMETER Experiment Name: At_50mM_NH4NO3_L-to-H_P Parameter: Tissue Value: Leaf
  misc_feature: MA Experiment 20001757 PARAMETER Experiment Name: At_50mM_NH4NO3_L-to-H_P Parameter: Treatment Value: 50mM NH4NO3 vs 100mM Mannitol

SEQ ID NO: 31679 - protein, 337 aa, Arabidopsis thaliana; identical to SEQ ID NO: 28089
  peptide (1)..(337): Ceres Seq. ID no. 13646185
  misc_feature (11)..(337): Homolog of NCBI NO: 32479726 NR Description: OJ991214_12.2 [Oryza sativa (japonica
  misc_feature (74)..(337): Homolog of NCBI NO: 15227574 NR Description: F-box protein family [Arabidopsis thaliana]
  misc_feature (10)..(288): Homolog of NCBI NO: 15227574 NR Description: F-box protein family [Arabidopsis thaliana]
  misc_feature (1)..(337): Homolog of NCBI NO: 15225867 NR Description: F-box protein family [Arabidopsis thaliana]

SEQ ID NO: 31680 - protein, 212 aa, Arabidopsis thaliana; identical to SEQ ID NO: 28090
  peptide (1)..(212): Ceres Seq. ID no. 13646186
  misc_feature (1)..(212): Homolog of NCBI NO: 32479726 NR Description: OJ991214_12.2 [Oryza sativa (japonica
  misc_feature (1)..(212): Homolog of NCBI NO: 15227574 NR Description: F-box protein family [Arabidopsis thaliana]
  misc_feature (1)..(163): Homolog of NCBI NO: 15227574 NR Description: F-box protein family [Arabidopsis thaliana]
  misc_feature (1)..(212): Homolog of NCBI NO: 15225867 NR Description: F-box protein family [Arabidopsis thaliana]

SEQ ID NO: 31681 - protein, 168 aa, Arabidopsis thaliana; identical to SEQ ID NO: 28091
  peptide (1)..(168): Ceres Seq. ID no. 13646187
  misc_feature (1)..(168): Homolog of NCBI NO: 32479726 NR Description: OJ991214_12.2 [Oryza sativa (japonica
  misc_feature (1)..(168): Homolog of NCBI NO: 15227574 NR Description: F-box protein family [Arabidopsis thaliana]
  misc_feature (1)..(119): Homolog of NCBI NO: 15227574 NR Description: F-box protein family [Arabidopsis thaliana]
  misc_feature (1)..(168): Homolog of NCBI NO: 15225867 NR Description: F-box protein family [Arabidopsis thaliana]

SEQ ID NO: 31682 - DNA, 796 bp, Arabidopsis thaliana; identical to SEQ ID NO: 28092
  misc_feature (1)..(796): Ceres Seq. ID no. 13499570
  misc_feature: MA Experiment ID: 108434 Result: Down-regulated in Transcription
  misc_feature: MA Experiment 108434 PARAMETER Experiment Name: At_Root_Tips_cDNA_P Parameter: Tissue Value: Root Tips
  misc_feature: MA Experiment ID: 108464 Result: Up-regulated in Transcription
  misc_feature: MA Experiment 108464 PARAMETER Experiment Name: At_Germinating_Seeds_cDNA_P Parameter: Age (day) Value: 4 vs. 0
  misc_feature: MA Experiment 108464 PARAMETER Experiment Name: At_Germinating_Seeds_cDNA_P Parameter: Tissue Value: Germinating Seeds
  misc_feature: MA Experiment ID: 108573 Result: Up-regulated in Transcription
  misc_feature: MA Experiment 108573 PARAMETER Experiment Name: At_Drought_cDNA_P Parameter: Timepoint (hr) Value: 6
  misc_feature: MA Experiment 108573 PARAMETER Experiment Name: At_Drought_cDNA_P Parameter: Tissue Value: Aerial
  misc_feature: MA Experiment 108573 PARAMETER Experiment Name: At_Drought_cDNA_P Parameter: Treatment Value: Drought vs. No Drought
  misc_feature: MA Experiment ID: 108577 Result: Down-regulated in Transcription
  misc_feature: MA Experiment 108577 PARAMETER Experiment Name: At_42deg_Heat_cDNA_P Parameter: Temperature (deg C) Value: 42 vs. 22
  misc_feature: MA Experiment 108577 PARAMETER Experiment Name: At_42deg_Heat_cDNA_P Parameter: Timepoint (hr) Value: 6
  misc_feature: MA Experiment 108577 PARAMETER Experiment Name: At_42deg_Heat_cDNA_P Parameter: Tissue Value: Aerial
  misc_feature: MA Experiment ID: 108585 Result: Up-regulated in Transcription
  misc_feature: MA Experiment 108585 PARAMETER Experiment Name: At_5mM_NaNP_cDNA_P Parameter: Timepoint (hr) Value: 6
  misc_feature: MA Experiment 108585 PARAMETER Experiment Name: At_5mM_NaNP_cDNA_P Parameter: Tissue Value: Aerial
  misc_feature: MA Experiment 108585 PARAMETER Experiment Name: At_5mM_NaNP_cDNA_P Parameter: Treatment Value: null
  misc_feature: MA Experiment ID: 108607 Result: Up-regulated in Transcription
  misc_feature: MA Experiment 108607 PARAMETER Experiment Name: At_100uM_ABA_cDNA_P Parameter: Timepoint (hr) Value: 4
  misc_feature: MA Experiment 108607 PARAMETER Experiment Name: At_100uM_ABA_cDNA_P Parameter: Tissue Value: Aerial
  misc_feature: MA Experiment 108607 PARAMETER Experiment Name: At_100uM_ABA_cDNA_P Parameter: Treatment Value: 100uM ABA vs. No Treatment
  misc_feature: MA Experiment ID: 20000111 Result: Down-regulated in Transcription
  misc_feature: MA Experiment 20000111 PARAMETER Experiment Name: At_42deg_Heat_cDNA_P Parameter: Temperature (deg C) Value: 42 vs. 22
  misc_feature: MA Experiment 20000111 PARAMETER Experiment Name: At_42deg_Heat_cDNA_P Parameter: Timepoint (hr) Value: 6
  misc_feature: MA Experiment 20000111 PARAMETER Experiment Name: At_42deg_Heat_cDNA_P Parameter: Tissue Value: Aerial
  misc_feature: MA Experiment ID: 20000113 Result: Down-regulated in Transcription
  misc_feature: MA Experiment 20000113 PARAMETER Experiment Name: At_42deg_Heat_cDNA_P Parameter: Temperature (deg C) Value: 42 vs. 22
  misc_feature: MA Experiment 20000113 PARAMETER Experiment Name: At_42deg_Heat_cDNA_P Parameter: Timepoint (hr) Value: 8
  misc_feature: MA Experiment 20000113 PARAMETER Experiment Name: At_42deg_Heat_cDNA_P Parameter: Tissue Value: Aerial
  misc_feature: MA Experiment ID: 20000144 Result: Down-regulated in Transcription
  misc_feature: MA Experiment 20000144 PARAMETER Experiment Name: At_42deg_Heat_cDNA_P Parameter: Temperature (deg C) Value: 42 vs. 22
  misc_feature: MA Experiment 20000144 PARAMETER Experiment Name: At_42deg_Heat_cDNA_P Parameter: Timepoint (hr) Value: 1
  misc_feature: MA Experiment 20000144 PARAMETER Experiment Name: At_42deg_Heat_cDNA_P Parameter: Tissue Value: Aerial
  misc_feature: MA Experiment ID: 20000224 Result: Down-regulated in Transcription

SEQ ID NO: 31683 - protein, 204 aa, Arabidopsis thaliana; identical to SEQ ID NO: 28093
  peptide (1)..(204): Ceres Seq. ID no. 13499571
  misc_feature (38)..(200): Homolog of NCBI NO: 7487097 NR Description: hypothetical protein T16L4.170 - Arabidopsis
  misc_feature (24)..(191): Homolog of NCBI NO: 40539036 NR Description: putative prenylated rab acceptor protein
  misc_feature (21)..(191): Homolog of NCBI NO: 21594668 NR Description: unknown [Arabidopsis thaliana]
  misc_feature (21)..(200): Homolog of NCBI NO: 18390939 NR Description: expressed protein [Arabidopsis thaliana]
  misc_feature (17)..(191): Homolog of NCBI NO: 15220814 NR Description: expressed protein [Arabidopsis thaliana]
  misc_feature (17)..(188): Homolog of NCBI NO: 34903576 NR Description: P0419B01.1 [Oryza sativa (japonica
  misc_feature (17)..(204): Homolog of NCBI NO: 18405248 NR Description: expressed protein [Arabidopsis thaliana]
  misc_feature (17)..(204): Homolog of NCBI NO: 15231332 NR Description: expressed protein [Arabidopsis thaliana]
  misc_feature (17)..(204): Homolog of NCBI NO: 21617895 NR Description: unknown [Arabidopsis thaliana]
  misc_feature (17)..(204): Homolog of NCBI NO: 18400140 NR Description: expressed protein [Arabidopsis thaliana]

SEQ ID NO: 31684 - protein, 188 aa, Arabidopsis thaliana; identical to SEQ ID NO: 28094
  peptide (1)..(188): Ceres Seq. ID no. 13499572
  misc_feature (22)..(184): Homolog of NCBI NO: 7487097 NR Description: hypothetical protein T16L4.170 - Arabidopsis
  misc_feature (8)..(175): Homolog of NCBI NO: 40539036 NR Description: putative prenylated rab acceptor protein
  misc_feature (5)..(175): Homolog of NCBI NO: 21594668 NR Description: unknown [Arabidopsis thaliana]
  misc_feature (5)..(184): Homolog of NCBI NO: 18390939 NR Description: expressed protein [Arabidopsis thaliana]
  misc_feature (1)..(175): Homolog of NCBI NO: 15220814 NR Description: expressed protein [Arabidopsis thaliana]
  misc_feature (1)..(172): Homolog of NCBI NO: 34903576 NR Description: P0419B01.1 [Oryza sativa (japonica
  misc_feature (1)..(188): Homolog of NCBI NO: 18405248 NR Description: expressed protein [Arabidopsis thaliana]
  misc_feature (1)..(188): Homolog of NCBI NO: 15231332 NR Description: expressed protein [Arabidopsis thaliana]
  misc_feature (1)..(188): Homolog of NCBI NO: 21617895 NR Description: unknown [Arabidopsis thaliana]
  misc_feature (1)..(188): Homolog of NCBI NO: 18400140 NR Description: expressed protein [Arabidopsis thaliana]

SEQ ID NO: 31685 - protein, 147 aa, Arabidopsis thaliana; identical to SEQ ID NO: 28095
  peptide (1)..(147): Ceres Seq. ID no. 13499573
  misc_feature (1)..(143): Homolog of NCBI NO: 7487097 NR Description: hypothetical protein T16L4.170 - Arabidopsis
  misc_feature (1)..(134): Homolog of NCBI NO: 40539036 NR Description: putative prenylated rab acceptor protein
  misc_feature (1)..(134): Homolog of NCBI NO: 21594668 NR Description: unknown [Arabidopsis thaliana]
  misc_feature (1)..(143): Homolog of NCBI NO: 18390939 NR Description: expressed protein [Arabidopsis thaliana]
  misc_feature (1)..(134): Homolog of NCBI NO: 15220814 NR Description: expressed protein [Arabidopsis thaliana]
  misc_feature (1)..(131): Homolog of NCBI NO: 34903576 NR Description: P0419B01.1 [Oryza sativa (japonica
  misc_feature (1)..(147): Homolog of NCBI NO: 18405248 NR Description: expressed protein [Arabidopsis thaliana]
  misc_feature (1)..(147): Homolog of NCBI NO: 15231332 NR Description: expressed protein [Arabidopsis thaliana]
  misc_feature (1)..(147): Homolog of NCBI NO: 21617895 NR Description: unknown [Arabidopsis thaliana]
  misc_feature (1)..(147): Homolog of NCBI NO: 18400140 NR Description: expressed protein [Arabidopsis thaliana]

SEQ ID NO: 31686 - DNA, 970 bp, Arabidopsis thaliana; identical to SEQ ID NO: 28096
  misc_feature (1)..(970): Ceres Seq. ID no. 12654004
  misc_feature: MA Experiment ID: 20000113 Result: Down-regulated in Transcription
  misc_feature: MA Experiment 20000113 PARAMETER Experiment Name: At_42deg_Heat_cDNA_P Parameter: Temperature (deg C) Value: 42 vs. 22
  misc_feature: MA Experiment 20000113 PARAMETER Experiment Name: At_42deg_Heat_cDNA_P Parameter: Timepoint (hr) Value: 8
  misc_feature: MA Experiment 20000113 PARAMETER Experiment Name: At_42deg_Heat_cDNA_P Parameter: Tissue Value: Aerial
  misc_feature: MA Experiment ID: 20001911 Result: Down-regulated in Transcription
  misc_feature: MA Experiment 20001911 PARAMETER Experiment Name: At_Drought_Reproduction_P Parameter: Age (day) Value: 40
  misc_feature: MA Experiment 20001911 PARAMETER Experiment Name: At_Drought_Reproduction_P Parameter: Organism Value: A. thaliana
  misc_feature: MA Experiment 20001911 PARAMETER Experiment Name: At_Drought_Reproduction_P Parameter: Plant Line Value: WS
  misc_feature: MA Experiment 20001911 PARAMETER Experiment Name: At_Drought_Reproduction_P Parameter: Timepoint (day) Value: 10
  misc_feature: MA Experiment 20001911 PARAMETER Experiment Name: At_Drought_Reproduction_P Parameter: Tissue Value: Flowers
  misc_feature: MA Experiment 20001911 PARAMETER Experiment Name: At_Drought_Reproduction_P Parameter: Treatment Value: Drought vs. No Drought

SEQ ID NO: 31687 - protein, 224 aa, Arabidopsis thaliana; identical to SEQ ID NO: 28097
  peptide (1)..(224): Ceres Seq. ID no. 12654005
  misc_feature (19)..(180): Pfam Name: Ras family Pfam Description: Ras family
  misc_feature (6)..(223): Homolog of NCBI NO: 3024503 NR Description: RAS-RELATED PROTEIN RAB11C
  misc_feature (6)..(223): Homolog of NCBI NO: 3024505 NR Description: RAS-RELATED PROTEIN RAB11D
  misc_feature (1)..(224): Homolog of NCBI NO: 3024500 NR Description: RAS-RELATED PROTEIN RAB11A
  misc_feature (1)..(223): Homolog of NCBI NO: 7438430 NR Description: GTP-binding protein - garden pea
  misc_feature (1)..(223): Homolog of NCBI NO: 15238392 NR Description: GTP-binding protein, putative
  misc_feature (1)..(224): Homolog of NCBI NO: 1184985 NR Description: ATGB3 [Arabidopsis thaliana]
  misc_feature (1)..(224): Homolog of NCBI NO: 21617896 NR Description: GTP-binding protein GB3 [Arabidopsis thaliana]
  misc_feature (1)..(224): Homolog of NCBI NO: 15236099 NR Description: GTP-binding protein, putative

SEQ ID NO: 31688 - protein, 181 aa, Arabidopsis thaliana; identical to SEQ ID NO: 28098
  peptide (1)..(181): Ceres Seq. ID no. 12654006
  misc_feature (1)..(137): Pfam Name: Ras family Pfam Description: Ras family
  misc_feature (1)..(180): Homolog of NCBI NO: 3024503 NR Description: RAS-RELATED PROTEIN RAB11C
  misc_feature (1)..(180): Homolog of NCBI NO: 3024505 NR Description: RAS-RELATED PROTEIN RAB11D
  misc_feature (1)..(181): Homolog of NCBI NO: 3024500 NR Description: RAS-RELATED PROTEIN RAB11A
  misc_feature (1)..(180): Homolog of NCBI NO: 7438430 NR Description: GTP-binding protein - garden pea
  misc_feature (1)..(180): Homolog of NCBI NO: 15238392 NR Description: GTP-binding protein, putative
  misc_feature (1)..(181): Homolog of NCBI NO: 1184985 NR Description: ATGB3 [Arabidopsis thaliana]
  misc_feature (1)..(181): Homolog of NCBI NO: 21617896 NR Description: GTP-binding protein GB3 [Arabidopsis thaliana]
  misc_feature (1)..(181): Homolog of NCBI NO: 15236099 NR Description: GTP-binding protein, putative

SEQ ID NO: 31689 - protein, 131 aa, Arabidopsis thaliana; identical to SEQ ID NO: 28099
  peptide (1)..(131): Ceres Seq. ID no. 12654007
  misc_feature (1)..(87): Pfam Name: Ras family Pfam Description: Ras family
  misc_feature (1)..(130): Homolog of NCBI NO: 3024503 NR Description: RAS-RELATED PROTEIN RAB11C
  misc_feature (1)..(130): Homolog of NCBI NO: 3024505 NR Description: RAS-RELATED PROTEIN RAB11D
  misc_feature (1)..(131): Homolog of NCBI NO: 3024500 NR Description: RAS-RELATED PROTEIN RAB11A
  misc_feature (1)..(130): Homolog of NCBI NO: 7438430 NR Description: GTP-binding protein - garden pea
  misc_feature (1)..(130): Homolog of NCBI NO: 15238392 NR Description: GTP-binding protein, putative
  misc_feature (1)..(131): Homolog of NCBI NO: 1184985 NR Description: ATGB3 [Arabidopsis thaliana]
  misc_feature (1)..(131): Homolog of NCBI NO: 21617896 NR Description: GTP-binding protein GB3 [Arabidopsis thaliana]
  misc_feature (1)..(131): Homolog of NCBI NO: 15236099 NR Description: GTP-binding protein, putative

SEQ ID NO: 31690 - DNA, 1521 bp, Arabidopsis thaliana; identical to SEQ ID NO: 22510
  misc_feature (1)..(1521): Ceres Seq. ID no. 12394809
  misc_feature: MA Experiment ID: 20000071 Result: Up-regulated in Transcription
  misc_feature: MA Experiment 20000071 PARAMETER Experiment Name: At_100uM_ABA_Mutants_cDNA_P Parameter: Plant Line Value: CS8104
  misc_feature: MA Experiment 20000071 PARAMETER Experiment Name: At_100uM_ABA_Mutants_cDNA_P Parameter: Timepoint (hr) Value: 6
  misc_feature: MA Experiment 20000071 PARAMETER Experiment Name: At_100uM_ABA_Mutants_cDNA_P Parameter: Tissue Value: Aerial
  misc_feature: MA Experiment 20000071 PARAMETER Experiment Name: At_100uM_ABA_Mutants_cDNA_P Parameter: Treatment Value: 100uM ABA vs. No Treatment
  misc_feature: MA Experiment ID: 20000169 Result: Up-regulated in Transcription
  misc_feature: MA Experiment 20000169 PARAMETER Experiment Name: At_100uM_ABA_P Parameter: Age (day) Value: 14
  misc_feature: MA Experiment 20000169 PARAMETER Experiment Name: At_100uM_ABA_P Parameter: Organism Value: A. thaliana
  misc_feature: MA Experiment 20000169 PARAMETER Experiment Name: At_100uM_ABA_P Parameter: Plant Line Value: WS
  misc_feature: MA Experiment 20000169 PARAMETER Experiment Name: At_100uM_ABA_P Parameter: Timepoint (hr) Value: 6
  misc_feature: MA Experiment 20000169 PARAMETER Experiment Name: At_100uM_ABA_P Parameter: Tissue Value: Aerial
  misc_feature: MA Experiment 20000169 PARAMETER Experiment Name: At_100uM_ABA_P Parameter: Treatment Value: 100uM ABA vs. No Treatment
  misc_feature: MA Experiment ID: 20000185 Result: Down-regulated in Transcription
  misc_feature: MA Experiment 20000185 PARAMETER Experiment Name: At_Roots__P Parameter: Age (day) Value: 7 vs. 21
  misc_feature: MA Experiment 20000185 PARAMETER Experiment Name: At_Roots__P Parameter: Organism Value: A. thaliana
  misc_feature: MA Experiment 20000185 PARAMETER Experiment Name: At_Roots__P Parameter: Tissue Value: Roots vs. Whole Plant
  misc_feature: MA Experiment ID: 20000267 Result: Up-regulated in Transcription
  misc_feature: MA Experiment 20000267 PARAMETER Experiment Name: At_Drought_P Parameter: Age (day) Value: 7
  misc_feature: MA Experiment 20000267 PARAMETER Experiment Name: At_Drought_P Parameter: Organism Value: A. thaliana
  misc_feature: MA Experiment 20000267 PARAMETER Experiment Name: At_Drought_P Parameter: Plant Line Value: WS
  misc_feature: MA Experiment 20000267 PARAMETER Experiment Name: At_Drought_P Parameter: Timepoint (hr) Value: 6
  misc_feature: MA Experiment 20000267 PARAMETER Experiment Name: At_Drought_P Parameter: Tissue Value: Whole Plant
  misc_feature: MA Experiment 20000267 PARAMETER Experiment Name: At_Drought_P Parameter: Treatment Value: Drought vs. No Drought
  misc_feature: MA Experiment ID: 20000268 Result: Up-regulated in Transcription
  misc_feature: MA Experiment 20000268 PARAMETER Experiment Name: At_100mM_NaCl__P Parameter: Age (day) Value: 14
  misc_feature: MA Experiment 20000268 PARAMETER Experiment Name: At_100mM_NaCl__P Parameter: Organism Value: A. thaliana
  misc_feature: MA Experiment 20000268 PARAMETER Experiment Name: At_100mM_NaCl__P Parameter: Plant Line Value: WS
  misc_feature: MA Experiment 20000268 PARAMETER Experiment Name: At_100mM_NaCl__P Parameter: Timepoint (hr) Value: 6
  misc_feature: MA Experiment 20000268 PARAMETER Experiment Name: At_100mM_NaCl__P Parameter: Tissue Value: Whole Plant
  misc_feature: MA Experiment 20000268 PARAMETER Experiment Name: At_100mM_NaCl__P Parameter: Treatment Value: 100mM NaCl vs. No Treatment
  misc_feature: MA Experiment ID: 20000436 Result: Up-regulated in Transcription
  misc_feature: MA Experiment 20000436 PARAMETER Experiment Name: At_Drought_P Parameter: Age (day) Value: 7
  misc_feature: MA Experiment 20000436 PARAMETER Experiment Name: At_Drought_P Parameter: Organism Value: A. thaliana
  misc_feature: MA Experiment 20000436 PARAMETER Experiment Name: At_Drought_P Parameter: Plant Line Value: WS
  misc_feature: MA Experiment 20000436 PARAMETER Experiment Name: At_Drought_P Parameter: Timepoint (hr) Value: 12
  misc_feature: MA Experiment 20000436 PARAMETER Experiment Name: At_Drought_P Parameter: Tissue Value: Whole Plant
  misc_feature: MA Experiment 20000436 PARAMETER Experiment Name: At_Drought_P Parameter: Treatment Value: Drought vs. No Drought
  misc_feature: MA Experiment ID: 20000437 Result: Up-regulated in Transcription
  misc_feature: MA Experiment 20000437 PARAMETER Experiment Name: At_Drought_P Parameter: Age (day) Value: 8
  misc_feature: MA Experiment 20000437 PARAMETER Experiment Name: At_Drought_P Parameter: Organism Value: A. thaliana
  misc_feature: MA Experiment 20000437 PARAMETER Experiment Name: At_Drought_P Parameter: Plant Line Value: WS
  misc_feature: MA Experiment 20000437 PARAMETER Experiment Name: At_Drought_P Parameter: Timepoint (hr) Value: 24
  misc_feature: MA Experiment 20000437 PARAMETER Experiment Name: At_Drought_P Parameter: Tissue Value: Whole Plant
  misc_feature: MA Experiment 20000437 PARAMETER Experiment Name: At_Drought_P Parameter: Treatment Value: Drought vs. No Drought
  misc_feature: MA Experiment ID: 20000439 Result: Down-regulated in Transcription
  misc_feature: MA Experiment 20000439 PARAMETER Experiment Name: At_Roots__P Parameter: Age (day) Value: 14 vs. 21
  misc_feature: MA Experiment 20000439 PARAMETER Experiment Name: At_Roots__P Parameter: Organism Value: A. thaliana
  misc_feature: MA Experiment 20000439 PARAMETER Experiment Name: At_Roots__P Parameter: Tissue Value: Roots vs. Whole Plant
  misc_feature: MA Experiment ID: 20000453 Result: Up-regulated in Transcription
  misc_feature: MA Experiment 20000453 PARAMETER Experiment Name: At_100uM_ABA_P Parameter: Age (day) Value: 15
  misc_feature: MA Experiment 20000453 PARAMETER Experiment Name: At_100uM_ABA_P Parameter: Organism Value: A. thaliana
  misc_feature: MA Experiment 20000453 PARAMETER Experiment Name: At_100uM_ABA_P Parameter: Plant Line Value: WS
  misc_feature: MA Experiment 20000453 PARAMETER Experiment Name: At_100uM_ABA_P Parameter: Timepoint (hr) Value: 24
  misc_feature: MA Experiment 20000453 PARAMETER Experiment Name: At_100uM_ABA_P Parameter: Tissue Value: Aerial
  misc_feature: MA Experiment 20000453 PARAMETER Experiment Name: At_100uM_ABA_P Parameter: Treatment Value: 100uM ABA vs. No Treatment
  misc_feature: MA Experiment ID: 20000573 Result: Down-regulated in Transcription
  misc_feature: MA Experiment 20000573 PARAMETER Experiment Name: At_100uM_ABA_Mutants__P Parameter: Organism Value: A. thaliana
  misc_feature: MA Experiment 20000573 PARAMETER Experiment Name: At_100uM_ABA_Mutants__P Parameter: Plant Line Value: CS22 vs. Ler wt
  misc_feature: MA Experiment 20000573 PARAMETER Experiment Name: At_100uM_ABA_Mutants__P Parameter: Timepoint (hr) Value: N/A
  misc_feature: MA Experiment 20000573 PARAMETER Experiment Name: At_100uM_ABA_Mutants__P Parameter: Tissue Value: Whole Plant
  misc_feature: MA Experiment 20000573 PARAMETER Experiment Name: At_100uM_ABA_Mutants__P Parameter: Treatment Value: None
  misc_feature: MA Experiment ID: 20000574 Result: Down-regulated in Transcription
  misc_feature: MA Experiment 20000574 PARAMETER Experiment Name: At_100uM_ABA_Mutants__P Parameter: Organism Value: A. thaliana
  misc_feature: MA Experiment 20000574 PARAMETER Experiment Name: At_100uM_ABA_Mutants__P Parameter: Plant Line Value: CS23 vs. Ler wt
  misc_feature: MA Experiment 20000574 PARAMETER Experiment Name: At_100uM_ABA_Mutants__P Parameter: Timepoint (hr) Value: N/A
  misc_feature: MA Experiment 20000574 PARAMETER Experiment Name: At_100uM_ABA_Mutants__P Parameter: Tissue Value: Whole Plant
  misc_feature: MA Experiment 20000574 PARAMETER Experiment Name: At_100uM_ABA_Mutants__P Parameter: Treatment Value: None
  misc_feature: MA Experiment ID: 20001247 Result: Up-regulated in Transcription
  misc_feature: MA Experiment 20001247 PARAMETER Experiment Name: At_Far-red-induction_P Parameter: Age (day) Value: 7
  misc_feature: MA Experiment 20001247 PARAMETER Experiment Name: At_Far-red-induction_P Parameter: Light Value: Far-red vs. White
  misc_feature: MA Experiment 20001247 PARAMETER Experiment Name: At_Far-red-induction_P Parameter: Organism Value: A. thaliana
  misc_feature: MA Experiment 20001247 PARAMETER Experiment Name: At_Far-red-induction_P Parameter: Plant Line Value: Columbia
  misc_feature: MA Experiment 20001247 PARAMETER Experiment Name: At_Far-red-induction_P Parameter: Timepoint (hr) Value: 1
  misc_feature: MA Experiment 20001247 PARAMETER Experiment Name: At_Far-red-induction_P Parameter: Tissue Value: Whole Plant
  misc_feature: MA Experiment ID: 20001248 Result: Down-regulated in Transcription
  misc_feature: MA Experiment 20001248 PARAMETER Experiment Name: At_Far-red-induction_P Parameter: Age (day) Value: 7
  misc_feature: MA Experiment 20001248 PARAMETER Experiment Name: At_Far-red-induction_P Parameter: Light Value: Far-red vs. White
  misc_feature: MA Experiment 20001248 PARAMETER Experiment Name: At_Far-red-induction_P Parameter: Organism Value: A. thaliana
  misc_feature: MA Experiment 20001248 PARAMETER Experiment Name: At_Far-red-induction_P Parameter: Plant Line Value: Columbia
  misc_feature: MA Experiment 20001248 PARAMETER Experiment Name: At_Far-red-induction_P Parameter: Timepoint (hr) Value: 4
  misc_feature: MA Experiment 20001248 PARAMETER Experiment Name: At_Far-red-induction_P Parameter: Tissue Value: Whole Plant
  misc_feature: MA Experiment ID: 20001451 Result: Down-regulated in Transcription
  misc_feature: MA Experiment 20001451 PARAMETER Experiment Name: At_Far-red-induction_P Parameter: Age (day) Value: 7
  misc_feature: MA Experiment 20001451 PARAMETER Experiment Name: At_Far-red-induction_P Parameter: Light Value: Far-red vs. White
  misc_feature: MA Experiment 20001451 PARAMETER Experiment Name: At_Far-red-induction_P Parameter: Organism Value: A. thaliana
  misc_feature: MA Experiment 20001451 PARAMETER Experiment Name: At_Far-red-induction_P Parameter: Plant Line Value: Columbia
  misc_feature: MA Experiment 20001451 PARAMETER Experiment Name: At_Far-red-induction_P Parameter: Timepoint (hr) Value: 24
  misc_feature: MA Experiment 20001451 PARAMETER Experiment Name: At_Far-red-induction_P Parameter: Tissue Value: Whole Plant
  misc_feature: MA Experiment ID: 20001554 Result: Up-regulated in Transcription
  misc_feature: MA Experiment 20001554 PARAMETER Experiment Name: At_Drought_Soil_Dry_P Parameter: Age (day) Value: 21
  misc_feature: MA Experiment 20001554 PARAMETER Experiment Name: At_Drought_Soil_Dry_P Parameter: Organism Value: A. thaliana
  misc_feature: MA Experiment 20001554 PARAMETER Experiment Name: At_Drought_Soil_Dry_P Parameter: Plant Line Value: WS
  misc_feature: MA Experiment 20001554 PARAMETER Experiment Name: At_Drought_Soil_Dry_P Parameter: Post Timepoint (hr) Value: None
  misc_feature: MA Experiment 20001554 PARAMETER Experiment Name: At_Drought_Soil_Dry_P Parameter: Post-Treatment Value: None
  misc_feature: MA Experiment 20001554 PARAMETER Experiment Name: At_Drought_Soil_Dry_P Parameter: Timepoint (day) Value: 7
  misc_feature: MA Experiment 20001554 PARAMETER Experiment Name: At_Drought_Soil_Dry_P Parameter: Treatment Value: Drought vs. No Drought
  misc_feature: MA Experiment ID: 20001555 Result: Up-regulated in Transcription
  misc_feature: MA Experiment 20001555 PARAMETER Experiment Name: At_Drought_Soil_Dry_P Parameter: Age (day) Value: 24
  misc_feature: MA Experiment 20001555 PARAMETER Experiment Name: At_Drought_Soil_Dry_P Parameter: Organism Value: A. thaliana
  misc_feature: MA Experiment 20001555 PARAMETER Experiment Name: At_Drought_Soil_Dry_P Parameter: Plant Line Value: WS
  misc_feature: MA Experiment 20001555 PARAMETER Experiment Name: At_Drought_Soil_Dry_P Parameter: Post Timepoint (hr) Value: None
  misc_feature: MA Experiment 20001555 PARAMETER Experiment Name: At_Drought_Soil_Dry_P Parameter: Post-Treatment Value: None
  misc_feature: MA Experiment 20001555 PARAMETER Experiment Name: At_Drought_Soil_Dry_P Parameter: Timepoint (day) Value: 10
  misc_feature: MA Experiment 20001555 PARAMETER Experiment Name: At_Drought_Soil_Dry_P Parameter: Treatment Value: Drought vs. No Drought
  misc_feature: MA Experiment ID: 20001556 Result: Up-regulated in Transcription
  misc_feature: MA Experiment 20001556 PARAMETER Experiment Name: At_Drought_Soil_Dry_P Parameter: Age (day) Value: 26
  misc_feature: MA Experiment 20001556 PARAMETER Experiment Name: At_Drought_Soil_Dry_P Parameter: Organism Value: A. thaliana
  misc_feature: MA Experiment 20001556 PARAMETER Experiment Name: At_Drought_Soil_Dry_P Parameter: Plant Line Value: WS
  misc_feature: MA Experiment 20001556 PARAMETER Experiment Name: At_Drought_Soil_Dry_P Parameter: Post Timepoint (hr) Value: None
  misc_feature: MA Experiment 20001556 PARAMETER Experiment Name: At_Drought_Soil_Dry_P Parameter: Post-Treatment Value: None
  misc_feature: MA Experiment 20001556 PARAMETER Experiment Name: At_Drought_Soil_Dry_P Parameter: Timepoint (day) Value: 12
  misc_feature: MA Experiment 20001556 PARAMETER Experiment Name: At_Drought_Soil_Dry_P Parameter: Treatment Value: Drought vs. No Drought
  misc_feature: MA Experiment ID: 20001559 Result: Up-regulated in Transcription
  misc_feature: MA Experiment 20001559 PARAMETER Experiment Name: At_Drought_Soil_Dry_P Parameter: Age (day) Value: 28
  misc_feature: MA Experiment 20001559 PARAMETER Experiment Name: At_Drought_Soil_Dry_P Parameter: Organism Value: A. thaliana
  misc_feature: MA Experiment 20001559 PARAMETER Experiment Name: At_Drought_Soil_Dry_P Parameter: Plant Line Value: WS
  misc_feature: MA Experiment 20001559 PARAMETER Experiment Name: At_Drought_Soil_Dry_P Parameter: Post Timepoint (hr) Value: 29
  misc_feature: MA Experiment 20001559 PARAMETER Experiment Name: At_Drought_Soil_Dry_P Parameter: Post-Treatment Value: Re-Water vs. No Drought
  misc_feature: MA Experiment 20001559 PARAMETER Experiment Name: At_Drought_Soil_Dry_P Parameter: Timepoint (day) Value: 14
  misc_feature: MA Experiment 20001559 PARAMETER Experiment Name: At_Drought_Soil_Dry_P Parameter: Treatment Value: Drought vs. No Drought
  misc_feature: MA Experiment ID: 20001904 Result: Up-regulated in Transcription
  misc_feature: MA Experiment 20001904 PARAMETER Experiment Name: At_Drought_Reproduction_P Parameter: Age (day) Value: 37
  misc_feature: MA Experiment 20001904 PARAMETER Experiment Name: At_Drought_Reproduction_P Parameter: Organism Value: A. thaliana
  misc_feature: MA Experiment 20001904 PARAMETER Experiment Name: At_Drought_Reproduction_P Parameter: Plant Line Value: WS
  misc_feature: MA Experiment 20001904 PARAMETER Experiment Name: At_Drought_Reproduction_P Parameter: Timepoint (day) Value: 7
  misc_feature: MA Experiment 20001904 PARAMETER Experiment Name: At_Drought_Reproduction_P Parameter: Tissue Value: Rosettes
  misc_feature: MA Experiment 20001904 PARAMETER Experiment Name: At_Drought_Reproduction_P Parameter: Treatment Value: Drought vs. No Drought
  misc_feature: MA Experiment ID: 20001911 Result: Up-regulated in Transcription
  misc_feature: MA Experiment 20001911 PARAMETER Experiment Name: At_Drought_Reproduction_P Parameter: Age (day) Value: 40
  misc_feature: MA Experiment 20001911 PARAMETER Experiment Name: At_Drought_Reproduction_P Parameter: Organism Value: A. thaliana
  misc_feature: MA Experiment 20001911 PARAMETER Experiment Name: At_Drought_Reproduction_P Parameter: Plant Line Value: WS
  misc_feature: MA Experiment 20001911 PARAMETER Experiment Name: At_Drought_Reproduction_P Parameter: Timepoint (day) Value: 10
  misc_feature: MA Experiment 20001911 PARAMETER Experiment Name: At_Drought_Reproduction_P Parameter: Tissue Value: Flowers
  misc_feature: MA Experiment 20001911 PARAMETER Experiment Name: At_Drought_Reproduction_P Parameter: Treatment Value: Drought vs. No Drought

SEQ ID NO: 31691 - protein, 392 aa, Arabidopsis thaliana; identical to SEQ ID NO: 22511
  peptide (1)..(392): Ceres Seq. ID no. 12394810
  misc_feature (141)..(389): Homolog of NCBI NO: 14422442 NR Description: BURP domain-containing protein [Bruguiera
  misc_feature (100)..(389): Homolog of NCBI NO: 33578034 NR Description: BURP domain-containing protein [Gossypium
  misc_feature (77)..(99): Homolog of NCBI NO: 14422448 NR Description: BURP domain-containing protein [Bruguiera
  misc_feature (100)..(389): Homolog of NCBI NO: 18447761 NR Description: dehydration-induced protein RD22-like protein
  misc_feature (56)..(389): Homolog of NCBI NO: 34910186 NR Description: putative dehydration-responsive protein RD22
  misc_feature (16)..(83): Homolog of NCBI NO: 14422448 NR Description: BURP domain-containing protein [Bruguiera
  misc_feature (123)..(389): Homolog of NCBI NO: 14422448 NR Description: BURP domain-containing protein [Bruguiera
  misc_feature (77)..(389): Homolog of NCBI NO: 14422444 NR Description: BURP domain-containing protein [Bruguiera
  misc_feature (77)..(389): Homolog of NCBI NO: 16588826 NR Description: dehydration-responsive protein RD22 [Prunus
  misc_feature (1)..(392): Homolog of NCBI NO: 15239478 NR Description: dehydration-induced protein RD22
  misc_feature (141)..(389): Homolog of NCBI NO: 14422442 NR Description: BURP domain-containing protein [Bruguiera
  misc_feature (100)..(389): Homolog of NCBI NO: 33578034 NR Description: BURP domain-containing protein [Gossypium
  misc_feature (77)..(99): Homolog of NCBI NO: 14422448 NR Description: BURP domain-containing protein [Bruguiera
  misc_feature (100)..(389): Homolog of NCBI NO: 18447761 NR Description: dehydration-induced protein RD22-like protein
  misc_feature (56)..(389): Homolog of NCBI NO: 34910186 NR Description: putative dehydration-responsive protein RD22
  misc_feature (16)..(83): Homolog of NCBI NO: 14422448 NR Description: BURP domain-containing protein [Bruguiera
  misc_feature (123)..(389): Homolog of NCBI NO: 14422448 NR Description: BURP domain-containing protein [Bruguiera
  misc_feature (77)..(389): Homolog of NCBI NO: 14422444 NR Description: BURP domain-containing protein [Bruguiera
  misc_feature (77)..(389): Homolog of NCBI NO: 16588826 NR Description: dehydration-responsive protein RD22 [Prunus
  misc_feature (1)..(392): Homolog of NCBI NO: 15239478 NR Description: dehydration-induced protein RD22
  misc_feature (141)..(389): Homolog of NCBI NO: 14422442 NR Description: BURP domain-containing protein [Bruguiera
  misc_feature (100)..(389): Homolog of NCBI NO: 33578034 NR Description: BURP domain-containing protein [Gossypium
  misc_feature (77)..(99): Homolog of NCBI NO: 14422448 NR Description: BURP domain-containing protein [Bruguiera
  misc_feature (100)..(389): Homolog of NCBI NO: 18447761 NR Description: dehydration-induced protein RD22-like protein
  misc_feature (56)..(389): Homolog of NCBI NO: 34910186 NR Description: putative dehydration-responsive protein RD22
  misc_feature (16)..(83): Homolog of NCBI NO: 14422448 NR Description: BURP domain-containing protein [Bruguiera
  misc_feature (123)..(389): Homolog of NCBI NO: 14422448 NR Description: BURP domain-containing protein [Bruguiera
  misc_feature (77)..(389): Homolog of NCBI NO: 14422444 NR Description: BURP domain-containing protein [Bruguiera
  misc_feature (77)..(389): Homolog of NCBI NO: 16588826 NR Description: dehydration-responsive protein RD22 [Prunus
  misc_feature (1)..(392): Homolog of NCBI NO: 15239478 NR Description: dehydration-induced protein RD22

SEQ ID NO: 31692 - protein, 378 aa, Arabidopsis thaliana; identical to SEQ ID NO: 22512
  peptide (1)..(378): Ceres Seq. ID no. 12394811
  misc_feature (127)..(375): Homolog of NCBI NO: 14422442 NR Description: BURP domain-containing protein [Bruguiera
  misc_feature (86)..(375): Homolog of NCBI NO: 33578034 NR Description: BURP domain-containing protein [Gossypium
  misc_feature (63)..(85): Homolog of NCBI NO: 14422448 NR Description: BURP domain-containing protein [Bruguiera
  misc_feature (86)..(375): Homolog of NCBI NO: 18447761 NR Description: dehydration-induced protein RD22-like protein
  misc_feature (42)..(375): Homolog of NCBI NO: 34910186 NR Description: putative dehydration-responsive protein RD22
  misc_feature (2)..(69): Homolog of NCBI NO: 14422448 NR Description: BURP domain-containing protein [Bruguiera
  misc_feature (109)..(375): Homolog of NCBI NO: 14422448 NR Description: BURP domain-containing protein [Bruguiera
  misc_feature (63)..(375): Homolog of NCBI NO: 14422444 NR Description: BURP domain-containing protein [Bruguiera
  misc_feature (63)..(375): Homolog of NCBI NO: 16588826 NR Description: dehydration-responsive protein RD22 [Prunus
  misc_feature (1)..(378): Homolog of NCBI NO: 15239478 NR Description: dehydration-induced protein RD22
  misc_feature (127)..(375): Homolog of NCBI NO: 14422442 NR Description: BURP domain-containing protein [Bruguiera
  misc_feature (86)..(375): Homolog of NCBI NO: 33578034 NR Description: BURP domain-containing protein [Gossypium
  misc_feature (63)..(85): Homolog of NCBI NO: 14422448 NR Description: BURP domain-containing protein [Bruguiera
  misc_feature (86)..(375): Homolog of NCBI NO: 18447761 NR Description: dehydration-induced protein RD22-like protein
  misc_feature (42)..(375): Homolog of NCBI NO: 34910186 NR Description: putative dehydration-responsive protein RD22
  misc_feature (2)..(69): Homolog of NCBI NO: 14422448 NR Description: BURP domain-containing protein [Bruguiera
  misc_feature (109)..(375): Homolog of NCBI NO: 14422448 NR Description: BURP domain-containing protein [Bruguiera
  misc_feature (63)..(375): Homolog of NCBI NO: 14422444 NR Description: BURP domain-containing protein [Bruguiera
  misc_feature (63)..(375): Homolog of NCBI NO: 16588826 NR Description: dehydration-responsive protein RD22 [Prunus
  misc_feature (1)..(378): Homolog of NCBI NO: 15239478 NR Description: dehydration-induced protein RD22
  misc_feature (127)..(375): Homolog of NCBI NO: 14422442 NR Description: BURP domain-containing protein [Bruguiera
  misc_feature (86)..(375): Homolog of NCBI NO: 33578034 NR Description: BURP domain-containing protein [Gossypium
  misc_feature (63)..(85): Homolog of NCBI NO: 14422448 NR Description: BURP domain-containing protein [Bruguiera
  misc_feature (86)..(375): Homolog of NCBI NO: 18447761 NR Description: dehydration-induced protein RD22-like protein
  misc_feature (42)..(375): Homolog of NCBI NO: 34910186 NR Description: putative dehydration-responsive protein RD22
  misc_feature (2)..(69): Homolog of NCBI NO: 14422448 NR Description: BURP domain-containing protein [Bruguiera
  misc_feature (109)..(375): Homolog of NCBI NO: 14422448 NR Description: BURP domain-containing protein [Bruguiera
  misc_feature (63)..(375): Homolog of NCBI NO: 14422444 NR Description: BURP domain-containing protein [Bruguiera
  misc_feature (63)..(375): Homolog of NCBI NO: 16588826 NR Description: dehydration-responsive protein RD22 [Prunus
  misc_feature (1)..(378): Homolog of NCBI NO: 15239478 NR Description: dehydration-induced protein RD22

SEQ ID NO: 31693 - protein, 205 aa, Arabidopsis thaliana; identical to SEQ ID NO: 22513
  peptide (1)..(205): Ceres Seq. ID no. 12394812
  misc_feature (1)..(204): Homolog of NCBI NO: 24416614 NR Description: resistant specific protein-1(4) [Vigna radiata]
  misc_feature (1)..(202): Homolog of NCBI NO: 14422446 NR Description: BURP domain-containing protein [Bruguiera
  misc_feature (1)..(202): Homolog of NCBI NO: 14422442 NR Description: BURP domain-containing protein [Bruguiera
  misc_feature (1)..(202): Homolog of NCBI NO: 33578034 NR Description: BURP domain-containing protein [Gossypium
  misc_feature (1)..(202): Homolog of NCBI NO: 18447761 NR Description: dehydration-induced protein RD22-like protein
  misc_feature (1)..(202): Homolog of NCBI NO: 34910186 NR Description: putative dehydration-responsive protein RD22
  misc_feature (1)..(202): Homolog of NCBI NO: 14422448 NR Description: BURP domain-containing protein [Bruguiera
  misc_feature (1)..(202): Homolog of NCBI NO: 14422444 NR Description: BURP domain-containing protein [Bruguiera
  misc_feature (1)..(202): Homolog of NCBI NO: 16588826 NR Description: dehydration-responsive protein RD22 [Prunus
  misc_feature (1)..(205): Homolog of NCBI NO: 15239478 NR Description: dehydration-induced protein RD22
  misc_feature (1)..(204): Homolog of NCBI NO: 24416614 NR Description: resistant specific protein-1(4) [Vigna radiata]
  misc_feature (1)..(202): Homolog of NCBI NO: 14422446 NR Description: BURP domain-containing protein [Bruguiera
  misc_feature (1)..(202): Homolog of NCBI NO: 14422442 NR Description: BURP domain-containing protein [Bruguiera
  misc_feature (1)..(202): Homolog of NCBI NO: 33578034 NR Description: BURP domain-containing protein [Gossypium
  misc_feature (1)..(202): Homolog of NCBI NO: 18447761 NR Description: dehydration-induced protein RD22-like protein
  misc_feature (1)..(202): Homolog of NCBI NO: 34910186 NR Description: putative dehydration-responsive protein RD22
  misc_feature (1)..(202): Homolog of NCBI NO: 14422448 NR Description: BURP domain-containing protein [Bruguiera
  misc_feature (1)..(202): Homolog of NCBI NO: 14422444 NR Description: BURP domain-containing protein [Bruguiera
  misc_feature (1)..(202): Homolog of NCBI NO: 16588826 NR Description: dehydration-responsive protein RD22 [Prunus
  misc_feature (1)..(205): Homolog of NCBI NO: 15239478 NR Description: dehydration-induced protein RD22
  misc_feature (1)..(202): Homolog of NCBI NO: 33578034 NR Description: BURP domain-containing protein [Gossypium
  misc_feature (1)..(202): Homolog of NCBI NO: 18447761 NR Description: dehydration-induced protein RD22-like protein
  misc_feature (1)..(202): Homolog of NCBI NO: 34910186 NR Description: putative dehydration-responsive protein RD22
  misc_feature (1)..(202): Homolog of NCBI NO: 14422448 NR Description: BURP domain-containing protein [Bruguiera
  misc_feature (1)..(202): Homolog of NCBI NO: 14422444 NR Description: BURP domain-containing protein [Bruguiera
  misc_feature (1)..(202): Homolog of NCBI NO: 16588826 NR Description: dehydration-responsive protein RD22 [Prunus
  misc_feature (1)..(205): Homolog of NCBI NO: 15239478 NR Description: dehydration-induced protein RD22
  misc_feature (1)..(204): Homolog of NCBI NO: 24416614 NR Description: resistant specific protein-1(4) [Vigna radiata]
  misc_feature (1)..(202): Homolog of NCBI NO: 14422446 NR Description: BURP domain-containing protein [Bruguiera
  misc_feature (1)..(202): Homolog of NCBI NO: 14422442 NR Description: BURP domain-containing protein [Bruguiera

SEQ ID NO: 31694 - DNA, 1002 bp, Arabidopsis thaliana; identical to SEQ ID NO: 28104
  misc_feature (1)..(1002): Ceres Seq. ID no. 13622101
  misc_feature: MA Experiment ID: 108434 Result: Up-regulated in Transcription
  misc_feature: MA Experiment 108434 PARAMETER Experiment Name: At_Root_Tips_cDNA_P Parameter: Tissue Value: Root Tips
  misc_feature: MA Experiment ID: 108461 Result: Down-regulated in Transcription
  misc_feature: MA Experiment 108461 PARAMETER Experiment Name: At_Germinating_Seeds_cDNA_P Parameter: Age (day) Value: 1 vs. 0
  misc_feature: MA Experiment 108461 PARAMETER Experiment Name: At_Germinating_Seeds_cDNA_P Parameter: Tissue Value: Germinating Seeds
  misc_feature: MA Experiment ID: 108462 Result: Down-regulated in Transcription
  misc_feature: MA Experiment 108462 PARAMETER Experiment Name: At_Germinating_Seeds_cDNA_P Parameter: Age (day) Value: 2 vs. 0
  misc_feature: MA Experiment 108462 PARAMETER Experiment Name: At_Germinating_Seeds_cDNA_P Parameter: Tissue Value: Germinating Seeds
  misc_feature: MA Experiment ID: 108463 Result: Down-regulated in Transcription
  misc_feature: MA Experiment 108463 PARAMETER Experiment Name: At_Germinating_Seeds_cDNA_P Parameter: Age (day) Value: 3 vs. 0
  misc_feature: MA Experiment 108463 PARAMETER Experiment Name: At_Germinating_Seeds_cDNA_P Parameter: Tissue Value: Germinating Seeds
  misc_feature: MA Experiment ID: 108464 Result: Down-regulated in Transcription
  misc_feature: MA Experiment 108464 PARAMETER Experiment Name: At_Germinating_Seeds_cDNA_P Parameter: Age (day) Value: 4 vs. 0
  misc_feature: MA Experiment 108464 PARAMETER Experiment Name: At_Germinating_Seeds_cDNA_P Parameter: Tissue Value: Germinating Seeds
  misc_feature: MA Experiment ID: 108585 Result: Up-regulated in Transcription
  misc_feature: MA Experiment 108585 PARAMETER Experiment Name: At_5mM_NaNP_cDNA_P Parameter: Timepoint (hr) Value: 6
  misc_feature: MA Experiment 108585 PARAMETER Experiment Name: At_5mM_NaNP_cDNA_P Parameter: Tissue Value: Aerial
  misc_feature: MA Experiment 108585 PARAMETER Experiment Name: At_5mM_NaNP_cDNA_P Parameter: Treatment Value: null
  misc_feature: MA Experiment ID: 20000071 Result: Up-regulated in Transcription
  misc_feature: MA Experiment 20000071 PARAMETER Experiment Name: At_100uM_ABA_Mutants_cDNA_P Parameter: Plant Line Value: CS8104
  misc_feature: MA Experiment 20000071 PARAMETER Experiment Name: At_100uM_ABA_Mutants_cDNA_P Parameter: Timepoint (hr) Value: 6
  misc_feature: MA Experiment 20000071 PARAMETER Experiment Name: At_100uM_ABA_Mutants_cDNA_P Parameter: Tissue Value: Aerial
  misc_feature: MA Experiment 20000071 PARAMETER Experiment Name: At_100uM_ABA_Mutants_cDNA_P Parameter: Treatment Value: 100uM ABA vs. No Treatment
  misc_feature: MA Experiment ID: 20000088 Result: Up-regulated in Transcription
  misc_feature: MA Experiment 20000088 PARAMETER Experiment Name: At_100uM_ABA_Mutants_cDNA_P Parameter: Plant Line Value: Landsberg
  misc_feature: MA Experiment 20000088 PARAMETER Experiment Name: At_100uM_ABA_Mutants_cDNA_P Parameter: Timepoint (hr) Value: 6
  misc_feature: MA Experiment 20000088 PARAMETER Experiment Name: At_100uM_ABA_Mutants_cDNA_P Parameter: Tissue Value: Aerial
  misc_feature: MA Experiment 20000088 PARAMETER Experiment Name: At_100uM_ABA_Mutants_cDNA_P Parameter: Treatment Value: 100uM ABA vs. No Treatment
  misc_feature: MA Experiment ID: 20000111 Result: Down-regulated in Transcription
  misc_feature: MA Experiment 20000111 PARAMETER Experiment Name: At_42deg_Heat_cDNA_P Parameter: Temperature (deg C) Value: 42 vs. 22
  misc_feature: MA Experiment 20000111 PARAMETER Experiment Name: At_42deg_Heat_cDNA_P Parameter: Timepoint (hr) Value: 6
  misc_feature: MA Experiment 20000111 PARAMETER Experiment Name: At_42deg_Heat_cDNA_P Parameter: Tissue Value: Aerial
  misc_feature: MA Experiment ID: 20000173 Result: Down-regulated in Transcription
  misc_feature: MA Experiment 20000173 PARAMETER Experiment Name: At_42deg_Heat_P Parameter: Age (day) Value: 14
  misc_feature: MA Experiment 20000173 PARAMETER Experiment Name: At_42deg_Heat_P Parameter: Organism Value: A. thaliana
  misc_feature: MA Experiment 20000173 PARAMETER Experiment Name: At_42deg_Heat_P Parameter: Plant Line Value: WS
  misc_feature: MA Experiment 20000173 PARAMETER Experiment Name: At_42deg_Heat_P Parameter: Temperature (deg C) Value: 42 vs. 22
  misc_feature: MA Experiment 20000173 PARAMETER Experiment Name: At_42deg_Heat_P Parameter: Timepoint (hr) Value: 6
  misc_feature: MA Experiment 20000173 PARAMETER Experiment Name: At_42deg_Heat_P Parameter: Tissue Value: Aerial
  misc_feature: MA Experiment ID: 20000179 Result: Down-regulated in Transcription
  misc_feature: MA Experiment 20000179 PARAMETER Experiment Name: At_Germinating_Seeds_P Parameter: Age (hr) Value: 6 vs. 0
  misc_feature: MA Experiment 20000179 PARAMETER Experiment Name: At_Germinating_Seeds_P Parameter: Tissue Value: Germinating Seeds
  misc_feature: MA Experiment ID: 20000180 Result: Down-regulated in Transcription
  misc_feature: MA Experiment 20000180 PARAMETER Experiment Name: At_Germinating_Seeds_P Parameter: Age (hr) Value: 24 vs. 0
  misc_feature: MA Experiment 20000180 PARAMETER Experiment Name: At_Germinating_Seeds_P Parameter: Tissue Value: Germinating Seeds

SEQ ID NO: 31695 - protein, 235 aa, Arabidopsis thaliana; identical to SEQ ID NO: 28105
  peptide (1)..(235): Ceres Seq. ID no. 13622102
  misc_feature (1)..(234): Homolog of NCBI NO: 4506181 NR Description: proteasome alpha 2 subunit
  misc_feature (1)..(234): Homolog of NCBI NO: 31241267 NR Description: ENSANGP00000011336 [Anopheles gambiae]
  misc_feature (1)..(234): Homolog of NCBI NO: 19168518 NR Description: PROSAg25 protein [Anopheles gambiae]
  misc_feature (1)..(234): Homolog of NCBI NO: 130852 NR Description: Proteasome subunit alpha type 2 (Proteasome C3) (Macropain subunit C3) (Multicatalytic endopeptidase complex
  misc_feature (1)..(234): Homolog of NCBI NO: 6093780 NR Description: Proteasome subunit alpha type 2
  misc_feature (1)..(235): Homolog of NCBI NO: 7435867 NR Description: hypothetical protein YUP8H12R.19 - Arabidopsis
  misc_feature (1)..(227): Homolog of NCBI NO: 7435868 NR Description: proteasome chain - rice
  misc_feature (1)..(235): Homolog of NCBI NO: 12229921 NR Description: Proteasome subunit alpha type 2 (20S proteasome
  misc_feature (1)..(235): Homolog of NCBI NO: 15219317 NR Description: 20S proteasome alpha subunit B, putative
  misc_feature (1)..(235): Homolog of NCBI NO: 15219257 NR Description: 20S proteasome alpha subunit B (PAB1)

SEQ ID NO: 31696 - protein, 157 aa, Arabidopsis thaliana; identical to SEQ ID NO: 28106
  peptide (1)..(157): Ceres Seq. ID no. 13622103
  misc_feature (1)..(156): Homolog of NCBI NO: 4506181 NR Description: proteasome alpha 2 subunit
  misc_feature (1)..(156): Homolog of NCBI NO: 31241267 NR Description: ENSANGP00000011336 [Anopheles gambiae]
  misc_feature (1)..(156): Homolog of NCBI NO: 19168518 NR Description: PROSAg25 protein [Anopheles gambiae]
  misc_feature (1)..(156): Homolog of NCBI NO: 130852 NR Description: Proteasome subunit alpha type 2 (Proteasome C3) (Macropain subunit C3) (Multicatalytic endopeptidase complex
  misc_feature (1)..(156): Homolog of NCBI NO: 6093780 NR Description: Proteasome subunit alpha type 2
  misc_feature (1)..(157): Homolog of NCBI NO: 7435867 NR Description: hypothetical protein YUP8H12R.19 - Arabidopsis
  misc_feature (1)..(149): Homolog of NCBI NO: 7435868 NR Description: proteasome chain - rice
  misc_feature (1)..(157): Homolog of NCBI NO: 12229921 NR Description: Proteasome subunit alpha type 2 (20S proteasome
  misc_feature (1)..(157): Homolog of NCBI NO: 15219317 NR Description: 20S proteasome alpha subunit B, putative
  misc_feature (1)..(157): Homolog of NCBI NO: 15219257 NR Description: 20S proteasome alpha subunit B (PAB1)

SEQ ID NO: 31697 - protein, 118 aa, Arabidopsis thaliana; identical to SEQ ID NO: 28107
  peptide (1)..(118): Ceres Seq. ID no. 13622104
  misc_feature (1)..(117): Homolog of NCBI NO: 4506181 NR Description: proteasome alpha 2 subunit
  misc_feature (1)..(117): Homolog of NCBI NO: 31241267 NR Description: ENSANGP00000011336 [Anopheles gambiae]
  misc_feature (1)..(117): Homolog of NCBI NO: 19168518 NR Description: PROSAg25 protein [Anopheles gambiae]
  misc_feature (1)..(117): Homolog of NCBI NO: 130852 NR Description: Proteasome subunit alpha type 2 (Proteasome C3) (Macropain subunit C3) (Multicatalytic endopeptidase complex
  misc_feature (1)..(117): Homolog of NCBI NO: 6093780 NR Description: Proteasome subunit alpha type 2
  misc_feature (1)..(118): Homolog of NCBI NO: 7435867 NR Description: hypothetical protein YUP8H12R.19 - Arabidopsis
  misc_feature (1)..(110): Homolog of NCBI NO: 7435868 NR Description: proteasome chain - rice
  misc_feature (1)..(118): Homolog of NCBI NO: 12229921 NR Description: Proteasome subunit alpha type 2 (20S proteasome
  misc_feature (1)..(118): Homolog of NCBI NO: 15219317 NR Description: 20S proteasome alpha subunit B, putative
  misc_feature (1)..(118): Homolog of NCBI NO: 15219257 NR Description: 20S proteasome alpha subunit B (PAB1)

SEQ ID NO: 31698 - DNA, 1326 bp, Arabidopsis thaliana; identical to SEQ ID NO: 28108
  misc_feature (1)..(1326): Ceres Seq. ID no. 13501426
  misc_feature: MA Experiment ID: 108434 Result: Up-regulated in Transcription
  misc_feature: MA Experiment 108434 PARAMETER Experiment Name: At_Root_Tips_cDNA_P Parameter: Tissue Value: Root Tips
  misc_feature: MA Experiment ID: 20000184 Result: Down-regulated in Transcription
  misc_feature: MA Experiment 20000184 PARAMETER Experiment Name: At_Shoots__P Parameter: Age (day) Value: 7
  misc_feature: MA Experiment 20000184 PARAMETER Experiment Name: At_Shoots__P Parameter: Tissue Value: Shoots vs. Whole Plant
  misc_feature: MA Experiment ID: 20000794 Result: Down-regulated in Transcription
  misc_feature: MA Experiment 20000794 PARAMETER Experiment Name: At_Petals_P Parameter: Age (day) Value: 23-25 days
  misc_feature: MA Experiment 20000794 PARAMETER Experiment Name: At_Petals_P Parameter: Plant Line Value: WS
  misc_feature: MA Experiment 20000794 PARAMETER Experiment Name: At_Petals_P Parameter: Tissue Value: Petals vs. Whole plant
  misc_feature: MA Experiment ID: 20001905 Result: Down-regulated in Transcription
  misc_feature: MA Experiment 20001905 PARAMETER Experiment Name: At_Drought_Reproduction_P Parameter: Age (day) Value: 40
  misc_feature: MA Experiment 20001905 PARAMETER Experiment Name: At_Drought_Reproduction_P Parameter: Organism Value: A. thaliana
  misc_feature: MA Experiment 20001905 PARAMETER Experiment Name: At_Drought_Reproduction_P Parameter: Plant Line Value: WS
  misc_feature: MA Experiment 20001905 PARAMETER Experiment Name: At_Drought_Reproduction_P Parameter: Timepoint (day) Value: 10
  misc_feature: MA Experiment 20001905 PARAMETER Experiment Name: At_Drought_Reproduction_P Parameter: Tissue Value: Rosettes
  misc_feature: MA Experiment 20001905 PARAMETER Experiment Name: At_Drought_Reproduction_P Parameter: Treatment Value: Drought vs. No Drought

SEQ ID NO: 31699 - protein, 334 aa, Arabidopsis thaliana; identical to SEQ ID NO: 28109
  peptide (1)..(334): Ceres Seq. ID no. 13501427
  misc_feature (3)..(287): Homolog of NCBI NO: 15930175 NR Description: Unknown (protein for MGC:9314) [Homo sapiens]
  misc_feature (3)..(301): Homolog of NCBI NO: 7706753 NR Description: ubiquitin C-terminal hydrolase UCH37
  misc_feature (259)..(329): Homolog of NCBI NO: 39587753 NR Description: Hypothetical protein CBG13346 [Caenorhabditis
  misc_feature (2)..(234): Homolog of NCBI NO: 39587753 NR Description: Hypothetical protein CBG13346 [Caenorhabditis
  misc_feature (3)..(331): Homolog of NCBI NO: 12314148 NR Description: bA101E13.3 (ubiquitin C-terminal hydrolase UCH37)
  misc_feature (3)..(331): Homolog of NCBI NO: 34880465 NR Description: similar to Ubiquitin carboxyl-terminal hydrolase L5 (UCH-L5) (Ubiquitin thiolesterase L5) (Ubiquitin C-terminal
  misc_feature (3)..(331): Homolog of NCBI NO: 6686411 NR Description: F1E22.3 [Arabidopsis thaliana]
  misc_feature (1)..(331): Homolog of NCBI NO: 15724238 NR Description: F5I14.29/F5I14.29 [Arabidopsis thaliana]
  misc_feature (1)..(331): Homolog of NCBI NO: 18408331 NR Description: expressed protein [Arabidopsis thaliana]
  misc_feature (1)..(334): Homolog of NCBI NO: 15237324 NR Description: ubiquitin C-terminal hydrolase-related protein

SEQ ID NO: 31700 - protein, 315 aa, Arabidopsis thaliana; identical to SEQ ID NO: 28110
  peptide (1)..(315): Ceres Seq. ID no. 13501428
  misc_feature (1)..(268): Homolog of NCBI NO: 15930175 NR Description: Unknown (protein for MGC:9314) [Homo sapiens]
  misc_feature (1)..(282): Homolog of NCBI NO: 7706753 NR Description: ubiquitin C-terminal hydrolase UCH37
  misc_feature (240)..(310): Homolog of NCBI NO: 39587753 NR Description: Hypothetical protein CBG13346 [Caenorhabditis
  misc_feature (1)..(215): Homolog of NCBI NO: 39587753 NR Description: Hypothetical protein CBG13346 [Caenorhabditis
  misc_feature (1)..(312): Homolog of NCBI NO: 12314148 NR Description: bA101E13.3 (ubiquitin C-terminal hydrolase UCH37)
  misc_feature (1)..(312): Homolog of NCBI NO: 34880465 NR Description: similar to Ubiquitin carboxyl-terminal hydrolase L5 (UCH-L5) (Ubiquitin thiolesterase L5) (Ubiquitin C-terminal
  misc_feature (1)..(312): Homolog of NCBI NO: 6686411 NR Description: F1E22.3 [Arabidopsis thaliana]
  misc_feature (1)..(312): Homolog of NCBI NO: 15724238 NR Description: F5I14.29/F5I14.29 [Arabidopsis thaliana]
  misc_feature (1)..(312): Homolog of NCBI NO: 18408331 NR Description: expressed protein [Arabidopsis thaliana]
  misc_feature (1)..(315): Homolog of NCBI NO: 15237324 NR Description: ubiquitin C-terminal hydrolase-related protein

SEQ ID NO: 31701 - protein, 243 aa, Arabidopsis thaliana; identical to SEQ ID NO: 28111
  peptide (1)..(243): Ceres Seq. ID no. 13501429
  misc_feature (1)..(196): Homolog of NCBI NO: 15930175 NR Description: Unknown (protein for MGC:9314) [Homo sapiens]
  misc_feature (1)..(210): Homolog of NCBI NO: 7706753 NR Description: ubiquitin C-terminal hydrolase UCH37
  misc_feature (168)..(238): Homolog of NCBI NO: 39587753 NR Description: Hypothetical protein CBG13346 [Caenorhabditis
  misc_feature (1)..(143): Homolog of NCBI NO: 39587753 NR Description: Hypothetical protein CBG13346 [Caenorhabditis
  misc_feature (1)..(240): Homolog of NCBI NO: 12314148 NR Description: bA101E13.3 (ubiquitin C-terminal hydrolase UCH37)
  misc_feature (1)..(240): Homolog of NCBI NO: 34880465 NR Description: similar to Ubiquitin carboxyl-terminal hydrolase L5 (UCH-L5) (Ubiquitin thiolesterase L5) (Ubiquitin C-terminal
  misc_feature (1)..(240): Homolog of NCBI NO: 6686411 NR Description: F1E22.3 [Arabidopsis thaliana]
  misc_feature (1)..(240): Homolog of NCBI NO: 15724238 NR Description: F5I14.29/F5I14.29 [Arabidopsis thaliana]
  misc_feature (1)..(240): Homolog of NCBI NO: 18408331 NR Description: expressed protein [Arabidopsis thaliana]
  misc_feature (1)..(243): Homolog of NCBI NO: 15237324 NR Description: ubiquitin C-terminal hydrolase-related protein

SEQ ID NO: 31702 - DNA, 1160 bp, Arabidopsis thaliana; identical to SEQ ID NO: 28112
  misc_feature (1)..(1160): Ceres Seq. ID no. 12333821
  misc_feature: MA Experiment ID: 108434 Result: Down-regulated in Transcription
  misc_feature: MA Experiment 108434 PARAMETER Experiment Name: At_Root_Tips_cDNA_P Parameter: Tissue Value: Root Tips
  misc_feature: MA Experiment ID: 108488 Result: Up-regulated in Transcription
  misc_feature: MA Experiment ID: 108569 Result: Up-regulated in Transcription
  misc_feature: MA Experiment 108569 PARAMETER Experiment Name: At_0.001%_MeJA__cDNA_P Parameter: Timepoint (hr) Value: 6
  misc_feature: MA Experiment 108569 PARAMETER Experiment Name: At_0.001%_MeJA__cDNA_P Parameter: Tissue Value: Aerial
  misc_feature: MA Experiment 108569 PARAMETER Experiment Name: At_0.001%_MeJA__cDNA_P Parameter: Treatment Value: 0.001% MeJA vs. No Treatment
  misc_feature: MA Experiment ID: 108573 Result: Down-regulated in Transcription
  misc_feature: MA Experiment 108573 PARAMETER Experiment Name: At_Drought_cDNA_P Parameter: Timepoint (hr) Value: 6
  misc_feature: MA Experiment 108573 PARAMETER Experiment Name: At_Drought_cDNA_P Parameter: Tissue Value: Aerial
  misc_feature: MA Experiment 108573 PARAMETER Experiment Name: At_Drought_cDNA_P Parameter: Treatment Value: Drought vs. No Drought
  misc_feature: MA Experiment ID: 108574 Result: Up-regulated in Transcription
  misc_feature: MA Experiment 108574 PARAMETER Experiment Name: At_Wounding__cDNA_P Parameter: Timepoint (hr) Value: 1
  misc_feature: MA Experiment 108574 PARAMETER Experiment Name: At_Wounding__cDNA_P Parameter: Tissue Value: Aerial
  misc_feature: MA Experiment 108574 PARAMETER Experiment Name: At_Wounding__cDNA_P Parameter: Treatment Value: Wounding vs. No Wounding
  misc_feature: MA Experiment ID: 108576 Result: Down-regulated in Transcription
  misc_feature: MA Experiment 108576 PARAMETER Experiment Name: At_42deg_Heat_cDNA_P Parameter: Temperature (deg C) Value: 42 vs. 22
  misc_feature: MA Experiment 108576 PARAMETER Experiment Name: At_42deg_Heat_cDNA_P Parameter: Timepoint (hr) Value: 1
  misc_feature: MA Experiment 108576 PARAMETER Experiment Name: At_42deg_Heat_cDNA_P Parameter: Tissue Value: Aerial
  misc_feature: MA Experiment ID: 108595 Result: Down-regulated in Transcription
  misc_feature: MA Experiment 108595 PARAMETER Experiment Name: At_Ler-pi_Ovule_cDNA_P Parameter: Plant Line Value: null
  misc_feature: MA Experiment ID: 20000090 Result: Down-regulated in Transcription
  misc_feature: MA Experiment ID: 20000093 Result: Down-regulated in Transcription
  misc_feature: MA Experiment 20000093 PARAMETER Experiment Name: At_42deg_Heat_cDNA_P Parameter: Temperature (deg C) Value: 42 vs. 22
  misc_feature: MA Experiment 20000093 PARAMETER Experiment Name: At_42deg_Heat_cDNA_P Parameter: Timepoint (hr) Value: 0.5
  misc_feature: MA Experiment 20000093 PARAMETER Experiment Name: At_42deg_Heat_cDNA_P Parameter: Tissue Value: Aerial
  misc_feature: MA Experiment ID: 20000111 Result: Down-regulated in Transcription
  misc_feature: MA Experiment 20000111 PARAMETER Experiment Name: At_42deg_Heat_cDNA_P Parameter: Temperature (deg C) Value: 42 vs. 22
  misc_feature: MA Experiment 20000111 PARAMETER Experiment Name: At_42deg_Heat_cDNA_P Parameter: Timepoint (hr) Value: 6
  misc_feature: MA Experiment 20000111 PARAMETER Experiment Name: At_42deg_Heat_cDNA_P Parameter: Tissue Value: Aerial
  misc_feature: MA Experiment ID: 20000112 Result: Down-regulated in Transcription
  misc_feature: MA Experiment 20000112 PARAMETER Experiment Name: At_42deg_Heat_cDNA_P Parameter: Temperature (deg C) Value: 42 vs. 22
  misc_feature: MA Experiment 20000112 PARAMETER Experiment Name: At_42deg_Heat_cDNA_P Parameter: Timepoint (hr) Value: 2
  misc_feature: MA Experiment 20000112 PARAMETER Experiment Name: At_42deg_Heat_cDNA_P Parameter: Tissue Value: Aerial
  misc_feature: MA Experiment ID: 20000113 Result: Down-regulated in Transcription
  misc_feature: MA Experiment 20000113 PARAMETER Experiment Name: At_42deg_Heat_cDNA_P Parameter: Temperature (deg C) Value: 42 vs. 22
  misc_feature: MA Experiment 20000113 PARAMETER Experiment Name: At_42deg_Heat_cDNA_P Parameter: Timepoint (hr) Value: 8
  misc_feature: MA Experiment 20000113 PARAMETER Experiment Name: At_42deg_Heat_cDNA_P Parameter: Tissue Value: Aerial
  misc_feature: MA Experiment ID: 20000144 Result: Down-regulated in Transcription
  misc_feature: MA Experiment 20000144 PARAMETER Experiment Name: At_42deg_Heat_cDNA_P Parameter: Temperature (deg C) Value: 42 vs. 22
  misc_feature: MA Experiment 20000144 PARAMETER Experiment Name: At_42deg_Heat_cDNA_P Parameter: Timepoint (hr) Value: 1
  misc_feature: MA Experiment 20000144 PARAMETER Experiment Name: At_42deg_Heat_cDNA_P Parameter: Tissue Value: Aerial
  misc_feature: MA Experiment ID: 20000171 Result: Down-regulated in Transcription
  misc_feature: MA Experiment 20000171 PARAMETER Experiment Name: At_42deg_Heat_P Parameter: Age (day) Value: 14
  misc_feature: MA Experiment 20000171 PARAMETER Experiment Name: At_42deg_Heat_P Parameter: Organism Value: A. thaliana
  misc_feature: MA Experiment 20000171 PARAMETER Experiment Name: At_42deg_Heat_P Parameter: Plant Line Value: WS
  misc_feature: MA Experiment 20000171 PARAMETER Experiment Name: At_42deg_Heat_P Parameter: Temperature (deg C) Value: 42 vs. 22
  misc_feature: MA Experiment 20000171 PARAMETER Experiment Name: At_42deg_Heat_P Parameter: Timepoint (hr) Value: 1
  misc_feature: MA Experiment 20000171 PARAMETER Experiment Name: At_42deg_Heat_P Parameter: Tissue Value: Aerial
  misc_feature: MA Experiment ID: 20000173 Result: Down-regulated in Transcription
  misc_feature: MA Experiment 20000173 PARAMETER Experiment Name: At_42deg_Heat_P Parameter: Age (day) Value: 14
  misc_feature: MA Experiment 20000173 PARAMETER Experiment Name: At_42deg_Heat_P Parameter: Organism Value: A. thaliana
  misc_feature: MA Experiment 20000173 PARAMETER Experiment Name: At_42deg_Heat_P Parameter: Plant Line Value: WS
  misc_feature: MA Experiment 20000173 PARAMETER Experiment Name: At_42deg_Heat_P Parameter: Temperature (deg C) Value: 42 vs. 22
  misc_feature: MA Experiment 20000173 PARAMETER Experiment Name: At_42deg_Heat_P Parameter: Timepoint (hr) Value: 6
  misc_feature: MA Experiment 20000173 PARAMETER Experiment Name: At_42deg_Heat_P Parameter: Tissue Value: Aerial
  misc_feature: MA Experiment ID: 20000180 Result: Up-regulated in Transcription
  misc_feature: MA Experiment 20000180 PARAMETER Experiment Name: At_Germinating_Seeds_P Parameter: Age (hr) Value: 24 vs. 0
  misc_feature: MA Experiment 20000180 PARAMETER Experiment Name: At_Germinating_Seeds_P Parameter: Tissue Value: Germinating Seeds
  misc_feature: MA Experiment ID: 20000182 Result: Down-regulated in Transcription
  misc_feature: MA Experiment 20000182 PARAMETER Experiment Name: At_2mM_SA_P Parameter: Age (day) Value: 14
  misc_feature: MA Experiment 20000182 PARAMETER Experiment Name: At_2mM_SA_P Parameter: Organism Value: A. thaliana
  misc_feature: MA Experiment 20000182 PARAMETER Experiment Name: At_2mM_SA_P Parameter: Plant Line Value: WS
  misc_feature: MA Experiment 20000182 PARAMETER Experiment Name: At_2mM_SA_P Parameter: Timepoint (hr) Value: 6
  misc_feature: MA Experiment 20000182 PARAMETER Experiment Name: At_2mM_SA_P Parameter: Tissue Value: Aerial
  misc_feature: MA Experiment 20000182 PARAMETER Experiment Name: At_2mM_SA_P Parameter: Treatment Value: 2mM SA vs. No Treatment
  misc_feature: MA Experiment ID: 20000184 Result: Down-regulated in Transcription
  misc_feature: MA Experiment 20000184 PARAMETER Experiment Name: At_Shoots__P Parameter: Age (day) Value: 7
  misc_feature: MA Experiment 20000184 PARAMETER Experiment Name: At_Shoots__P Parameter: Tissue Value: Shoots vs. Whole Plant
  misc_feature: MA Experiment ID: 20000185 Result: Down-regulated in Transcription
  misc_feature: MA Experiment 20000185 PARAMETER Experiment Name: At_Roots__P Parameter: Age (day) Value: 7 vs. 21
  misc_feature: MA Experiment 20000185 PARAMETER Experiment Name: At_Roots__P Parameter: Organism Value: A. thaliana
  misc_feature: MA Experiment 20000185 PARAMETER Experiment Name: At_Roots__P Parameter: Tissue Value: Roots vs. Whole Plant
  misc_feature: MA Experiment ID: 20000211 Result: Up-regulated in Transcription
  misc_feature: MA Experiment 20000211 PARAMETER Experiment Name: At_0.001percent_MeJA__P Parameter: Age (day) Value: 14
  misc_feature: MA Experiment 20000211 PARAMETER Experiment Name: At_0.001percent_MeJA__P Parameter: Organism Value: A. thaliana
  misc_feature: MA Experiment 20000211 PARAMETER Experiment Name: At_0.001percent_MeJA__P Parameter: Plant Line Value: WS
  misc_feature: MA Experiment 20000211 PARAMETER Experiment Name: At_0.001percent_MeJA__P Parameter: Timepoint (hr) Value: 1
  misc_feature: MA Experiment 20000211 PARAMETER Experiment Name: At_0.001percent_MeJA__P Parameter: Tissue Value: Aerial
  misc_feature: MA Experiment 20000211 PARAMETER Experiment Name: At_0.001percent_MeJA__P Parameter: Treatment Value: 0.001percent MeJA vs. No Treatment
  misc_feature: MA Experiment ID: 20000224 Result: Up-regulated in Transcription
  misc_feature: MA Experiment ID: 20000227 Result: Down-regulated in Transcription
  misc_feature: MA Experiment 20000227 PARAMETER Experiment Name: At_Root-Tips-vs-Tops_P Parameter: Tissue Value: Root Tips vs. Root Tops
  misc_feature: MA Experiment ID: 20000234 Result: Down-regulated in Transcription
  misc_feature: MA Experiment 20000234 PARAMETER Experiment Name: At_Siliques_P Parameter: Age (day) Value: 21
  misc_feature: MA Experiment 20000234 PARAMETER Experiment Name: At_Siliques_P Parameter: Organism Value: A. thaliana
  misc_feature: MA Experiment 20000234 PARAMETER Experiment Name: At_Siliques_P Parameter: Plant Line Value: WS
  misc_feature: MA Experiment 20000234 PARAMETER Experiment Name: At_Siliques_P Parameter: Tissue Value: Less Than 5mm Siliques vs. Whole Plant
  misc_feature: MA Experiment ID: 20000235 Result: Down-regulated in Transcription
  misc_feature: MA Experiment 20000235 PARAMETER Experiment Name: At_Siliques_P Parameter: Age (day) Value: 21
  misc_feature: MA Experiment 20000235 PARAMETER Experiment Name: At_Siliques_P Parameter: Organism Value: A. thaliana
  misc_feature: MA Experiment 20000235 PARAMETER Experiment Name: At_Siliques_P Parameter: Plant Line Value: WS
  misc_feature: MA Experiment 20000235 PARAMETER Experiment Name: At_Siliques_P Parameter: Tissue Value: 5-10mm Siliques vs. Whole Plant
  misc_feature: MA Experiment ID: 20000264 Result: Down-regulated in Transcription
  misc_feature: MA Experiment 20000264 PARAMETER Experiment Name: At_Open_Flower_P Parameter: Age (day) Value: 21
  misc_feature: MA Experiment 20000264 PARAMETER Experiment Name: At_Open_Flower_P Parameter: Plant Line Value: WS
  misc_feature: MA Experiment 20000264 PARAMETER Experiment Name: At_Open_Flower_P Parameter: Tissue Value: Open Flower vs. Whole Plant
  misc_feature: MA Experiment ID: 20000265 Result: Down-regulated in Transcription
  misc_feature: MA Experiment 20000265 PARAMETER Experiment Name: At_Open_Flower_P Parameter: Age (day) Value: 21
  misc_feature: MA Experiment 20000265 PARAMETER Experiment Name: At_Open_Flower_P Parameter: Plant Line Value: WS
  misc_feature: MA Experiment 20000265 PARAMETER Experiment Name: At_Open_Flower_P Parameter: Tissue Value: Closed Flower vs. Whole Plant
  misc_feature: MA Experiment ID: 20000286 Result: Down-regulated in Transcription
  misc_feature: MA Experiment 20000286 PARAMETER Experiment Name: At_Open_Flower_P Parameter: Age (day) Value: 21
  misc_feature: MA Experiment 20000286 PARAMETER Experiment Name: At_Open_Flower_P Parameter: Plant Line Value: WS
  misc_feature: MA Experiment 20000286 PARAMETER Experiment Name: At_Open_Flower_P Parameter: Tissue Value: Half Open vs. Whole Plant
  misc_feature: MA Experiment ID: 20000436 Result: Down-regulated in Transcription
  misc_feature: MA Experiment 20000436 PARAMETER Experiment Name: At_Drought_P Parameter: Age (day) Value: 7
  misc_feature: MA Experiment 20000436 PARAMETER Experiment Name: At_Drought_P Parameter: Organism Value: A. thaliana
  misc_feature: MA Experiment 20000436 PARAMETER Experiment Name: At_Drought_P Parameter: Plant Line Value: WS
  misc_feature: MA Experiment 20000436 PARAMETER Experiment Name: At_Drought_P Parameter: Timepoint (hr) Value: 12
  misc_feature: MA Experiment 20000436 PARAMETER Experiment Name: At_Drought_P Parameter: Tissue Value: Whole Plant
  misc_feature: MA Experiment 20000436 PARAMETER Experiment Name: At_Drought_P Parameter: Treatment Value: Drought vs. No Drought
  misc_feature: MA Experiment ID: 20000437 Result: Down-regulated in Transcription
  misc_feature: MA Experiment 20000437 PARAMETER Experiment Name: At_Drought_P Parameter: Age (day) Value: 8
  misc_feature: MA Experiment 20000437 PARAMETER Experiment Name: At_Drought_P Parameter: Organism Value: A. thaliana
  misc_feature: MA Experiment 20000437 PARAMETER Experiment Name: At_Drought_P Parameter: Plant Line Value: WS
  misc_feature: MA Experiment 20000437 PARAMETER Experiment Name: At_Drought_P Parameter: Timepoint (hr) Value: 24
  misc_feature: MA Experiment 20000437 PARAMETER Experiment Name: At_Drought_P Parameter: Tissue Value: Whole Plant
  misc_feature: MA Experiment 20000437 PARAMETER Experiment Name: At_Drought_P Parameter: Treatment Value: Drought vs. No Drought
  misc_feature: MA Experiment ID: 20000445 Result: Down-regulated in Transcription
  misc_feature: MA Experiment 20000445 PARAMETER Experiment Name: At_100uM_NAA__P Parameter: Age (day) Value: 14
  misc_feature: MA Experiment 20000445 PARAMETER Experiment Name: At_100uM_NAA__P Parameter: Organism Value: A. thaliana
  misc_feature: MA Experiment 20000445 PARAMETER Experiment Name: At_100uM_NAA__P Parameter: Plant Line Value: WS
  misc_feature: MA Experiment 20000445 PARAMETER Experiment Name: At_100uM_NAA__P Parameter: Timepoint (hr) Value: 6
  misc_feature: MA Experiment 20000445 PARAMETER Experiment Name: At_100uM_NAA__P Parameter: Tissue Value: Aerial
  misc_feature: MA Experiment 20000445 PARAMETER Experiment Name: At_100uM_NAA__P Parameter: Treatment Value: 100uM NAA vs. No Treatment
  misc_feature: MA Experiment ID: 20000451 Result: Up-regulated in Transcription
  misc_feature: MA Experiment 20000451 PARAMETER Experiment Name: At_CS6879_Shoots-Roots_P Parameter: Age (day) Value: 14
  misc_feature: MA Experiment 20000451 PARAMETER Experiment Name: At_CS6879_Shoots-Roots_P Parameter: Organism Value: A. thaliana
  misc_feature: MA Experiment 20000451 PARAMETER Experiment Name: At_CS6879_Shoots-Roots_P Parameter: Plant Line Value: CS6879 vs. WS
  misc_feature: MA Experiment 20000451 PARAMETER Experiment Name: At_CS6879_Shoots-Roots_P Parameter: Tissue Value: Roots
  misc_feature: MA Experiment ID: 20000794 Result: Down-regulated in Transcription
  misc_feature: MA Experiment 20000794 PARAMETER Experiment Name: At_Petals_P Parameter: Age (day) Value: 23-25 days
  misc_feature: MA Experiment 20000794 PARAMETER Experiment Name: At_Petals_P Parameter: Plant Line Value: WS
  misc_feature: MA Experiment 20000794 PARAMETER Experiment Name: At_Petals_P Parameter: Tissue Value: Petals vs. Whole plant
  misc_feature: MA Experiment ID: 20001248 Result: Down-regulated in Transcription
  misc_feature: MA Experiment 20001248 PARAMETER Experiment Name: At_Far-red-induction_P Parameter: Age (day) Value: 7
  misc_feature: MA Experiment 20001248 PARAMETER Experiment Name: At_Far-red-induction_P Parameter: Light Value: Far-red vs. White
  misc_feature: MA Experiment 20001248 PARAMETER Experiment Name: At_Far-red-induction_P Parameter: Organism Value: A. thaliana
  misc_feature: MA Experiment 20001248 PARAMETER Experiment Name: At_Far-red-induction_P Parameter: Plant Line Value: Columbia
  misc_feature: MA Experiment 20001248 PARAMETER Experiment Name: At_Far-red-induction_P Parameter: Timepoint (hr) Value: 4
  misc_feature: MA Experiment 20001248 PARAMETER Experiment Name: At_Far-red-induction_P Parameter: Tissue Value: Whole Plant
  misc_feature: MA Experiment ID: 20001450 Result: Down-regulated in Transcription
  misc_feature: MA Experiment 20001450 PARAMETER Experiment Name: At_Far-red-induction_P Parameter: Age (day) Value: 7
  misc_feature: MA Experiment 20001450 PARAMETER Experiment Name: At_Far-red-induction_P Parameter: Light Value: Far-red vs. White
  misc_feature: MA Experiment 20001450 PARAMETER Experiment Name: At_Far-red-induction_P Parameter: Organism Value: A. thaliana
  misc_feature: MA Experiment 20001450 PARAMETER Experiment Name: At_Far-red-induction_P Parameter: Plant Line Value: Columbia
  misc_feature: MA Experiment 20001450 PARAMETER Experiment Name: At_Far-red-induction_P Parameter: Timepoint (hr) Value: 8
  misc_feature: MA Experiment 20001450 PARAMETER Experiment Name: At_Far-red-induction_P Parameter: Tissue Value: Whole Plant
  misc_feature: MA Experiment ID: 20001451 Result: Down-regulated in Transcription
  misc_feature: MA Experiment 20001451 PARAMETER Experiment Name: At_Far-red-induction_P Parameter: Age (day) Value: 7
  misc_feature: MA Experiment 20001451 PARAMETER Experiment Name: At_Far-red-induction_P Parameter: Light Value: Far-red vs. White
  misc_feature: MA Experiment 20001451 PARAMETER Experiment Name: At_Far-red-induction_P Parameter: Organism Value: A. thaliana
  misc_feature: MA Experiment 20001451 PARAMETER Experiment Name: At_Far-red-induction_P Parameter: Plant Line Value: Columbia
  misc_feature: MA Experiment 20001451 PARAMETER Experiment Name: At_Far-red-induction_P Parameter: Timepoint (hr) Value: 24
  misc_feature: MA Experiment 20001451 PARAMETER Experiment Name: At_Far-red-induction_P Parameter: Tissue Value: Whole Plant
  misc_feature: MA Experiment ID: 20001457 Result: Down-regulated in Transcription
  misc_feature: MA Experiment 20001457 PARAMETER Experiment Name: At_50mM_NH4NO3_L-to-H_P Parameter: Age (day) Value: Undefined
  misc_feature: MA Experiment 20001457 PARAMETER Experiment Name: At_50mM_NH4NO3_L-to-H_P Parameter: Organism Value: Undefined
  misc_feature: MA Experiment 20001457 PARAMETER Experiment Name: At_50mM_NH4NO3_L-to-H_P Parameter: Plant Line Value: Undefined
  misc_feature: MA Experiment 20001457 PARAMETER Experiment Name: At_50mM_NH4NO3_L-to-H_P Parameter: Timepoint (hr) Value: 0.5
  misc_feature: MA Experiment 20001457 PARAMETER Experiment Name: At_50mM_NH4NO3_L-to-H_P Parameter: Tissue Value: Siliques
  misc_feature: MA Experiment 20001457 PARAMETER Experiment Name: At_50mM_NH4NO3_L-to-H_P Parameter: Treatment Value: 50mM NH4NO3 vs. 100mM Manitol
  misc_feature: MA Experiment ID: 20001560 Result: Up-regulated in Transcription
  misc_feature: MA Experiment 20001560 PARAMETER Experiment Name: At_Drought_Soil_Dry_P Parameter: Age (day) Value: 28
  misc_feature: MA Experiment 20001560 PARAMETER Experiment Name: At_Drought_Soil_Dry_P Parameter: Organism Value: A. thaliana
  misc_feature: MA Experiment 20001560 PARAMETER Experiment Name: At_Drought_Soil_Dry_P Parameter: Plant Line Value: WS
  misc_feature: MA Experiment 20001560 PARAMETER Experiment Name: At_Drought_Soil_Dry_P Parameter: Post Timepoint (hr) Value: None
  misc_feature: MA Experiment 20001560 PARAMETER Experiment Name: At_Drought_Soil_Dry_P Parameter: Post-Treatment Value: None
  misc_feature: MA Experiment 20001560 PARAMETER Experiment Name: At_Drought_Soil_Dry_P Parameter: Timepoint (day) Value: 14
  misc_feature: MA Experiment 20001560 PARAMETER Experiment Name: At_Drought_Soil_Dry_P Parameter: Treatment Value: Drought vs. No Drought
  misc_feature: MA Experiment ID: 20001906 Result: Up-regulated in Transcription
  misc_feature: MA Experiment 20001906 PARAMETER Experiment Name: At_Drought_Reproduction_P Parameter: Age (day) Value: 35
  misc_feature: MA Experiment 20001906 PARAMETER Experiment Name: At_Drought_Reproduction_P Parameter: Organism Value: A. thaliana
  misc_feature: MA Experiment 20001906 PARAMETER Experiment Name: At_Drought_Reproduction_P Parameter: Plant Line Value: WS
  misc_feature: MA Experiment 20001906 PARAMETER Experiment Name: At_Drought_Reproduction_P Parameter: Timepoint (day) Value: 5
  misc_feature: MA Experiment 20001906 PARAMETER Experiment Name: At_Drought_Reproduction_P Parameter: Tissue Value: Siliques
  misc_feature: MA Experiment 20001906 PARAMETER Experiment Name: At_Drought_Reproduction_P Parameter: Treatment Value: Drought vs. No Drought

SEQ ID NO: 31703 - protein, 216 aa, Arabidopsis thaliana; identical to SEQ ID NO: 28113
  peptide (1)..(216): Ceres Seq. ID no. 12333822
  misc_feature (79)..(196): Pfam Name: Sulfotransferase domain Pfam Description: Sulfotransferase domain
  misc_feature (34)..(185): Homolog of NCBI NO: 4321096 NR Description: flavonol 3-sulfotransferase [Flaveria
  misc_feature (34)..(185): Homolog of NCBI NO: 1706738 NR Description: FLAVONOL 3-SULFOTRANSFERASE (F3-ST)
  misc_feature (34)..(185): Homolog of NCBI NO: 1706918 NR Description: FLAVONOL SULFOTRANSFERASE-LIKE
  misc_feature (25)..(188): Homolog of NCBI NO: 285286 NR Description: flavonol 4'-sulfotransferase - Flaveria
  misc_feature (25)..(188): Homolog of NCBI NO: 1706740 NR Description: FLAVONOL 4'-SULFOTRANSFERASE (F4-ST)
  misc_feature (1)..(194): Homolog of NCBI NO: 15221131 NR Description: putative flavonol sulfotransferase
  misc_feature (1)..(194): Homolog of NCBI NO: 21593087 NR Description: putative flavonol sulfotransferase [Arabidopsis
  misc_feature (1)..(196): Homolog of NCBI NO: 21593660 NR Description: putative flavonol sulfotransferase [Arabidopsis
  misc_feature (1)..(196): Homolog of NCBI NO: 15221130 NR Description: putative flavonol sulfotransferase
  misc_feature (1)..(196): Homolog of NCBI NO: 15221820 NR Description: flavonol 4'-sulfotransferase, putative; protein

SEQ ID NO: 31704 - protein, 150 aa, Arabidopsis thaliana; identical to SEQ ID NO: 28114
  peptide (1)..(150): Ceres Seq. ID no. 12333823
  misc_feature (26)..(144): Pfam Name: Sulfotransferase domain Pfam Description: Sulfotransferase domain
  misc_feature (9)..(146): Homolog of NCBI NO: 4321096 NR Description: flavonol 3-sulfotransferase [Flaveria
  misc_feature (1)..(146): Homolog of NCBI NO: 1706738 NR Description: FLAVONOL 3-SULFOTRANSFERASE (F3-ST)
  misc_feature (16)..(146): Homolog of NCBI NO: 1706918 NR Description: FLAVONOL SULFOTRANSFERASE-LIKE
  misc_feature (26)..(146): Homolog of NCBI NO: 285286 NR Description: flavonol 4'-sulfotransferase - Flaveria
  misc_feature (26)..(146): Homolog of NCBI NO: 1706740 NR Description: FLAVONOL 4'-SULFOTRANSFERASE (F4-ST)
  misc_feature (26)..(146): Homolog of NCBI NO: 15221131 NR Description: putative flavonol sulfotransferase
  misc_feature (26)..(146): Homolog of NCBI NO: 21593087 NR Description: putative flavonol sulfotransferase [Arabidopsis
  misc_feature (1)..(146): Homolog of NCBI NO: 21593660 NR Description: putative flavonol sulfotransferase [Arabidopsis
  misc_feature (1)..(146): Homolog of NCBI NO: 15221130 NR Description: putative flavonol sulfotransferase
  misc_feature (26)..(150): Homolog of NCBI NO: 15221820 NR Description: flavonol 4'-sulfotransferase, putative; protein

SEQ ID NO: 31705 - DNA, 951 bp, Arabidopsis thaliana; identical to SEQ ID NO: 28115
  misc_feature (1)..(951): Ceres Seq. ID no. 12333817
  misc_feature: MA Experiment ID: 20000171 Result: Down-regulated in Transcription
  misc_feature: MA Experiment 20000171 PARAMETER Experiment Name: At_42deg_Heat_P Parameter: Age (day) Value: 14
  misc_feature: MA Experiment 20000171 PARAMETER Experiment Name: At_42deg_Heat_P Parameter: Organism Value: A. thaliana
  misc_feature: MA Experiment 20000171 PARAMETER Experiment Name: At_42deg_Heat_P Parameter: Plant Line Value: WS
  misc_feature: MA Experiment 20000171 PARAMETER Experiment Name: At_42deg_Heat_P Parameter: Temperature (deg C) Value: 42 vs. 22
  misc_feature: MA Experiment 20000171 PARAMETER Experiment Name: At_42deg_Heat_P Parameter: Timepoint (hr) Value: 1
  misc_feature: MA Experiment 20000171 PARAMETER Experiment Name: At_42deg_Heat_P Parameter: Tissue Value: Aerial
  misc_feature: MA Experiment ID: 20000179 Result: Up-regulated in Transcription
  misc_feature: MA Experiment 20000179 PARAMETER Experiment Name: At_Germinating_Seeds_P Parameter: Age (hr) Value: 6 vs. 0
  misc_feature: MA Experiment 20000179 PARAMETER Experiment Name: At_Germinating_Seeds_P Parameter: Tissue Value: Germinating Seeds
  misc_feature: MA Experiment ID: 20000180 Result: Up-regulated in Transcription
  misc_feature: MA Experiment 20000180 PARAMETER Experiment Name: At_Germinating_Seeds_P Parameter: Age (hr) Value: 24 vs. 0
  misc_feature: MA Experiment 20000180 PARAMETER Experiment Name: At_Germinating_Seeds_P Parameter: Tissue Value: Germinating Seeds
  misc_feature: MA Experiment ID: 20000185 Result: Down-regulated in Transcription
  misc_feature: MA Experiment 20000185 PARAMETER Experiment Name: At_Roots__P Parameter: Age (day) Value: 7 vs. 21
  misc_feature: MA Experiment 20000185 PARAMETER Experiment Name: At_Roots__P Parameter: Organism Value: A. thaliana
  misc_feature: MA Experiment 20000185 PARAMETER Experiment Name: At_Roots__P Parameter: Tissue Value: Roots vs. Whole Plant
  misc_feature: MA Experiment ID: 20000227 Result: Up-regulated in Transcription
  misc_feature: MA Experiment 20000227 PARAMETER Experiment Name: At_Root-Tips-vs-Tops_P Parameter: Tissue Value: Root Tips vs. Root Tops
  misc_feature: MA Experiment ID: 20000264 Result: Up-regulated in Transcription
  misc_feature: MA Experiment 20000264 PARAMETER Experiment Name: At_Open_Flower_P Parameter: Age (day) Value: 21
  misc_feature: MA Experiment 20000264 PARAMETER Experiment Name: At_Open_Flower_P Parameter: Plant Line Value: WS
  misc_feature: MA Experiment 20000264 PARAMETER Experiment Name: At_Open_Flower_P Parameter: Tissue Value: Open Flower vs. Whole Plant
  misc_feature: MA Experiment ID: 20000265 Result: Up-regulated in Transcription
  misc_feature: MA Experiment 20000265 PARAMETER Experiment Name: At_Open_Flower_P Parameter: Age (day) Value: 21
  misc_feature: MA Experiment 20000265 PARAMETER Experiment Name: At_Open_Flower_P Parameter: Plant Line Value: WS
  misc_feature: MA Experiment 20000265 PARAMETER Experiment Name: At_Open_Flower_P Parameter: Tissue Value: Closed Flower vs. Whole Plant
  misc_feature: MA Experiment ID: 20000286 Result: Up-regulated in Transcription
  misc_feature: MA Experiment 20000286 PARAMETER Experiment Name: At_Open_Flower_P Parameter: Age (day) Value: 21
  misc_feature: MA Experiment 20000286 PARAMETER Experiment Name: At_Open_Flower_P Parameter: Plant Line Value: WS
  misc_feature: MA Experiment 20000286 PARAMETER Experiment Name: At_Open_Flower_P Parameter: Tissue Value: Half Open vs. Whole Plant
  misc_feature: MA Experiment ID: 20000439 Result: Down-regulated in Transcription
  misc_feature: MA Experiment 20000439 PARAMETER Experiment Name: At_Roots__P Parameter: Age (day) Value: 14 vs. 21
  misc_feature: MA Experiment 20000439 PARAMETER Experiment Name: At_Roots__P Parameter: Organism Value: A. thaliana
  misc_feature: MA Experiment 20000439 PARAMETER Experiment Name: At_Roots__P Parameter: Tissue Value: Roots vs. Whole Plant
  misc_feature: MA Experiment ID: 20001555 Result: Up-regulated in Transcription
  misc_feature: MA Experiment 20001555 PARAMETER Experiment Name: At_Drought_Soil_Dry_P Parameter: Age (day) Value: 24
  misc_feature: MA Experiment 20001555 PARAMETER Experiment Name: At_Drought_Soil_Dry_P Parameter: Organism Value: A. thaliana
  misc_feature: MA Experiment 20001555 PARAMETER Experiment Name: At_Drought_Soil_Dry_P Parameter: Plant Line Value: WS
  misc_feature: MA Experiment 20001555 PARAMETER Experiment Name: At_Drought_Soil_Dry_P Parameter: Post Timepoint (hr) Value: None
  misc_feature: MA Experiment 20001555 PARAMETER Experiment Name: At_Drought_Soil_Dry_P Parameter: Post-Treatment Value: None
  misc_feature: MA Experiment 20001555 PARAMETER Experiment Name: At_Drought_Soil_Dry_P Parameter: Timepoint (day) Value: 10
  misc_feature: MA Experiment 20001555 PARAMETER Experiment Name: At_Drought_Soil_Dry_P Parameter: Treatment Value: Drought vs. No Drought
  misc_feature: MA Experiment ID: 20001556 Result: Up-regulated in Transcription
  misc_feature: MA Experiment 20001556 PARAMETER Experiment Name: At_Drought_Soil_Dry_P Parameter: Age (day) Value: 26
  misc_feature: MA Experiment 20001556 PARAMETER Experiment Name: At_Drought_Soil_Dry_P Parameter: Organism Value: A. thaliana
  misc_feature: MA Experiment 20001556 PARAMETER Experiment Name: At_Drought_Soil_Dry_P Parameter: Plant Line Value: WS
  misc_feature: MA Experiment 20001556 PARAMETER Experiment Name: At_Drought_Soil_Dry_P Parameter: Post Timepoint (hr) Value: None
  misc_feature: MA Experiment 20001556 PARAMETER Experiment Name: At_Drought_Soil_Dry_P Parameter: Post-Treatment Value: None
  misc_feature: MA Experiment 20001556 PARAMETER Experiment Name: At_Drought_Soil_Dry_P Parameter: Timepoint (day) Value: 12
  misc_feature: MA Experiment 20001556 PARAMETER Experiment Name: At_Drought_Soil_Dry_P Parameter: Treatment Value: Drought vs. No Drought
  misc_feature: MA Experiment ID: 20001559 Result: Up-regulated in Transcription
  misc_feature: MA Experiment 20001559 PARAMETER Experiment Name: At_Drought_Soil_Dry_P Parameter: Age (day) Value: 28
  misc_feature: MA Experiment 20001559 PARAMETER Experiment Name: At_Drought_Soil_Dry_P Parameter: Organism Value: A. thaliana
  misc_feature: MA Experiment 20001559 PARAMETER Experiment Name: At_Drought_Soil_Dry_P Parameter: Plant Line Value: WS
  misc_feature: MA Experiment 20001559 PARAMETER Experiment Name: At_Drought_Soil_Dry_P Parameter: Post Timepoint (hr) Value: 29
  misc_feature: MA Experiment 20001559 PARAMETER Experiment Name: At_Drought_Soil_Dry_P Parameter: Post-Treatment Value: Re-Water vs. No Drought
  misc_feature: MA Experiment 20001559 PARAMETER Experiment Name: At_Drought_Soil_Dry_P Parameter: Timepoint (day) Value: 14
  misc_feature: MA Experiment 20001559 PARAMETER Experiment Name: At_Drought_Soil_Dry_P Parameter: Treatment Value: Drought vs. No Drought
  misc_feature: MA Experiment ID: 20001904 Result: Up-regulated in Transcription
  misc_feature: MA Experiment 20001904 PARAMETER Experiment Name: At_Drought_Reproduction_P Parameter: Age (day) Value: 37
  misc_feature: MA Experiment 20001904 PARAMETER Experiment Name: At_Drought_Reproduction_P Parameter: Organism Value: A. thaliana
  misc_feature: MA Experiment 20001904 PARAMETER Experiment Name: At_Drought_Reproduction_P Parameter: Plant Line Value: WS
  misc_feature: MA Experiment 20001904 PARAMETER Experiment Name: At_Drought_Reproduction_P Parameter: Timepoint (day) Value: 7
  misc_feature: MA Experiment 20001904 PARAMETER Experiment Name: At_Drought_Reproduction_P Parameter: Tissue Value: Rosettes
  misc_feature: MA Experiment 20001904 PARAMETER Experiment Name: At_Drought_Reproduction_P Parameter: Treatment Value: Drought vs. No Drought

SEQ ID NO: 31706 - protein, 265 aa, Arabidopsis thaliana; identical to SEQ ID NO: 28116
  peptide (1)..(265): Ceres Seq. ID no. 12333818
  misc_feature (113)..(242): Pfam Name: Universal stress protein family Pfam Description: Universal stress protein family
  misc_feature (118)..(209): Homolog of NCBI NO: 15227695 NR Description: unknown protein; protein id: At2g03720.1
  misc_feature (158)..(265): Homolog of NCBI NO: 15228516 NR Description: hypothetical protein; protein id: At3g03290.1
  misc_feature (84)..(213): Homolog of NCBI NO: 15237955 NR Description: putative protein; protein id: At5g17390.1
  misc_feature (158)..(265): Homolog of NCBI NO: 15237955 NR Description: putative protein; protein id: At5g17390.1
  misc_feature (155)..(265): Homolog of NCBI NO: 21592322 NR Description: unknown [Arabidopsis thaliana]
  misc_feature (155)..(265): Homolog of NCBI NO: 18409190 NR Description: expressed protein
  misc_feature (65)..(265): Homolog of NCBI NO: 34907308 NR Description: hypothetical protein~similar to Arabidopsis
  misc_feature (49)..(265): Homolog of NCBI NO: 15219439 NR Description: hypothetical protein

SEQ ID NO: 31707 - protein, 217 aa, Arabidopsis thaliana; identical to SEQ ID NO: 28117
  peptide (1)..(217): Ceres Seq. ID no. 12333819
  misc_feature (65)..(194): Pfam Name: Universal stress protein family Pfam Description: Universal stress protein family
  misc_feature (70)..(161): Homolog of NCBI NO: 15227695 NR Description: unknown protein; protein id: At2g03720.1
  misc_feature (110)..(217): Homolog of NCBI NO: 15228516 NR Description: hypothetical protein; protein id: At3g03290.1
  misc_feature (36)..(165): Homolog of NCBI NO: 15237955 NR Description: putative protein; protein id: At5g17390.1
  misc_feature (110)..(217): Homolog of NCBI NO: 15237955 NR Description: putative protein; protein id: At5g17390.1
  misc_feature (107)..(217): Homolog of NCBI NO: 21592322 NR Description: unknown [Arabidopsis thaliana]
  misc_feature (107)..(217): Homolog of NCBI NO: 18409190 NR Description: expressed protein
  misc_feature (17)..(217): Homolog of NCBI NO: 34907308 NR Description: hypothetical protein~similar to Arabidopsis
  misc_feature (1)..(217): Homolog of NCBI NO: 15219439 NR Description: hypothetical protein

SEQ ID NO: 31708 - protein, 168 aa, Arabidopsis thaliana; identical to SEQ ID NO: 28118
  peptide (1)..(168): Ceres Seq. ID no. 12333820
  misc_feature (16)..(145): Pfam Name: Universal stress protein family Pfam Description: Universal stress protein family
  misc_feature (21)..(112): Homolog of NCBI NO: 15227695 NR Description: unknown protein; protein id: At2g03720.1
  misc_feature (61)..(168): Homolog of NCBI NO: 15228516 NR Description: hypothetical protein; protein id: At3g03290.1
  misc_feature (1)..(116): Homolog of NCBI NO: 15237955 NR Description: putative protein; protein id: At5g17390.1
  misc_feature (61)..(168): Homolog of NCBI NO: 15237955 NR Description: putative protein; protein id: At5g17390.1
  misc_feature (58)..(168): Homolog of NCBI NO: 21592322 NR Description: unknown [Arabidopsis thaliana]
  misc_feature (58)..(168): Homolog of NCBI NO: 18409190 NR Description: expressed protein
  misc_feature (1)..(168): Homolog of NCBI NO: 34907308 NR Description: hypothetical protein~similar to Arabidopsis
  misc_feature (1)..(168): Homolog of NCBI NO: 15219439 NR Description: hypothetical protein

SEQ ID NO: 31709 - DNA, 1058 bp, Arabidopsis thaliana; identical to SEQ ID NO: 28119
  misc_feature (1)..(1058): Ceres Seq. ID no. 12327410
  misc_feature: MA Experiment ID: 108434 Result: Down-regulated in Transcription
  misc_feature: MA Experiment 108434 PARAMETER Experiment Name: At_Root_Tips_cDNA_P Parameter: Tissue Value: Root Tips
  misc_feature: MA Experiment ID: 108488 Result: Down-regulated in Transcription
  misc_feature: MA Experiment ID: 108573 Result: Up-regulated in Transcription
  misc_feature: MA Experiment 108573 PARAMETER Experiment Name: At_Drought_cDNA_P Parameter: Timepoint (hr) Value: 6
  misc_feature: MA Experiment 108573 PARAMETER Experiment Name: At_Drought_cDNA_P Parameter: Tissue Value: Aerial
  misc_feature: MA Experiment 108573 PARAMETER Experiment Name: At_Drought_cDNA_P Parameter: Treatment Value: Drought vs. No Drought
  misc_feature: MA Experiment ID: 108668 Result: Up-regulated in Transcription
  misc_feature: MA Experiment 108668 PARAMETER Experiment Name: At_2mM_SA_cDNA_P Parameter: Plant Line Value: WS
  misc_feature: MA Experiment 108668 PARAMETER Experiment Name: At_2mM_SA_cDNA_P Parameter: Timepoint (hr) Value: 6
  misc_feature: MA Experiment 108668 PARAMETER Experiment Name: At_2mM_SA_cDNA_P Parameter: Treatment Value: 2mM SA vs. No Treatment
  misc_feature: MA Experiment ID: 20000069 Result: Up-regulated in Transcription
  misc_feature: MA Experiment 20000069 PARAMETER Experiment Name: At_100uM_ABA_Mutants_cDNA_P Parameter: Plant Line Value: CS23
  misc_feature: MA Experiment 20000069 PARAMETER Experiment Name: At_100uM_ABA_Mutants_cDNA_P Parameter: Timepoint (hr) Value: 6
  misc_feature: MA Experiment 20000069 PARAMETER Experiment Name: At_100uM_ABA_Mutants_cDNA_P Parameter: Tissue Value: Aerial
  misc_feature: MA Experiment 20000069 PARAMETER Experiment Name: At_100uM_ABA_Mutants_cDNA_P Parameter: Treatment Value: 100uM ABA vs. No Treatment
  misc_feature: MA Experiment ID: 20000070 Result: Up-regulated in Transcription
  misc_feature: MA Experiment 20000070 PARAMETER Experiment Name: At_100uM_ABA_Mutants_cDNA_P Parameter: Plant Line Value: CS24
  misc_feature: MA Experiment 20000070 PARAMETER Experiment Name: At_100uM_ABA_Mutants_cDNA_P Parameter: Timepoint (hr) Value: 6
  misc_feature: MA Experiment 20000070 PARAMETER Experiment Name: At_100uM_ABA_Mutants_cDNA_P Parameter: Tissue Value: Aerial
  misc_feature: MA Experiment 20000070 PARAMETER Experiment Name: At_100uM_ABA_Mutants_cDNA_P Parameter: Treatment Value: 100uM ABA vs. No Treatment
  misc_feature: MA Experiment ID: 20000072 Result: Up-regulated in Transcription
  misc_feature: MA Experiment 20000072 PARAMETER Experiment Name: At_100uM_ABA_Mutants_cDNA_P Parameter: Plant Line Value: CS8105
  misc_feature: MA Experiment 20000072 PARAMETER Experiment Name: At_100uM_ABA_Mutants_cDNA_P Parameter: Timepoint (hr) Value: 6
  misc_feature: MA Experiment 20000072 PARAMETER Experiment Name: At_100uM_ABA_Mutants_cDNA_P Parameter: Tissue Value: Aerial
  misc_feature: MA Experiment 20000072 PARAMETER Experiment Name: At_100uM_ABA_Mutants_cDNA_P Parameter: Treatment Value: 100uM ABA vs. No Treatment
  misc_feature: MA Experiment ID: 20000086 Result: Up-regulated in Transcription
  misc_feature: MA Experiment 20000086 PARAMETER Experiment Name: At_100uM_ABA_Mutants_cDNA_P Parameter: Plant Line Value: CS22
  misc_feature: MA Experiment 20000086 PARAMETER Experiment Name: At_100uM_ABA_Mutants_cDNA_P Parameter: Timepoint (hr) Value: 6
  misc_feature: MA Experiment 20000086 PARAMETER Experiment Name: At_100uM_ABA_Mutants_cDNA_P Parameter: Tissue Value: Aerial
  misc_feature: MA Experiment 20000086 PARAMETER Experiment Name: At_100uM_ABA_Mutants_cDNA_P Parameter: Treatment Value: 100uM ABA vs. No Treatment
  misc_feature: MA Experiment ID: 20000087 Result: Up-regulated in Transcription
  misc_feature: MA Experiment 20000087 PARAMETER Experiment Name: At_100uM_ABA_Mutants_cDNA_P Parameter: Plant Line Value: WS
  misc_feature: MA Experiment 20000087 PARAMETER Experiment Name: At_100uM_ABA_Mutants_cDNA_P Parameter: Timepoint (hr) Value: 6
  misc_feature: MA Experiment 20000087 PARAMETER Experiment Name: At_100uM_ABA_Mutants_cDNA_P Parameter: Tissue Value: Aerial
  misc_feature: MA Experiment 20000087 PARAMETER Experiment Name: At_100uM_ABA_Mutants_cDNA_P Parameter: Treatment Value: 100uM ABA vs. No Treatment
  misc_feature: MA Experiment ID: 20000090 Result: Up-regulated in Transcription
  misc_feature: MA Experiment ID: 20000117 Result: Up-regulated in Transcription
  misc_feature: MA Experiment 20000117 PARAMETER Experiment Name: At_100uM_ABA_Mutants_cDNA_P Parameter: Plant Line Value: Columbia
  misc_feature: MA Experiment 20000117 PARAMETER Experiment Name: At_100uM_ABA_Mutants_cDNA_P Parameter: Timepoint (hr) Value: 6
  misc_feature: MA Experiment 20000117 PARAMETER Experiment Name: At_100uM_ABA_Mutants_cDNA_P Parameter: Tissue Value: Aerial
  misc_feature: MA Experiment 20000117 PARAMETER Experiment Name: At_100uM_ABA_Mutants_cDNA_P Parameter: Treatment Value: 100uM ABA vs. No Treatment
  misc_feature: MA Experiment ID: 20000182 Result: Up-regulated in Transcription
  misc_feature: MA Experiment 20000182 PARAMETER Experiment Name: At_2mM_SA_P Parameter: Age (day) Value: 14
  misc_feature: MA Experiment 20000182 PARAMETER Experiment Name: At_2mM_SA_P Parameter: Organism Value: A. thaliana
  misc_feature: MA Experiment 20000182 PARAMETER Experiment Name: At_2mM_SA_P Parameter: Plant Line Value: WS
  misc_feature: MA Experiment 20000182 PARAMETER Experiment Name: At_2mM_SA_P Parameter: Timepoint (hr) Value: 6
  misc_feature: MA Experiment 20000182 PARAMETER Experiment Name: At_2mM_SA_P Parameter: Tissue Value: Aerial
  misc_feature: MA Experiment 20000182 PARAMETER Experiment Name: At_2mM_SA_P Parameter: Treatment Value: 2mM SA vs. No Treatment
  misc_feature: MA Experiment ID: 20000227 Result: Down-regulated in Transcription
  misc_feature: MA Experiment 20000227 PARAMETER Experiment Name: At_Root-Tips-vs-Tops_P Parameter: Tissue Value: Root Tips vs. Root Tops
  misc_feature: MA Experiment ID: 20000234 Result: Down-regulated in Transcription
  misc_feature: MA Experiment 20000234 PARAMETER Experiment Name: At_Siliques_P Parameter: Age (day) Value: 21
  misc_feature: MA Experiment 20000234 PARAMETER Experiment Name: At_Siliques_P Parameter: Organism Value: A. thaliana
  misc_feature: MA Experiment 20000234 PARAMETER Experiment Name: At_Siliques_P Parameter: Plant Line Value: WS
  misc_feature: MA Experiment 20000234 PARAMETER Experiment Name: At_Siliques_P Parameter: Tissue Value: Less Than 5mm Siliques vs. Whole Plant
  misc_feature: MA Experiment ID: 20000235 Result: Down-regulated in Transcription
  misc_feature: MA Experiment 20000235 PARAMETER Experiment Name: At_Siliques_P Parameter: Age (day) Value: 21
  misc_feature: MA Experiment 20000235 PARAMETER Experiment Name: At_Siliques_P Parameter: Organism Value: A. thaliana
  misc_feature: MA Experiment 20000235 PARAMETER Experiment Name: At_Siliques_P Parameter: Plant Line Value: WS
  misc_feature: MA Experiment 20000235 PARAMETER Experiment Name: At_Siliques_P Parameter: Tissue Value: 5-10mm Siliques vs. Whole Plant
  misc_feature: MA Experiment ID: 20000265 Result: Down-regulated in Transcription
  misc_feature: MA Experiment 20000265 PARAMETER Experiment Name: At_Open_Flower_P Parameter: Age (day) Value: 21
  misc_feature: MA Experiment 20000265 PARAMETER Experiment Name: At_Open_Flower_P Parameter: Plant Line Value: WS
  misc_feature: MA Experiment 20000265 PARAMETER Experiment Name: At_Open_Flower_P Parameter: Tissue Value: Closed Flower vs. Whole Plant
  misc_feature: MA Experiment ID: 20000438 Result: Down-regulated in Transcription
  misc_feature: MA Experiment 20000438 PARAMETER Experiment Name: At_Shoots__P Parameter: Age (day) Value: 14
  misc_feature: MA Experiment 20000438 PARAMETER Experiment Name: At_Shoots__P Parameter: Tissue Value: Shoots vs. Whole Plant
  misc_feature: MA Experiment ID: 20000794 Result: Up-regulated in Transcription
  misc_feature: MA Experiment 20000794 PARAMETER Experiment Name: At_Petals_P Parameter: Age (day) Value: 23-25 days
  misc_feature: MA Experiment 20000794 PARAMETER Experiment Name: At_Petals_P Parameter: Plant Line Value: WS
  misc_feature: MA Experiment 20000794 PARAMETER Experiment Name: At_Petals_P Parameter: Tissue Value: Petals vs. Whole plant
  misc_feature: MA Experiment ID: 20001911 Result: Up-regulated in Transcription
  misc_feature: MA Experiment 20001911 PARAMETER Experiment Name: At_Drought_Reproduction_P Parameter: Age (day) Value: 40
  misc_feature: MA Experiment 20001911 PARAMETER Experiment Name: At_Drought_Reproduction_P Parameter: Organism Value: A. thaliana
  misc_feature: MA Experiment 20001911 PARAMETER Experiment Name: At_Drought_Reproduction_P Parameter: Plant Line Value: WS
  misc_feature: MA Experiment 20001911 PARAMETER Experiment Name: At_Drought_Reproduction_P Parameter: Timepoint (day) Value: 10
  misc_feature: MA Experiment 20001911 PARAMETER Experiment Name: At_Drought_Reproduction_P Parameter: Tissue Value: Flowers
  misc_feature: MA Experiment 20001911 PARAMETER Experiment Name: At_Drought_Reproduction_P Parameter: Treatment Value: Drought vs. No Drought

SEQ ID NO: 31710 - protein, 255 aa, Arabidopsis thaliana; identical to SEQ ID NO: 28120
  peptide (1)..(255): Ceres Seq. ID no. 12327411
  misc_feature (40)..(241): Pfam Name: Putative cyclase Pfam Description: Putative cyclase
  misc_feature (39)..(253): Homolog of NCBI NO: 39998438 NR Description: cyclase, putative [Geobacter sulfurreducens PCA]
  misc_feature (40)..(253): Homolog of NCBI NO: 23056289 NR Description: hypothetical protein [Geobacter metallireducens]
  misc_feature (40)..(253): Homolog of NCBI NO: 16330650 NR Description: hypothetical protein [Synechocystis sp. PCC 6803]
  misc_feature (41)..(255): Homolog of NCBI NO: 23016903 NR Description: hypothetical protein [Magnetospirillum
  misc_feature (25)..(133): Homolog of NCBI NO: 7486023 NR Description: hypothetical protein F23E12.220 - Arabidopsis
  misc_feature (21)..(255): Homolog of NCBI NO: 35215089 NR Description: hypothetical protein [Oryza sativa (japonica
  misc_feature (25)..(254): Homolog of NCBI NO: 18418598 NR Description: putative protein
  misc_feature (26)..(255): Homolog of NCBI NO: 15219416 NR Description: hypothetical protein; protein id: At1g44542.1
  misc_feature (1)..(214): Homolog of NCBI NO: 7486287 NR Description: hypothetical protein F28A23.60 - Arabidopsis
  misc_feature (1)..(255): Homolog of NCBI NO: 18418393 NR Description: putative protein

SEQ ID NO: 31711 - protein, 185 aa, Arabidopsis thaliana; identical to SEQ ID NO: 28121
  peptide (1)..(185): Ceres Seq. ID no. 12327412
  misc_feature (1)..(171): Pfam Name: Putative cyclase Pfam Description: Putative cyclase
  misc_feature (1)..(183): Homolog of NCBI NO: 39998438 NR Description: cyclase, putative [Geobacter sulfurreducens PCA]
  misc_feature (1)..(183): Homolog of NCBI NO: 23056289 NR Description: hypothetical protein [Geobacter metallireducens]
  misc_feature (1)..(183): Homolog of NCBI NO: 16330650 NR Description: hypothetical protein [Synechocystis sp. PCC 6803]
  misc_feature (1)..(185): Homolog of NCBI NO: 23016903 NR Description: hypothetical protein [Magnetospirillum
  misc_feature (1)..(63): Homolog of NCBI NO: 7486023 NR Description: hypothetical protein F23E12.220 - Arabidopsis
  misc_feature (1)..(185): Homolog of NCBI NO: 35215089 NR Description: hypothetical protein [Oryza sativa (japonica
  misc_feature (1)..(184): Homolog of NCBI NO: 18418598 NR Description: putative protein
  misc_feature (1)..(185): Homolog of NCBI NO: 15219416 NR Description: hypothetical protein; protein id: At1g44542.1
  misc_feature (1)..(144): Homolog of NCBI NO: 7486287 NR Description: hypothetical protein F28A23.60 - Arabidopsis
  misc_feature (1)..(185): Homolog of NCBI NO: 18418393 NR Description: putative protein

SEQ ID NO: 31712 - protein, 174 aa, Arabidopsis thaliana; identical to SEQ ID NO: 28122
  peptide (1)..(174): Ceres Seq. ID no. 12327413
  misc_feature (1)..(160): Pfam Name: Putative cyclase Pfam Description: Putative cyclase
  misc_feature (1)..(172): Homolog of NCBI NO: 39998438 NR Description: cyclase, putative [Geobacter sulfurreducens PCA]
  misc_feature (1)..(172): Homolog of NCBI NO: 23056289 NR Description: hypothetical protein [Geobacter metallireducens]
  misc_feature (1)..(172): Homolog of NCBI NO: 16330650 NR Description: hypothetical protein [Synechocystis sp. PCC 6803]
  misc_feature (1)..(174): Homolog of NCBI NO: 23016903 NR Description: hypothetical protein [Magnetospirillum
  misc_feature (1)..(52): Homolog of NCBI NO: 7486023 NR Description: hypothetical protein F23E12.220 - Arabidopsis
  misc_feature (1)..(174): Homolog of NCBI NO: 35215089 NR Description: hypothetical protein [Oryza sativa (japonica
  misc_feature (1)..(173): Homolog of NCBI NO: 18418598 NR Description: putative protein
  misc_feature (1)..(174): Homolog of NCBI NO: 15219416 NR Description: hypothetical protein; protein id: At1g44542.1
  misc_feature (1)..(133): Homolog of NCBI NO: 7486287 NR Description: hypothetical protein F28A23.60 - Arabidopsis
  misc_feature (1)..(174): Homolog of NCBI NO: 18418393 NR Description: putative protein

SEQ ID NO: 31713 - DNA, 731 bp, Arabidopsis thaliana; identical to SEQ ID NO: 28123
  misc_feature (1)..(731): Ceres Seq. ID no. 12343557
  misc_feature: MA Experiment ID: 108434 Result: Up-regulated in Transcription
  misc_feature: MA Experiment 108434 PARAMETER Experiment Name: At_Root_Tips_cDNA_P Parameter: Tissue Value: Root Tips
  misc_feature: MA Experiment ID: 108435 Result: Up-regulated in Transcription
  misc_feature: MA Experiment 108435 PARAMETER Experiment Name: At_stm_Mutants_cDNA_P Parameter: Plant Line Value: wt Landsburg vs stm
  misc_feature: MA Experiment 108435 PARAMETER Experiment Name: At_stm_Mutants_cDNA_P Parameter: Tissue Value: Shoot Apical Meristem Region
  misc_feature: MA Experiment ID: 108462 Result: Down-regulated in Transcription
  misc_feature: MA Experiment 108462 PARAMETER Experiment Name: At_Germinating_Seeds_cDNA_P Parameter: Age (day) Value: 2 vs. 0
  misc_feature: MA Experiment 108462 PARAMETER Experiment Name: At_Germinating_Seeds_cDNA_P Parameter: Tissue Value: Germinating Seeds
  misc_feature: MA Experiment ID: 108463 Result: Down-regulated in Transcription
  misc_feature: MA Experiment 108463 PARAMETER Experiment Name: At_Germinating_Seeds_cDNA_P Parameter: Age (day) Value: 3 vs. 0
  misc_feature: MA Experiment 108463 PARAMETER Experiment Name: At_Germinating_Seeds_cDNA_P Parameter: Tissue Value: Germinating Seeds
  misc_feature: MA Experiment ID: 108464 Result: Down-regulated in Transcription
  misc_feature: MA Experiment 108464 PARAMETER Experiment Name: At_Germinating_Seeds_cDNA_P Parameter: Age (day) Value: 4 vs. 0
  misc_feature: MA Experiment 108464 PARAMETER Experiment Name: At_Germinating_Seeds_cDNA_P Parameter: Tissue Value: Germinating Seeds
  misc_feature: MA Experiment ID: 108573 Result: Down-regulated in Transcription
  misc_feature: MA Experiment 108573 PARAMETER Experiment Name: At_Drought_cDNA_P Parameter: Timepoint (hr) Value: 6
  misc_feature: MA Experiment 108573 PARAMETER Experiment Name: At_Drought_cDNA_P Parameter: Tissue Value: Aerial
  misc_feature: MA Experiment 108573 PARAMETER Experiment Name: At_Drought_cDNA_P Parameter: Treatment Value: Drought vs. No Drought
  misc_feature: MA Experiment ID: 108577 Result: Down-regulated in Transcription
  misc_feature: MA Experiment 108577 PARAMETER Experiment Name: At_42deg_Heat_cDNA_P Parameter: Temperature (deg C) Value: 42 vs. 22
  misc_feature: MA Experiment 108577 PARAMETER Experiment Name: At_42deg_Heat_cDNA_P Parameter: Timepoint (hr) Value: 6
  misc_feature: MA Experiment 108577 PARAMETER Experiment Name: At_42deg_Heat_cDNA_P Parameter: Tissue Value: Aerial
  misc_feature: MA Experiment ID: 108579 Result: Up-regulated in Transcription
  misc_feature: MA Experiment 108579 PARAMETER Experiment Name: At_4deg_Cold_cDNA_P Parameter: Temperature (deg C) Value: 4 vs. 22
  misc_feature: MA Experiment 108579 PARAMETER Experiment Name: At_4deg_Cold_cDNA_P Parameter: Timepoint (hr) Value: 6
  misc_feature: MA Experiment 108579 PARAMETER Experiment Name: At_4deg_Cold_cDNA_P Parameter: Tissue Value: Aerial
  misc_feature: MA Experiment ID: 20000093 Result: Down-regulated in Transcription
  misc_feature: MA Experiment 20000093 PARAMETER Experiment Name: At_42deg_Heat_cDNA_P Parameter: Temperature (deg C) Value: 42 vs. 22
  misc_feature: MA Experiment 20000093 PARAMETER Experiment Name: At_42deg_Heat_cDNA_P Parameter: Timepoint (hr) Value: 0.5
  misc_feature: MA Experiment 20000093 PARAMETER Experiment Name: At_42deg_Heat_cDNA_P Parameter: Tissue Value: Aerial
  misc_feature: MA Experiment ID: 20000111 Result: Down-regulated in Transcription
  misc_feature: MA Experiment 20000111 PARAMETER Experiment Name: At_42deg_Heat_cDNA_P Parameter: Temperature (deg C) Value: 42 vs. 22
  misc_feature: MA Experiment 20000111 PARAMETER Experiment Name: At_42deg_Heat_cDNA_P Parameter: Timepoint (hr) Value: 6
  misc_feature: MA Experiment 20000111 PARAMETER Experiment Name: At_42deg_Heat_cDNA_P Parameter: Tissue Value: Aerial
  misc_feature: MA Experiment ID: 20000113 Result: Down-regulated in Transcription
  misc_feature: MA Experiment 20000113 PARAMETER Experiment Name: At_42deg_Heat_cDNA_P Parameter: Temperature (deg C) Value: 42 vs. 22
  misc_feature: MA Experiment 20000113 PARAMETER Experiment Name: At_42deg_Heat_cDNA_P Parameter: Timepoint (hr) Value: 8
  misc_feature: MA Experiment 20000113 PARAMETER Experiment Name: At_42deg_Heat_cDNA_P Parameter: Tissue Value: Aerial
  misc_feature: MA Experiment ID: 20000144 Result: Down-regulated in Transcription
  misc_feature: MA Experiment 20000144 PARAMETER Experiment Name: At_42deg_Heat_cDNA_P Parameter: Temperature (deg C) Value: 42 vs. 22
  misc_feature: MA Experiment 20000144 PARAMETER Experiment Name: At_42deg_Heat_cDNA_P Parameter: Timepoint (hr) Value: 1
  misc_feature: MA Experiment 20000144 PARAMETER Experiment Name: At_42deg_Heat_cDNA_P Parameter: Tissue Value: Aerial
  misc_feature: MA Experiment ID: 20000173 Result: Down-regulated in Transcription
  misc_feature: MA Experiment 20000173 PARAMETER Experiment Name: At_42deg_Heat_P Parameter: Age (day) Value: 14
  misc_feature: MA Experiment 20000173 PARAMETER Experiment Name: At_42deg_Heat_P Parameter: Organism Value: A. thaliana
  misc_feature: MA Experiment 20000173 PARAMETER Experiment Name: At_42deg_Heat_P Parameter: Plant Line Value: WS
  misc_feature: MA Experiment 20000173 PARAMETER Experiment Name: At_42deg_Heat_P Parameter: Temperature (deg C) Value: 42 vs. 22
  misc_feature: MA Experiment 20000173 PARAMETER Experiment Name: At_42deg_Heat_P Parameter: Timepoint (hr) Value: 6
  misc_feature: MA Experiment 20000173 PARAMETER Experiment Name: At_42deg_Heat_P Parameter: Tissue Value: Aerial
  misc_feature: MA Experiment ID: 20000234 Result: Up-regulated in Transcription
  misc_feature: MA Experiment 20000234 PARAMETER Experiment Name: At_Siliques_P Parameter: Age (day) Value: 21
  misc_feature: MA Experiment 20000234 PARAMETER Experiment Name: At_Siliques_P Parameter: Organism Value: A. thaliana
  misc_feature: MA Experiment 20000234 PARAMETER Experiment Name: At_Siliques_P Parameter: Plant Line Value: WS
  misc_feature: MA Experiment 20000234 PARAMETER Experiment Name: At_Siliques_P Parameter: Tissue Value: Less Than 5mm Siliques vs. Whole Plant
  misc_feature: MA Experiment ID: 20000264 Result: Up-regulated in Transcription
  misc_feature: MA Experiment 20000264 PARAMETER Experiment Name: At_Open_Flower_P Parameter: Age (day) Value: 21
  misc_feature: MA Experiment 20000264 PARAMETER Experiment Name: At_Open_Flower_P Parameter: Plant Line Value: WS
  misc_feature: MA Experiment 20000264 PARAMETER Experiment Name: At_Open_Flower_P Parameter: Tissue Value: Open Flower vs. Whole Plant
  misc_feature: MA Experiment ID: 20000265 Result: Up-regulated in Transcription
  misc_feature: MA Experiment 20000265 PARAMETER Experiment Name: At_Open_Flower_P Parameter: Age (day) Value: 21
  misc_feature: MA Experiment 20000265 PARAMETER Experiment Name: At_Open_Flower_P Parameter: Plant Line Value: WS
  misc_feature: MA Experiment 20000265 PARAMETER Experiment Name: At_Open_Flower_P Parameter: Tissue Value: Closed Flower vs. Whole Plant
  misc_feature: MA Experiment ID: 20000286 Result: Up-regulated in Transcription
  misc_feature: MA Experiment 20000286 PARAMETER Experiment Name: At_Open_Flower_P Parameter: Age (day) Value: 21
  misc_feature: MA Experiment 20000286 PARAMETER Experiment Name: At_Open_Flower_P Parameter: Plant Line Value: WS
  misc_feature: MA Experiment 20000286 PARAMETER Experiment Name: At_Open_Flower_P Parameter: Tissue Value: Half Open vs. Whole Plant
  misc_feature: MA Experiment ID: 20000437 Result: Down-regulated in Transcription
  misc_feature: MA Experiment 20000437 PARAMETER Experiment Name: At_Drought_P Parameter: Age (day) Value: 8
  misc_feature: MA Experiment 20000437 PARAMETER Experiment Name: At_Drought_P Parameter: Organism Value: A. thaliana
  misc_feature: MA Experiment 20000437 PARAMETER Experiment Name: At_Drought_P Parameter: Plant Line Value: WS
  misc_feature: MA Experiment 20000437 PARAMETER Experiment Name: At_Drought_P Parameter: Timepoint (hr) Value: 24
  misc_feature: MA Experiment 20000437 PARAMETER Experiment Name: At_Drought_P Parameter: Tissue Value: Whole Plant
  misc_feature: MA Experiment 20000437 PARAMETER Experiment Name: At_Drought_P Parameter: Treatment Value: Drought vs. No Drought
  misc_feature: MA Experiment ID: 20001248 Result: Down-regulated in Transcription
  misc_feature: MA Experiment 20001248 PARAMETER Experiment Name: At_Far-red-induction_P Parameter: Age (day) Value: 7
  misc_feature: MA Experiment 20001248 PARAMETER Experiment Name: At_Far-red-induction_P Parameter: Light Value: Far-red vs. White
  misc_feature: MA Experiment 20001248 PARAMETER Experiment Name: At_Far-red-induction_P Parameter: Organism Value: A. thaliana
  misc_feature: MA Experiment 20001248 PARAMETER Experiment Name: At_Far-red-induction_P Parameter: Plant Line Value: Columbia
  misc_feature: MA Experiment 20001248 PARAMETER Experiment Name: At_Far-red-induction_P Parameter: Timepoint (hr) Value: 4
  misc_feature: MA Experiment 20001248 PARAMETER Experiment Name: At_Far-red-induction_P Parameter: Tissue Value: Whole Plant
  misc_feature: MA Experiment ID: 20001451 Result: Down-regulated in Transcription
  misc_feature: MA Experiment 20001451 PARAMETER Experiment Name: At_Far-red-induction_P Parameter: Age (day) Value: 7
  misc_feature: MA Experiment 20001451 PARAMETER Experiment Name: At_Far-red-induction_P Parameter: Light Value: Far-red vs. White
  misc_feature: MA Experiment 20001451 PARAMETER Experiment Name: At_Far-red-induction_P Parameter: Organism Value: A. thaliana
  misc_feature: MA Experiment 20001451 PARAMETER Experiment Name: At_Far-red-induction_P Parameter: Plant Line Value: Columbia
  misc_feature: MA Experiment 20001451 PARAMETER Experiment Name: At_Far-red-induction_P Parameter: Timepoint (hr) Value: 24
  misc_feature: MA Experiment 20001451 PARAMETER Experiment Name: At_Far-red-induction_P Parameter: Tissue Value: Whole Plant

SEQ ID NO: 31714 - protein, 148 aa, Arabidopsis thaliana; identical to SEQ ID NO: 28124
  peptide (1)..(148): Ceres Seq. ID no. 12343558
  misc_feature (31)..(147): Pfam Name: Core histone H2A/H2B/H3/H4 Pfam Description: Core histone H2A/H2B/H3/H4
  misc_feature (1)..(148): Homolog of NCBI NO: 7387727 NR Description: Histone H2B (CaH2B)
  misc_feature (1)..(148): Homolog of NCBI NO: 7439756 NR Description: histone H2B - tomato
  misc_feature (1)..(148): Homolog of NCBI NO: 7387726 NR Description: Histone H2B
  misc_feature (1)..(148): Homolog of NCBI NO: 15231313 NR Description: histone H2B -like protein
  misc_feature (1)..(148): Homolog of NCBI NO: 15226943 NR Description: putative histone H2B
  misc_feature (1)..(148): Homolog of NCBI NO: 21554180 NR Description: histone H2B-like protein [Arabidopsis thaliana]
  misc_feature (1)..(148): Homolog of NCBI NO: 15238563 NR Description: histone H2B - like protein
  misc_feature (1)..(148): Homolog of NCBI NO: 15231304 NR Description: histone H2B; protein id: At3g45980.1, supported
  misc_feature (1)..(148): Homolog of NCBI NO: 21617908 NR Description: histone H2B [Arabidopsis thaliana]
  misc_feature (1)..(148): Homolog of NCBI NO: 15223016 NR Description: histone H2B

SEQ ID NO: 31715 - protein, 91 aa, Arabidopsis thaliana; identical to SEQ ID NO: 28125
  peptide (1)..(91): Ceres Seq. ID no. 12343559

SEQ ID NO: 31716 - DNA, 750 bp, Arabidopsis thaliana; identical to SEQ ID NO: 28126
  misc_feature (1)..(750): Ceres Seq. ID no. 12339757
  misc_feature: MA Experiment ID: 108461 Result: Down-regulated in Transcription
  misc_feature: MA Experiment 108461 PARAMETER Experiment Name: At_Germinating_Seeds_cDNA_P Parameter: Age (day) Value: 1 vs. 0
  misc_feature: MA Experiment 108461 PARAMETER Experiment Name: At_Germinating_Seeds_cDNA_P Parameter: Tissue Value: Germinating Seeds
  misc_feature: MA Experiment ID: 108462 Result: Down-regulated in Transcription
  misc_feature: MA Experiment 108462 PARAMETER Experiment Name: At_Germinating_Seeds_cDNA_P Parameter: Age (day) Value: 2 vs. 0
  misc_feature: MA Experiment 108462 PARAMETER Experiment Name: At_Germinating_Seeds_cDNA_P Parameter: Tissue Value: Germinating Seeds
  misc_feature: MA Experiment ID: 108463 Result: Down-regulated in Transcription
  misc_feature: MA Experiment 108463 PARAMETER Experiment Name: At_Germinating_Seeds_cDNA_P Parameter: Age (day) Value: 3 vs. 0
  misc_feature: MA Experiment 108463 PARAMETER Experiment Name: At_Germinating_Seeds_cDNA_P Parameter: Tissue Value: Germinating Seeds
  misc_feature: MA Experiment ID: 108464 Result: Down-regulated in Transcription
  misc_feature: MA Experiment 108464 PARAMETER Experiment Name: At_Germinating_Seeds_cDNA_P Parameter: Age (day) Value: 4 vs. 0
  misc_feature: MA Experiment 108464 PARAMETER Experiment Name: At_Germinating_Seeds_cDNA_P Parameter: Tissue Value: Germinating Seeds
  misc_feature: MA Experiment ID: 20000112 Result: Up-regulated in Transcription
  misc_feature: MA Experiment 20000112 PARAMETER Experiment Name: At_42deg_Heat_cDNA_P Parameter: Temperature (deg C) Value: 42 vs. 22
  misc_feature: MA Experiment 20000112 PARAMETER Experiment Name: At_42deg_Heat_cDNA_P Parameter: Timepoint (hr) Value: 2
  misc_feature: MA Experiment 20000112 PARAMETER Experiment Name: At_42deg_Heat_cDNA_P Parameter: Tissue Value: Aerial
  misc_feature: MA Experiment ID: 20000144 Result: Up-regulated in Transcription
  misc_feature: MA Experiment 20000144 PARAMETER Experiment Name: At_42deg_Heat_cDNA_P Parameter: Temperature (deg C) Value: 42 vs. 22
  misc_feature: MA Experiment 20000144 PARAMETER Experiment Name: At_42deg_Heat_cDNA_P Parameter: Timepoint (hr) Value: 1
  misc_feature: MA Experiment 20000144 PARAMETER Experiment Name: At_42deg_Heat_cDNA_P Parameter: Tissue Value: Aerial
  misc_feature: MA Experiment ID: 20000224 Result: Up-regulated in Transcription
  misc_feature: MA Experiment ID: 20001451 Result: Down-regulated in Transcription
  misc_feature: MA Experiment 20001451 PARAMETER Experiment Name: At_Far-red-induction_P Parameter: Age (day) Value: 7
  misc_feature: MA Experiment 20001451 PARAMETER Experiment Name: At_Far-red-induction_P Parameter: Light Value: Far-red vs. White
  misc_feature: MA Experiment 20001451 PARAMETER Experiment Name: At_Far-red-induction_P Parameter: Organism Value: A. thaliana
  misc_feature: MA Experiment 20001451 PARAMETER Experiment Name: At_Far-red-induction_P Parameter: Plant Line Value: Columbia
  misc_feature: MA Experiment 20001451 PARAMETER Experiment Name: At_Far-red-induction_P Parameter: Timepoint (hr) Value: 24
  misc_feature: MA Experiment 20001451 PARAMETER Experiment Name: At_Far-red-induction_P Parameter: Tissue Value: Whole Plant

SEQ ID NO: 31717 - protein, 163 aa, Arabidopsis thaliana; identical to SEQ ID NO: 28127
  peptide (1)..(163): Ceres Seq. ID no. 12339758
  misc_feature (6)..(105): Pfam Name: 2OG-Fe(II) oxygenase superfamily Pfam Description: 2OG-Fe(II) oxygenase superfamily
  misc_feature (2)..(109): Homolog of NCBI NO: 21313390 NR Description: RIKEN cDNA 5730405M13 [Mus musculus]
  misc_feature (2)..(109): Homolog of NCBI NO: 18490973 NR Description: RIKEN cDNA 1300006G11 gene [Mus musculus]
  misc_feature (1)..(109): Homolog of NCBI NO: 34872325 NR Description: similar to RIKEN cDNA 5730405M13 [Rattus
  misc_feature (1)..(147): Homolog of NCBI NO: 15239932 NR Description: putative protein; protein id: At5g43660.1
  misc_feature (1)..(148): Homolog of NCBI NO: 15221946 NR Description: unknown protein; protein id: At1g48740.1
  misc_feature (1)..(141): Homolog of NCBI NO: 15221938 NR Description: unknown protein; protein id: At1g48700.1
  misc_feature (2)..(144): Homolog of NCBI NO: 18401806 NR Description: expressed protein
  misc_feature (2)..(153): Homolog of NCBI NO: 34914494 NR Description: B1080D07.28 [Oryza sativa (japonica
  misc_feature (1)..(163): Homolog of NCBI NO: 25518648 NR Description: hypothetical protein F19G10.9 [imported] -
  misc_feature (1)..(163): Homolog of NCBI NO: 15219973 NR Description: unknown protein; protein id: At1g22950.1

SEQ ID NO: 31718 - protein, 90 aa, Arabidopsis thaliana; identical to SEQ ID NO: 28128
  peptide (1)..(90): Ceres Seq. ID no. 12339759

SEQ ID NO: 31719 - DNA, 1024 bp, Arabidopsis thaliana; identical to SEQ ID NO: 28129
  misc_feature (1)..(1024): Ceres Seq. ID no. 13495970
  misc_feature: MA Experiment ID: 108462 Result: Down-regulated in Transcription
  misc_feature: MA Experiment 108462 PARAMETER Experiment Name: At_Germinating_Seeds_cDNA_P Parameter: Age (day) Value: 2 vs. 0
  misc_feature: MA Experiment 108462 PARAMETER Experiment Name: At_Germinating_Seeds_cDNA_P Parameter: Tissue Value: Germinating Seeds
  misc_feature: MA Experiment ID: 108463 Result: Down-regulated in Transcription
  misc_feature: MA Experiment 108463 PARAMETER Experiment Name: At_Germinating_Seeds_cDNA_P Parameter: Age (day) Value: 3 vs. 0
  misc_feature: MA Experiment 108463 PARAMETER Experiment Name: At_Germinating_Seeds_cDNA_P Parameter: Tissue Value: Germinating Seeds
  misc_feature: MA Experiment ID: 108464 Result: Down-regulated in Transcription
  misc_feature: MA Experiment 108464 PARAMETER Experiment Name: At_Germinating_Seeds_cDNA_P Parameter: Age (day) Value: 4 vs. 0
  misc_feature: MA Experiment 108464 PARAMETER Experiment Name: At_Germinating_Seeds_cDNA_P Parameter: Tissue Value: Germinating Seeds
  misc_feature: MA Experiment ID: 108561 Result: Down-regulated in Transcription
  misc_feature: MA Experiment 108561 PARAMETER Experiment Name: At_100uM_ABA_cDNA_P Parameter: Timepoint (hr) Value: 6
  misc_feature: MA Experiment 108561 PARAMETER Experiment Name: At_100uM_ABA_cDNA_P Parameter: Tissue Value: Aerial
  misc_feature: MA Experiment 108561 PARAMETER Experiment Name: At_100uM_ABA_cDNA_P Parameter: Treatment Value: 100uM ABA vs. No Treatment
  misc_feature: MA Experiment ID: 108595 Result: Down-regulated in Transcription
  misc_feature: MA Experiment 108595 PARAMETER Experiment Name: At_Ler-pi_Ovule_cDNA_P Parameter: Plant Line Value: null
  misc_feature: MA Experiment ID: 108607 Result: Down-regulated in Transcription
  misc_feature: MA Experiment 108607 PARAMETER Experiment Name: At_100uM_ABA_cDNA_P Parameter: Timepoint (hr) Value: 4
  misc_feature: MA Experiment 108607 PARAMETER Experiment Name: At_100uM_ABA_cDNA_P Parameter: Tissue Value: Aerial
  misc_feature: MA Experiment 108607 PARAMETER Experiment Name: At_100uM_ABA_cDNA_P Parameter: Treatment Value: 100uM ABA vs. No Treatment
  misc_feature: MA Experiment ID: 108668 Result: Down-regulated in Transcription
  misc_feature: MA Experiment 108668 PARAMETER Experiment Name: At_2mM_SA_cDNA_P Parameter: Plant Line Value: WS
  misc_feature: MA Experiment 108668 PARAMETER Experiment Name: At_2mM_SA_cDNA_P Parameter: Timepoint (hr) Value: 6
  misc_feature: MA Experiment 108668 PARAMETER Experiment Name: At_2mM_SA_cDNA_P Parameter: Treatment Value: 2mM SA vs. No Treatment
  misc_feature: MA Experiment ID: 20000113 Result: Up-regulated in Transcription
  misc_feature: MA Experiment 20000113 PARAMETER Experiment Name: At_42deg_Heat_cDNA_P Parameter: Temperature (deg C) Value: 42 vs. 22
  misc_feature: MA Experiment 20000113 PARAMETER Experiment Name: At_42deg_Heat_cDNA_P Parameter: Timepoint (hr) Value: 8
  misc_feature: MA Experiment 20000113 PARAMETER Experiment Name: At_42deg_Heat_cDNA_P Parameter: Tissue Value: Aerial
  misc_feature: MA Experiment ID: 20000185 Result: Down-regulated in Transcription
  misc_feature: MA Experiment 20000185 PARAMETER Experiment Name: At_Roots__P Parameter: Age (day) Value: 7 vs. 21
  misc_feature: MA Experiment 20000185 PARAMETER Experiment Name: At_Roots__P Parameter: Organism Value: A. thaliana
  misc_feature: MA Experiment 20000185 PARAMETER Experiment Name: At_Roots__P Parameter: Tissue Value: Roots vs. Whole Plant
  misc_feature: MA Experiment ID: 20000437 Result: Down-regulated in Transcription
  misc_feature: MA Experiment 20000437 PARAMETER Experiment Name: At_Drought_P Parameter: Age (day) Value: 8
  misc_feature: MA Experiment 20000437 PARAMETER Experiment Name: At_Drought_P Parameter: Organism Value: A. thaliana
  misc_feature: MA Experiment 20000437 PARAMETER Experiment Name: At_Drought_P Parameter: Plant Line Value: WS
  misc_feature: MA Experiment 20000437 PARAMETER Experiment Name: At_Drought_P Parameter: Timepoint (hr) Value: 24
  misc_feature: MA Experiment 20000437 PARAMETER Experiment Name: At_Drought_P Parameter: Tissue Value: Whole Plant
  misc_feature: MA Experiment 20000437 PARAMETER Experiment Name: At_Drought_P Parameter: Treatment Value: Drought vs. No Drought
  misc_feature: MA Experiment ID: 20000439 Result: Down-regulated in Transcription
  misc_feature: MA Experiment 20000439 PARAMETER Experiment Name: At_Roots__P Parameter: Age (day) Value: 14 vs. 21
  misc_feature: MA Experiment 20000439 PARAMETER Experiment Name: At_Roots__P Parameter: Organism Value: A. thaliana
  misc_feature: MA Experiment 20000439 PARAMETER Experiment Name: At_Roots__P Parameter: Tissue Value: Roots vs. Whole Plant
  misc_feature: MA Experiment ID: 20000496 Result: Up-regulated in Transcription
  misc_feature: MA Experiment 20000496 PARAMETER Experiment Name: At_Guard_Cells_P Parameter: Harvest Date Value: 7/19/2002
  misc_feature: MA Experiment 20000496 PARAMETER Experiment Name: At_Guard_Cells_P Parameter: Organism Value: Canola
  misc_feature: MA Experiment 20000496 PARAMETER Experiment Name: At_Guard_Cells_P Parameter: Tissue Value: Guard Cells vs. Leaves
  misc_feature: MA Experiment ID: 20000794 Result: Down-regulated in Transcription
  misc_feature: MA Experiment 20000794 PARAMETER Experiment Name: At_Petals_P Parameter: Age (day) Value: 23-25 days
  misc_feature: MA Experiment 20000794 PARAMETER Experiment Name: At_Petals_P Parameter: Plant Line Value: WS
  misc_feature: MA Experiment 20000794 PARAMETER Experiment Name: At_Petals_P Parameter: Tissue Value: Petals vs. Whole plant
  misc_feature: MA Experiment ID: 20001458 Result: Up-regulated in Transcription
  misc_feature: MA Experiment 20001458 PARAMETER Experiment Name: At_50mM_NH4NO3_L-to-H_P Parameter: Age (day) Value: Undefined
  misc_feature: MA Experiment 20001458 PARAMETER Experiment Name: At_50mM_NH4NO3_L-to-H_P Parameter: Organism Value: Undefined
  misc_feature: MA Experiment 20001458 PARAMETER Experiment Name: At_50mM_NH4NO3_L-to-H_P Parameter: Plant Line Value: Undefined
  misc_feature: MA Experiment 20001458 PARAMETER Experiment Name: At_50mM_NH4NO3_L-to-H_P Parameter: Timepoint (hr) Value: 2
  misc_feature: MA Experiment 20001458 PARAMETER Experiment Name: At_50mM_NH4NO3_L-to-H_P Parameter: Tissue Value: Siliques
  misc_feature: MA Experiment 20001458 PARAMETER Experiment Name: At_50mM_NH4NO3_L-to-H_P Parameter: Treatment Value: 50mM NH4NO3 vs. 100mM Manitol
  misc_feature: MA Experiment ID: 20001556 Result: Up-regulated in Transcription
  misc_feature: MA Experiment 20001556 PARAMETER Experiment Name: At_Drought_Soil_Dry_P Parameter: Age (day) Value: 26
  misc_feature: MA Experiment 20001556 PARAMETER Experiment Name: At_Drought_Soil_Dry_P Parameter: Organism Value: A. thaliana
  misc_feature: MA Experiment 20001556 PARAMETER Experiment Name: At_Drought_Soil_Dry_P Parameter: Plant Line Value: WS
  misc_feature: MA Experiment 20001556 PARAMETER Experiment Name: At_Drought_Soil_Dry_P Parameter: Post Timepoint (hr) Value: None
  misc_feature: MA Experiment 20001556 PARAMETER Experiment Name: At_Drought_Soil_Dry_P Parameter: Post-Treatment Value: None
  misc_feature: MA Experiment 20001556 PARAMETER Experiment Name: At_Drought_Soil_Dry_P Parameter: Timepoint (day) Value: 12
  misc_feature: MA Experiment 20001556 PARAMETER Experiment Name: At_Drought_Soil_Dry_P Parameter: Treatment Value: Drought vs. No Drought
  misc_feature: MA Experiment ID: 20001558 Result: Up-regulated in Transcription
  misc_feature: MA Experiment 20001558 PARAMETER Experiment Name: At_Drought_Soil_Dry_P Parameter: Age (day) Value: 27
  misc_feature: MA Experiment 20001558 PARAMETER Experiment Name: At_Drought_Soil_Dry_P Parameter: Organism Value: A. thaliana
  misc_feature: MA Experiment 20001558 PARAMETER Experiment Name: At_Drought_Soil_Dry_P Parameter: Plant Line Value: WS
  misc_feature: MA Experiment 20001558 PARAMETER Experiment Name: At_Drought_Soil_Dry_P Parameter: Post Timepoint (hr) Value: 6
  misc_feature: MA Experiment 20001558 PARAMETER Experiment Name: At_Drought_Soil_Dry_P Parameter: Post-Treatment Value: Re-Water vs. No Drought
  misc_feature: MA Experiment 20001558 PARAMETER Experiment Name: At_Drought_Soil_Dry_P Parameter: Timepoint (day) Value: 13
  misc_feature: MA Experiment 20001558 PARAMETER Experiment Name: At_Drought_Soil_Dry_P Parameter: Treatment Value: Drought vs. No Drought
  misc_feature: MA Experiment ID: 20001757 Result: Up-regulated in Transcription
  misc_feature: MA Experiment 20001757 PARAMETER Experiment Name: At_50mM_NH4NO3_L-to-H_P Parameter: Timepoint (hr) Value: 6
  misc_feature: MA Experiment 20001757 PARAMETER Experiment Name: At_50mM_NH4NO3_L-to-H_P Parameter: Tissue Value: Leaf
  misc_feature: MA Experiment 20001757 PARAMETER Experiment Name: At_50mM_NH4NO3_L-to-H_P Parameter: Treatment Value: 50mM NH4NO3 vs 100mM Mannitol

SEQ ID NO: 31720 - protein, 234 aa, Arabidopsis thaliana; identical to SEQ ID NO: 28130
  peptide (1)..(234): Ceres Seq. ID no. 13495971
  misc_feature (12)..(234): Homolog of NCBI NO: 15230785 NR Description: DAG protein -related [Arabidopsis thaliana]
  misc_feature (12)..(234): Homolog of NCBI NO: 27754695 NR Description: putative DAG protein [Arabidopsis thaliana]
  misc_feature (43)..(234): Homolog of NCBI NO: 15226934 NR Description: expressed protein [Arabidopsis thaliana]
  misc_feature (51)..(234): Homolog of NCBI NO: 34897972 NR Description: putative plastid protein [Oryza sativa (japonica
  misc_feature (58)..(234): Homolog of NCBI NO: 15223247 NR Description: plastid protein -related [Arabidopsis thaliana]
  misc_feature (61)..(232): Homolog of NCBI NO: 38344141 NR Description: OSJNBa0041A02.8 [Oryza sativa (japonica
  misc_feature (37)..(234): Homolog of NCBI NO: 25370552 NR Description: DAG protein homolog [imported] - Arabidopsis
  misc_feature (16)..(234): Homolog of NCBI NO: 2440029 NR Description: DAL1 protein [Arabidopsis thaliana]
  misc_feature (16)..(234): Homolog of NCBI NO: 21617909 NR Description: plastid protein [Arabidopsis thaliana]
  misc_feature (16)..(234): Homolog of NCBI NO: 15226108 NR Description: plastid protein [Arabidopsis thaliana]

SEQ ID NO: 31721 - protein, 219 aa, Arabidopsis thaliana; identical to SEQ ID NO: 28131
  peptide (1)..(219): Ceres Seq. ID no. 13495972
  misc_feature (1)..(219): Homolog of NCBI NO: 15230785 NR Description: DAG protein -related [Arabidopsis thaliana]
  misc_feature (1)..(219): Homolog of NCBI NO: 27754695 NR Description: putative DAG protein [Arabidopsis thaliana]
  misc_feature (28)..(219): Homolog of NCBI NO: 15226934 NR Description: expressed protein [Arabidopsis thaliana]
  misc_feature (36)..(219): Homolog of NCBI NO: 34897972 NR Description: putative plastid protein [Oryza sativa (japonica
  misc_feature (43)..(219): Homolog of NCBI NO: 15223247 NR Description: plastid protein -related [Arabidopsis thaliana]
  misc_feature (46)..(217): Homolog of NCBI NO: 38344141 NR Description: OSJNBa0041A02.8 [Oryza sativa (japonica
  misc_feature (22)..(219): Homolog of NCBI NO: 25370552 NR Description: DAG protein homolog [imported] - Arabidopsis
  misc_feature (1)..(219): Homolog of NCBI NO: 2440029 NR Description: DAL1 protein [Arabidopsis thaliana]
  misc_feature (1)..(219): Homolog of NCBI NO: 21617909 NR Description: plastid protein [Arabidopsis thaliana]
  misc_feature (1)..(219): Homolog of NCBI NO: 15226108 NR Description: plastid protein [Arabidopsis thaliana]

SEQ ID NO: 31722 - protein, 198 aa, Arabidopsis thaliana; identical to SEQ ID NO: 28132
  peptide (1)..(198): Ceres Seq. ID no. 13495973
  misc_feature (1)..(198): Homolog of NCBI NO: 15230785 NR Description: DAG protein -related [Arabidopsis thaliana]
  misc_feature (1)..(198): Homolog of NCBI NO: 27754695 NR Description: putative DAG protein [Arabidopsis thaliana]
  misc_feature (7)..(198): Homolog of NCBI NO: 15226934 NR Description: expressed protein [Arabidopsis thaliana]
  misc_feature (15)..(198): Homolog of NCBI NO: 34897972 NR Description: putative plastid protein [Oryza sativa (japonica
  misc_feature (22)..(198): Homolog of NCBI NO: 15223247 NR Description: plastid protein -related [Arabidopsis thaliana]
  misc_feature (25)..(196): Homolog of NCBI NO: 38344141 NR Description: OSJNBa0041A02.8 [Oryza sativa (japonica
  misc_feature (1)..(198): Homolog of NCBI NO: 25370552 NR Description: DAG protein homolog [imported] - Arabidopsis
  misc_feature (1)..(198): Homolog of NCBI NO: 2440029 NR Description: DAL1 protein [Arabidopsis thaliana]
  misc_feature (1)..(198): Homolog of NCBI NO: 21617909 NR Description: plastid protein [Arabidopsis thaliana]
  misc_feature (1)..(198): Homolog of NCBI NO: 15226108 NR Description: plastid protein [Arabidopsis thaliana]

SEQ ID NO: 31723 - DNA, 656 bp, Arabidopsis thaliana; identical to SEQ ID NO: 28133
  misc_feature (1)..(656): Ceres Seq. ID no. 13486772
  misc_feature: MA Experiment ID: 108434 Result: Up-regulated in Transcription
  misc_feature: MA Experiment 108434 PARAMETER Experiment Name: At_Root_Tips_cDNA_P Parameter: Tissue Value: Root Tips
  misc_feature: MA Experiment ID: 20000179 Result: Down-regulated in Transcription
  misc_feature: MA Experiment 20000179 PARAMETER Experiment Name: At_Germinating_Seeds_P Parameter: Age (hr) Value: 6 vs. 0
  misc_feature: MA Experiment 20000179 PARAMETER Experiment Name: At_Germinating_Seeds_P Parameter: Tissue Value: Germinating Seeds
  misc_feature: MA Experiment ID: 20001451 Result: Up-regulated in Transcription
  misc_feature: MA Experiment 20001451 PARAMETER Experiment Name: At_Far-red-induction_P Parameter: Age (day) Value: 7
  misc_feature: MA Experiment 20001451 PARAMETER Experiment Name: At_Far-red-induction_P Parameter: Light Value: Far-red vs. White
  misc_feature: MA Experiment 20001451 PARAMETER Experiment Name: At_Far-red-induction_P Parameter: Organism Value: A. thaliana
  misc_feature: MA Experiment 20001451 PARAMETER Experiment Name: At_Far-red-induction_P Parameter: Plant Line Value: Columbia
  misc_feature: MA Experiment 20001451 PARAMETER Experiment Name: At_Far-red-induction_P Parameter: Timepoint (hr) Value: 24
  misc_feature: MA Experiment 20001451 PARAMETER Experiment Name: At_Far-red-induction_P Parameter: Tissue Value: Whole Plant

SEQ ID NO: 31724 - protein, 184 aa, Arabidopsis thaliana; identical to SEQ ID NO: 28134
  peptide (1)..(184): Ceres Seq. ID no. 13486773
  misc_feature (18)..(184): Pfam Name: Eukaryotic protein of unknown function (DUF866) Pfam Description: Eukaryotic protein of unknown function (DUF866)
  misc_feature (21)..(177): Homolog of NCBI NO: 32418144 NR Description: hypothetical protein [Neurospora crassa]
  misc_feature (18)..(168): Homolog of NCBI NO: 26341300 NR Description: unnamed protein product [Mus musculus]
  misc_feature (23)..(168): Homolog of NCBI NO: 21539639 NR Description: RIKEN cDNA 0610037L13 [Mus musculus]
  misc_feature (18)..(166): Homolog of NCBI NO: 27715611 NR Description: similar to hypothetical protein FLJ20580
  misc_feature (18)..(168): Homolog of NCBI NO: 26328397 NR Description: unnamed protein product [Mus musculus]
  misc_feature (23)..(184): Homolog of NCBI NO: 7503539 NR Description: hypothetical protein F46B6.3 - Caenorhabditis
  misc_feature (18)..(168): Homolog of NCBI NO: 8923541 NR Description: hypothetical protein FLJ20580 [Homo sapiens]
  misc_feature (14)..(182): Homolog of NCBI NO: 34914208 NR Description: OSJNBb0049O23.17 [Oryza sativa (japonica
  misc_feature (18)..(184): Homolog of NCBI NO: 7486215 NR Description: hypothetical protein F26P21.50 - Arabidopsis
  misc_feature (18)..(184): Homolog of NCBI NO: 18418118 NR Description: expressed protein [Arabidopsis thaliana]

SEQ ID NO: 31725 - protein, 167 aa, Arabidopsis thaliana; identical to SEQ ID NO: 28135
  peptide (1)..(167): Ceres Seq. ID no. 13486774
  misc_feature (1)..(167): Pfam Name: Eukaryotic protein of unknown function (DUF866) Pfam Description: Eukaryotic protein of unknown function (DUF866)
  misc_feature (4)..(160): Homolog of NCBI NO: 32418144 NR Description: hypothetical protein [Neurospora crassa]
  misc_feature (1)..(151): Homolog of NCBI NO: 26341300 NR Description: unnamed protein product [Mus musculus]
  misc_feature (6)..(151): Homolog of NCBI NO: 21539639 NR Description: RIKEN cDNA 0610037L13 [Mus musculus]
  misc_feature (1)..(149): Homolog of NCBI NO: 27715611 NR Description: similar to hypothetical protein FLJ20580
  misc_feature (1)..(151): Homolog of NCBI NO: 26328397 NR Description: unnamed protein product [Mus musculus]
  misc_feature (6)..(167): Homolog of NCBI NO: 7503539 NR Description: hypothetical protein F46B6.3 - Caenorhabditis
  misc_feature (1)..(151): Homolog of NCBI NO: 8923541 NR Description: hypothetical protein FLJ20580 [Homo sapiens]
  misc_feature (1)..(165): Homolog of NCBI NO: 34914208 NR Description: OSJNBb0049O23.17 [Oryza sativa (japonica
  misc_feature (1)..(167): Homolog of NCBI NO: 7486215 NR Description: hypothetical protein F26P21.50 - Arabidopsis
  misc_feature (1)..(167): Homolog of NCBI NO: 18418118 NR Description: expressed protein [Arabidopsis thaliana]

SEQ ID NO: 31726 - DNA, 795 bp, Arabidopsis thaliana; identical to SEQ ID NO: 28136
  misc_feature (1)..(795): Ceres Seq. ID no. 13486637
  misc_feature: MA Experiment ID: 108434 Result: Up-regulated in Transcription
  misc_feature: MA Experiment 108434 PARAMETER Experiment Name: At_Root_Tips_cDNA_P Parameter: Tissue Value: Root Tips
  misc_feature: MA Experiment ID: 108573 Result: Down-regulated in Transcription
  misc_feature: MA Experiment 108573 PARAMETER Experiment Name: At_Drought_cDNA_P Parameter: Timepoint (hr) Value: 6
  misc_feature: MA Experiment 108573 PARAMETER Experiment Name: At_Drought_cDNA_P Parameter: Tissue Value: Aerial
  misc_feature: MA Experiment 108573 PARAMETER Experiment Name: At_Drought_cDNA_P Parameter: Treatment Value: Drought vs. No Drought
  misc_feature: MA Experiment ID: 20000227 Result: Down-regulated in Transcription
  misc_feature: MA Experiment 20000227 PARAMETER Experiment Name: At_Root-Tips-vs-Tops_P Parameter: Tissue Value: Root Tips vs. Root Tops
  misc_feature: MA Experiment ID: 20000437 Result: Down-regulated in Transcription
  misc_feature: MA Experiment 20000437 PARAMETER Experiment Name: At_Drought_P Parameter: Age (day) Value: 8
  misc_feature: MA Experiment 20000437 PARAMETER Experiment Name: At_Drought_P Parameter: Organism Value: A. thaliana
  misc_feature: MA Experiment 20000437 PARAMETER Experiment Name: At_Drought_P Parameter: Plant Line Value: WS
  misc_feature: MA Experiment 20000437 PARAMETER Experiment Name: At_Drought_P Parameter: Timepoint (hr) Value: 24
  misc_feature: MA Experiment 20000437 PARAMETER Experiment Name: At_Drought_P Parameter: Tissue Value: Whole Plant
  misc_feature: MA Experiment 20000437 PARAMETER Experiment Name: At_Drought_P Parameter: Treatment Value: Drought vs. No Drought
  misc_feature: MA Experiment ID: 20000496 Result: Up-regulated in Transcription
  misc_feature: MA Experiment 20000496 PARAMETER Experiment Name: At_Guard_Cells_P Parameter: Harvest Date Value: 7/19/2002
  misc_feature: MA Experiment 20000496 PARAMETER Experiment Name: At_Guard_Cells_P Parameter: Organism Value: Canola
  misc_feature: MA Experiment 20000496 PARAMETER Experiment Name: At_Guard_Cells_P Parameter: Tissue Value: Guard Cells vs. Leaves
  misc_feature: MA Experiment ID: 20001905 Result: Down-regulated in Transcription
  misc_feature: MA Experiment 20001905 PARAMETER Experiment Name: At_Drought_Reproduction_P Parameter: Age (day) Value: 40
  misc_feature: MA Experiment 20001905 PARAMETER Experiment Name: At_Drought_Reproduction_P Parameter: Organism Value: A. thaliana
  misc_feature: MA Experiment 20001905 PARAMETER Experiment Name: At_Drought_Reproduction_P Parameter: Plant Line Value: WS
  misc_feature: MA Experiment 20001905 PARAMETER Experiment Name: At_Drought_Reproduction_P Parameter: Timepoint (day) Value: 10
  misc_feature: MA Experiment 20001905 PARAMETER Experiment Name: At_Drought_Reproduction_P Parameter: Tissue Value: Rosettes
  misc_feature: MA Experiment 20001905 PARAMETER Experiment Name: At_Drought_Reproduction_P Parameter: Treatment Value: Drought vs. No Drought

SEQ ID NO: 31727 - protein, 229 aa, Arabidopsis thaliana; identical to SEQ ID NO: 28137
  peptide (1)..(229): Ceres Seq. ID no. 13486638
  misc_feature (25)..(115): Pfam Name: RNA polymerase Rpb5, N-terminal domain Pfam Description: RNA polymerase Rpb5, N-terminal domain
  misc_feature (30)..(228): Homolog of NCBI NO: 14589951 NR Description: DNA directed RNA polymerase II polypeptide E
  misc_feature (30)..(228): Homolog of NCBI NO: 1173134 NR Description: DNA-directed RNA polymerase II 23 kDa polypeptide
  misc_feature (30)..(228): Homolog of NCBI NO: 28497750 NR Description: polymerase (RNA) II (DNA directed) polypeptide E
  misc_feature (27)..(228): Homolog of NCBI NO: 15228724 NR Description: DNA-directed RNA polymerase (RNA polymerase),
  misc_feature (28)..(228): Homolog of NCBI NO: 38344231 NR Description: OJ991113_30.8 [Oryza sativa (japonica
  misc_feature (20)..(228): Homolog of NCBI NO: 15232524 NR Description: eukaryotic rpb5 RNA polymerase subunit family
  misc_feature (8)..(229): Homolog of NCBI NO: 8896071 NR Description: RPB5d [Brassica napus]
  misc_feature (8)..(228): Homolog of NCBI NO: 15227327 NR Description: eukaryotic rpb5 RNA polymerase subunit family
  misc_feature (8)..(229): Homolog of NCBI NO: 21617912 NR Description: putative DNA-directed RNA polymerase 23kD subunit
  misc_feature (8)..(229): Homolog of NCBI NO: 15230206 NR Description: eukaryotic rpb5 RNA polymerase subunit family

SEQ ID NO: 31728 - protein, 222 aa, Arabidopsis thaliana; identical to SEQ ID NO: 28138
  peptide (1)..(222): Ceres Seq. ID no. 13486639
  misc_feature (18)..(108): Pfam Name: RNA polymerase Rpb5, N-terminal domain Pfam Description: RNA polymerase Rpb5, N-terminal domain
  misc_feature (23)..(221): Homolog of NCBI NO: 14589951 NR Description: DNA directed RNA polymerase II polypeptide E
  misc_feature (23)..(221): Homolog of NCBI NO: 1173134 NR Description: DNA-directed RNA polymerase II 23 kDa polypeptide
  misc_feature (23)..(221): Homolog of NCBI NO: 28497750 NR Description: polymerase (RNA) II (DNA directed) polypeptide E
  misc_feature (20)..(221): Homolog of NCBI NO: 15228724 NR Description: DNA-directed RNA polymerase (RNA polymerase),
  misc_feature (21)..(221): Homolog of NCBI NO: 38344231 NR Description: OJ991113_30.8 [Oryza sativa (japonica
  misc_feature (13)..(221): Homolog of NCBI NO: 15232524 NR Description: eukaryotic rpb5 RNA polymerase subunit family
  misc_feature (1)..(222): Homolog of NCBI NO: 8896071 NR Description: RPB5d [Brassica napus]
  misc_feature (1)..(221): Homolog of NCBI NO: 15227327 NR Description: eukaryotic rpb5 RNA polymerase subunit family
  misc_feature (1)..(222): Homolog of NCBI NO: 21617912 NR Description: putative DNA-directed RNA polymerase 23kD subunit
  misc_feature (1)..(222): Homolog of NCBI NO: 15230206 NR Description: eukaryotic rpb5 RNA polymerase subunit family

SEQ ID NO: 31729 - protein, 185 aa, Arabidopsis thaliana; identical to SEQ ID NO: 28139
  peptide (1)..(185): Ceres Seq. ID no. 13486640
  misc_feature (1)..(71): Pfam Name: RNA polymerase Rpb5, N-terminal domain Pfam Description: RNA polymerase Rpb5, N-terminal domain
  misc_feature (1)..(184): Homolog of NCBI NO: 14589951 NR Description: DNA directed RNA polymerase II polypeptide E
  misc_feature (1)..(184): Homolog of NCBI NO: 1173134 NR Description: DNA-directed RNA polymerase II 23 kDa polypeptide
  misc_feature (1)..(184): Homolog of NCBI NO: 28497750 NR Description: polymerase (RNA) II (DNA directed) polypeptide E
  misc_feature (1)..(184): Homolog of NCBI NO: 15228724 NR Description: DNA-directed RNA polymerase (RNA polymerase),
  misc_feature (1)..(184): Homolog of NCBI NO: 38344231 NR Description: OJ991113_30.8 [Oryza sativa (japonica
  misc_feature (1)..(184): Homolog of NCBI NO: 15232524 NR Description: eukaryotic rpb5 RNA polymerase subunit family
  misc_feature (1)..(185): Homolog of NCBI NO: 8896071 NR Description: RPB5d [Brassica napus]
  misc_feature (1)..(184): Homolog of NCBI NO: 15227327 NR Description: eukaryotic rpb5 RNA polymerase subunit family
  misc_feature (1)..(185): Homolog of NCBI NO: 21617912 NR Description: putative DNA-directed RNA polymerase 23kD subunit
  misc_feature (1)..(185): Homolog of NCBI NO: 15230206 NR Description: eukaryotic rpb5 RNA polymerase subunit family

SEQ ID NO: 31730 - DNA, 900 bp, Arabidopsis thaliana; identical to SEQ ID NO: 28140
  misc_feature (1)..(900): Ceres Seq. ID no. 12325562
  misc_feature: MA Experiment ID: 20000072 Result: Up-regulated in Transcription
  misc_feature: MA Experiment 20000072 PARAMETER Experiment Name: At_100uM_ABA_Mutants_cDNA_P Parameter: Plant Line Value: CS8105
  misc_feature: MA Experiment 20000072 PARAMETER Experiment Name: At_100uM_ABA_Mutants_cDNA_P Parameter: Timepoint (hr) Value: 6
  misc_feature: MA Experiment 20000072 PARAMETER Experiment Name: At_100uM_ABA_Mutants_cDNA_P Parameter: Tissue Value: Aerial
  misc_feature: MA Experiment 20000072 PARAMETER Experiment Name: At_100uM_ABA_Mutants_cDNA_P Parameter: Treatment Value: 100uM ABA vs. No Treatment
  misc_feature: MA Experiment ID: 20000180 Result: Down-regulated in Transcription
  misc_feature: MA Experiment 20000180 PARAMETER Experiment Name: At_Germinating_Seeds_P Parameter: Age (hr) Value: 24 vs. 0
  misc_feature: MA Experiment 20000180 PARAMETER Experiment Name: At_Germinating_Seeds_P Parameter: Tissue Value: Germinating Seeds

SEQ ID NO: 31731 - protein, 257 aa, Arabidopsis thaliana; identical to SEQ ID NO: 28141
  peptide (1)..(257): Ceres Seq. ID no. 12325563
  misc_feature (20)..(251): Homolog of NCBI NO: 30685146 NR Description: expressed protein [Arabidopsis thaliana]
  misc_feature (24)..(257): Homolog of NCBI NO: 15220526 NR Description: hypothetical protein
  misc_feature (11)..(257): Homolog of NCBI NO: 34910820 NR Description: P0456A01.15 [Oryza sativa (japonica
  misc_feature (24)..(257): Homolog of NCBI NO: 15220516 NR Description: unknown protein; protein id: At1g29680.1
  misc_feature (11)..(257): Homolog of NCBI NO: 34909516 NR Description: P0481E12.28 [Oryza sativa (japonica
  misc_feature (11)..(257): Homolog of NCBI NO: 9758672 NR Description: gene_id:MRA19.8~pir||T05029~strong similarity to
  misc_feature (11)..(257): Homolog of NCBI NO: 15242474 NR Description: putative protein
  misc_feature (11)..(257): Homolog of NCBI NO: 7452426 NR Description: hypothetical protein F13C5.90 - Arabidopsis
  misc_feature (11)..(257): Homolog of NCBI NO: 18415199 NR Description: expressed protein
  misc_feature (11)..(257): Homolog of NCBI NO: 21617913 NR Description: unknown [Arabidopsis thaliana]

SEQ ID NO: 31732 - protein, 247 aa, Arabidopsis thaliana; identical to SEQ ID NO: 28142
  peptide (1)..(247): Ceres Seq. ID no. 12325564
  misc_feature (10)..(241): Homolog of NCBI NO: 30685146 NR Description: expressed protein [Arabidopsis thaliana]
  misc_feature (14)..(247): Homolog of NCBI NO: 15220526 NR Description: hypothetical protein
  misc_feature (1)..(247): Homolog of NCBI NO: 34910820 NR Description: P0456A01.15 [Oryza sativa (japonica
  misc_feature (14)..(247): Homolog of NCBI NO: 15220516 NR Description: unknown protein; protein id: At1g29680.1
  misc_feature (1)..(247): Homolog of NCBI NO: 34909516 NR Description: P0481E12.28 [Oryza sativa (japonica
  misc_feature (1)..(247): Homolog of NCBI NO: 9758672 NR Description: gene_id:MRA19.8~pir||T05029~strong similarity to
  misc_feature (1)..(247): Homolog of NCBI NO: 15242474 NR Description: putative protein
  misc_feature (1)..(247): Homolog of NCBI NO: 7452426 NR Description: hypothetical protein F13C5.90 - Arabidopsis
  misc_feature (1)..(247): Homolog of NCBI NO: 18415199 NR Description: expressed protein
  misc_feature (1)..(247): Homolog of NCBI NO: 21617913 NR Description: unknown [Arabidopsis thaliana]

SEQ ID NO: 31733 - protein, 226 aa, Arabidopsis thaliana; identical to SEQ ID NO: 28143
  peptide (1)..(226): Ceres Seq. ID no. 12325565
  misc_feature (1)..(220): Homolog of NCBI NO: 30685146 NR Description: expressed protein [Arabidopsis thaliana]
  misc_feature (1)..(226): Homolog of NCBI NO: 15220526 NR Description: hypothetical protein
  misc_feature (1)..(226): Homolog of NCBI NO: 34910820 NR Description: P0456A01.15 [Oryza sativa (japonica
  misc_feature (1)..(226): Homolog of NCBI NO: 15220516 NR Description: unknown protein; protein id: At1g29680.1
  misc_feature (1)..(226): Homolog of NCBI NO: 34909516 NR Description: P0481E12.28 [Oryza sativa (japonica
  misc_feature (1)..(226): Homolog of NCBI NO: 9758672 NR Description: gene_id:MRA19.8~pir||T05029~strong similarity to
  misc_feature (1)..(226): Homolog of NCBI NO: 15242474 NR Description: putative protein
  misc_feature (1)..(226): Homolog of NCBI NO: 7452426 NR Description: hypothetical protein F13C5.90 - Arabidopsis
  misc_feature (1)..(226): Homolog of NCBI NO: 18415199 NR Description: expressed protein
  misc_feature (1)..(226): Homolog of NCBI NO: 21617913 NR Description: unknown [Arabidopsis thaliana]

SEQ ID NO: 31734 - DNA, 1145 bp, Arabidopsis thaliana; identical to SEQ ID NO: 28144
  misc_feature (1)..(1145): Ceres Seq. ID no. 12340183
  misc_feature: MA Experiment ID: 108561 Result: Down-regulated in Transcription
  misc_feature: MA Experiment 108561 PARAMETER Experiment Name: At_100uM_ABA_cDNA_P Parameter: Timepoint (hr) Value: 6
  misc_feature: MA Experiment 108561 PARAMETER Experiment Name: At_100uM_ABA_cDNA_P Parameter: Tissue Value: Aerial
  misc_feature: MA Experiment 108561 PARAMETER Experiment Name: At_100uM_ABA_cDNA_P Parameter: Treatment Value: 100uM ABA vs. No Treatment
  misc_feature: MA Experiment ID: 108569 Result: Up-regulated in Transcription
  misc_feature: MA Experiment 108569 PARAMETER Experiment Name: At_0.001%_MeJA__cDNA_P Parameter: Timepoint (hr) Value: 6
  misc_feature: MA Experiment 108569 PARAMETER Experiment Name: At_0.001%_MeJA__cDNA_P Parameter: Tissue Value: Aerial
  misc_feature: MA Experiment 108569 PARAMETER Experiment Name: At_0.001%_MeJA__cDNA_P Parameter: Treatment Value: 0.001% MeJA vs. No Treatment
  misc_feature: MA Experiment ID: 108573 Result: Down-regulated in Transcription
  misc_feature: MA Experiment 108573 PARAMETER Experiment Name: At_Drought_cDNA_P Parameter: Timepoint (hr) Value: 6
  misc_feature: MA Experiment 108573 PARAMETER Experiment Name: At_Drought_cDNA_P Parameter: Tissue Value: Aerial
  misc_feature: MA Experiment 108573 PARAMETER Experiment Name: At_Drought_cDNA_P Parameter: Treatment Value: Drought vs. No Drought
  misc_feature: MA Experiment ID: 108574 Result: Up-regulated in Transcription
  misc_feature: MA Experiment 108574 PARAMETER Experiment Name: At_Wounding__cDNA_P Parameter: Timepoint (hr) Value: 1
  misc_feature: MA Experiment 108574 PARAMETER Experiment Name: At_Wounding__cDNA_P Parameter: Tissue Value: Aerial
  misc_feature: MA Experiment 108574 PARAMETER Experiment Name: At_Wounding__cDNA_P Parameter: Treatment Value: Wounding vs. No Wounding
  misc_feature: MA Experiment ID: 108595 Result: Down-regulated in Transcription
  misc_feature: MA Experiment 108595 PARAMETER Experiment Name: At_Ler-pi_Ovule_cDNA_P Parameter: Plant Line Value: null
  misc_feature: MA Experiment ID: 108668 Result: Down-regulated in Transcription
  misc_feature: MA Experiment 108668 PARAMETER Experiment Name: At_2mM_SA_cDNA_P Parameter: Plant Line Value: WS
  misc_feature: MA Experiment 108668 PARAMETER Experiment Name: At_2mM_SA_cDNA_P Parameter: Timepoint (hr) Value: 6
  misc_feature: MA Experiment 108668 PARAMETER Experiment Name: At_2mM_SA_cDNA_P Parameter: Treatment Value: 2mM SA vs. No Treatment
  misc_feature: MA Experiment ID: 20000166 Result: Down-regulated in Transcription
  misc_feature: MA Experiment 20000166 PARAMETER Experiment Name: At_100uM_ABA_P Parameter: Age (day) Value: 14
  misc_feature: MA Experiment 20000166 PARAMETER Experiment Name: At_100uM_ABA_P Parameter: Organism Value: A. thaliana
  misc_feature: MA Experiment 20000166 PARAMETER Experiment Name: At_100uM_ABA_P Parameter: Plant Line Value: WS
  misc_feature: MA Experiment 20000166 PARAMETER Experiment Name: At_100uM_ABA_P Parameter: Timepoint (hr) Value: 1
  misc_feature: MA Experiment 20000166 PARAMETER Experiment Name: At_100uM_ABA_P Parameter: Tissue Value: Aerial
  misc_feature: MA Experiment 20000166 PARAMETER Experiment Name: At_100uM_ABA_P Parameter: Treatment Value: 100uM ABA vs. No Treatment
  misc_feature: MA Experiment ID: 20000169 Result: Down-regulated in Transcription
  misc_feature: MA Experiment 20000169 PARAMETER Experiment Name: At_100uM_ABA_P Parameter: Age (day) Value: 14
  misc_feature: MA Experiment 20000169 PARAMETER Experiment Name: At_100uM_ABA_P Parameter: Organism Value: A. thaliana
  misc_feature: MA Experiment 20000169 PARAMETER Experiment Name: At_100uM_ABA_P Parameter: Plant Line Value: WS
  misc_feature: MA Experiment 20000169 PARAMETER Experiment Name: At_100uM_ABA_P Parameter: Timepoint (hr) Value: 6
  misc_feature: MA Experiment 20000169 PARAMETER Experiment Name: At_100uM_ABA_P Parameter: Tissue Value: Aerial
  misc_feature: MA Experiment 20000169 PARAMETER Experiment Name: At_100uM_ABA_P Parameter: Treatment Value: 100uM ABA vs. No Treatment
  misc_feature: MA Experiment ID: 20000171 Result: Down-regulated in Transcription
  misc_feature: MA Experiment 20000171 PARAMETER Experiment Name: At_42deg_Heat_P Parameter: Age (day) Value: 14
  misc_feature: MA Experiment 20000171 PARAMETER Experiment Name: At_42deg_Heat_P Parameter: Organism Value: A. thaliana
  misc_feature: MA Experiment 20000171 PARAMETER Experiment Name: At_42deg_Heat_P Parameter: Plant Line Value: WS
  misc_feature: MA Experiment 20000171 PARAMETER Experiment Name: At_42deg_Heat_P Parameter: Temperature (deg C) Value: 42 vs. 22
  misc_feature: MA Experiment 20000171 PARAMETER Experiment Name: At_42deg_Heat_P Parameter: Timepoint (hr) Value: 1
  misc_feature: MA Experiment 20000171 PARAMETER Experiment Name: At_42deg_Heat_P Parameter: Tissue Value: Aerial
  misc_feature: MA Experiment ID: 20000173 Result: Down-regulated in Transcription
  misc_feature: MA Experiment 20000173 PARAMETER Experiment Name: At_42deg_Heat_P Parameter: Age (day) Value: 14
  misc_feature: MA Experiment 20000173 PARAMETER Experiment Name: At_42deg_Heat_P Parameter: Organism Value: A. thaliana
  misc_feature: MA Experiment 20000173 PARAMETER Experiment Name: At_42deg_Heat_P Parameter: Plant Line Value: WS
  misc_feature: MA Experiment 20000173 PARAMETER Experiment Name: At_42deg_Heat_P Parameter: Temperature (deg C) Value: 42 vs. 22
  misc_feature: MA Experiment 20000173 PARAMETER Experiment Name: At_42deg_Heat_P Parameter: Timepoint (hr) Value: 6
  misc_feature: MA Experiment 20000173 PARAMETER Experiment Name: At_42deg_Heat_P Parameter: Tissue Value: Aerial
  misc_feature: MA Experiment ID: 20000180 Result: Up-regulated in Transcription
  misc_feature: MA Experiment 20000180 PARAMETER Experiment Name: At_Germinating_Seeds_P Parameter: Age (hr) Value: 24 vs. 0
  misc_feature: MA Experiment 20000180 PARAMETER Experiment Name: At_Germinating_Seeds_P Parameter: Tissue Value: Germinating Seeds
  misc_feature: MA Experiment ID: 20000211 Result: Up-regulated in Transcription
  misc_feature: MA Experiment 20000211 PARAMETER Experiment Name: At_0.001percent_MeJA__P Parameter: Age (day) Value: 14
  misc_feature: MA Experiment 20000211 PARAMETER Experiment Name: At_0.001percent_MeJA__P Parameter: Organism Value: A. thaliana
  misc_feature: MA Experiment 20000211 PARAMETER Experiment Name: At_0.001percent_MeJA__P Parameter: Plant Line Value: WS
  misc_feature: MA Experiment 20000211 PARAMETER Experiment Name: At_0.001percent_MeJA__P Parameter: Timepoint (hr) Value: 1
  misc_feature: MA Experiment 20000211 PARAMETER Experiment Name: At_0.001percent_MeJA__P Parameter: Tissue Value: Aerial
  misc_feature: MA Experiment 20000211 PARAMETER Experiment Name: At_0.001percent_MeJA__P Parameter: Treatment Value: 0.001percent MeJA vs. No Treatment
  misc_feature: MA Experiment ID: 20000227 Result: Down-regulated in Transcription
  misc_feature: MA Experiment 20000227 PARAMETER Experiment Name: At_Root-Tips-vs-Tops_P Parameter: Tissue Value: Root Tips vs. Root Tops
  misc_feature: MA Experiment ID: 20000436 Result: Down-regulated in Transcription
  misc_feature: MA Experiment 20000436 PARAMETER Experiment Name: At_Drought_P Parameter: Age (day) Value: 7
  misc_feature: MA Experiment 20000436 PARAMETER Experiment Name: At_Drought_P Parameter: Organism Value: A. thaliana
  misc_feature: MA Experiment 20000436 PARAMETER Experiment Name: At_Drought_P Parameter: Plant Line Value: WS
  misc_feature: MA Experiment 20000436 PARAMETER Experiment Name: At_Drought_P Parameter: Timepoint (hr) Value: 12
  misc_feature: MA Experiment 20000436 PARAMETER Experiment Name: At_Drought_P Parameter: Tissue Value: Whole Plant
  misc_feature: MA Experiment 20000436 PARAMETER Experiment Name: At_Drought_P Parameter: Treatment Value: Drought vs. No Drought
  misc_feature: MA Experiment ID: 20000437 Result: Down-regulated in Transcription
  misc_feature: MA Experiment 20000437 PARAMETER Experiment Name: At_Drought_P Parameter: Age (day) Value: 8
  misc_feature: MA Experiment 20000437 PARAMETER Experiment Name: At_Drought_P Parameter: Organism Value: A. thaliana
  misc_feature: MA Experiment 20000437 PARAMETER Experiment Name: At_Drought_P Parameter: Plant Line Value: WS
  misc_feature: MA Experiment 20000437 PARAMETER Experiment Name: At_Drought_P Parameter: Timepoint (hr) Value: 24
  misc_feature: MA Experiment 20000437 PARAMETER Experiment Name: At_Drought_P Parameter: Tissue Value: Whole Plant
  misc_feature: MA Experiment 20000437 PARAMETER Experiment Name: At_Drought_P Parameter: Treatment Value: Drought vs. No Drought
  misc_feature: MA Experiment ID: 20000438 Result: Up-regulated in Transcription
  misc_feature: MA Experiment 20000438 PARAMETER Experiment Name: At_Shoots__P Parameter: Age (day) Value: 14
  misc_feature: MA Experiment 20000438 PARAMETER Experiment Name: At_Shoots__P Parameter: Tissue Value: Shoots vs. Whole Plant
  misc_feature: MA Experiment ID: 20000439 Result: Up-regulated in Transcription
  misc_feature: MA Experiment 20000439 PARAMETER Experiment Name: At_Roots__P Parameter: Age (day) Value: 14 vs. 21
  misc_feature: MA Experiment 20000439 PARAMETER Experiment Name: At_Roots__P Parameter: Organism Value: A. thaliana
  misc_feature: MA Experiment 20000439 PARAMETER Experiment Name: At_Roots__P Parameter: Tissue Value: Roots vs. Whole Plant
  misc_feature: MA Experiment ID: 20000453 Result: Down-regulated in Transcription
  misc_feature: MA Experiment 20000453 PARAMETER Experiment Name: At_100uM_ABA_P Parameter: Age (day) Value: 15
  misc_feature: MA Experiment 20000453 PARAMETER Experiment Name: At_100uM_ABA_P Parameter: Organism Value: A. thaliana
  misc_feature: MA Experiment 20000453 PARAMETER Experiment Name: At_100uM_ABA_P Parameter: Plant Line Value: WS
  misc_feature: MA Experiment 20000453 PARAMETER Experiment Name: At_100uM_ABA_P Parameter: Timepoint (hr) Value: 24
  misc_feature: MA Experiment 20000453 PARAMETER Experiment Name: At_100uM_ABA_P Parameter: Tissue Value: Aerial
  misc_feature: MA Experiment 20000453 PARAMETER Experiment Name: At_100uM_ABA_P Parameter: Treatment Value: 100uM ABA vs. No Treatment
  misc_feature: MA Experiment ID: 20000574 Result: Down-regulated in Transcription
  misc_feature: MA Experiment 20000574 PARAMETER Experiment Name: At_100uM_ABA_Mutants__P Parameter: Organism Value: A. thaliana
  misc_feature: MA Experiment 20000574 PARAMETER Experiment Name: At_100uM_ABA_Mutants__P Parameter: Plant Line Value: CS23 vs. Ler wt
  misc_feature: MA Experiment 20000574 PARAMETER Experiment Name: At_100uM_ABA_Mutants__P Parameter: Timepoint (hr) Value: N/A
  misc_feature: MA Experiment 20000574 PARAMETER Experiment Name: At_100uM_ABA_Mutants__P Parameter: Tissue Value: Whole Plant
  misc_feature: MA Experiment 20000574 PARAMETER Experiment Name: At_100uM_ABA_Mutants__P Parameter: Treatment Value: None
  misc_feature: MA Experiment ID: 20001450 Result: Down-regulated in Transcription
  misc_feature: MA Experiment 20001450 PARAMETER Experiment Name: At_Far-red-induction_P Parameter: Age (day) Value: 7
  misc_feature: MA Experiment 20001450 PARAMETER Experiment Name: At_Far-red-induction_P Parameter: Light Value: Far-red vs. White
  misc_feature: MA Experiment 20001450 PARAMETER Experiment Name: At_Far-red-induction_P Parameter: Organism Value: A. thaliana
  misc_feature: MA Experiment 20001450 PARAMETER Experiment Name: At_Far-red-induction_P Parameter: Plant Line Value: Columbia
  misc_feature: MA Experiment 20001450 PARAMETER Experiment Name: At_Far-red-induction_P Parameter: Timepoint (hr) Value: 8
  misc_feature: MA Experiment 20001450 PARAMETER Experiment Name: At_Far-red-induction_P Parameter: Tissue Value: Whole Plant
  misc_feature: MA Experiment ID: 20001554 Result: Down-regulated in Transcription
  misc_feature: MA Experiment 20001554 PARAMETER Experiment Name: At_Drought_Soil_Dry_P Parameter: Age (day) Value: 21
  misc_feature: MA Experiment 20001554 PARAMETER Experiment Name: At_Drought_Soil_Dry_P Parameter: Organism Value: A. thaliana
  misc_feature: MA Experiment 20001554 PARAMETER Experiment Name: At_Drought_Soil_Dry_P Parameter: Plant Line Value: WS
  misc_feature: MA Experiment 20001554 PARAMETER Experiment Name: At_Drought_Soil_Dry_P Parameter: Post Timepoint (hr) Value: None
  misc_feature: MA Experiment 20001554 PARAMETER Experiment Name: At_Drought_Soil_Dry_P Parameter: Post-Treatment Value: None
  misc_feature: MA Experiment 20001554 PARAMETER Experiment Name: At_Drought_Soil_Dry_P Parameter: Timepoint (day) Value: 7
  misc_feature: MA Experiment 20001554 PARAMETER Experiment Name: At_Drought_Soil_Dry_P Parameter: Treatment Value: Drought vs. No Drought
  misc_feature: MA Experiment ID: 20001904 Result: Down-regulated in Transcription
  misc_feature: MA Experiment 20001904 PARAMETER Experiment Name: At_Drought_Reproduction_P Parameter: Age (day) Value: 37
  misc_feature: MA Experiment 20001904 PARAMETER Experiment Name: At_Drought_Reproduction_P Parameter: Organism Value: A. thaliana
  misc_feature: MA Experiment 20001904 PARAMETER Experiment Name: At_Drought_Reproduction_P Parameter: Plant Line Value: WS
  misc_feature: MA Experiment 20001904 PARAMETER Experiment Name: At_Drought_Reproduction_P Parameter: Timepoint (day) Value: 7
  misc_feature: MA Experiment 20001904 PARAMETER Experiment Name: At_Drought_Reproduction_P Parameter: Tissue Value: Rosettes
  misc_feature: MA Experiment 20001904 PARAMETER Experiment Name: At_Drought_Reproduction_P Parameter: Treatment Value: Drought vs. No Drought

SEQ ID NO: 31735 - protein, 347 aa, Arabidopsis thaliana; identical to SEQ ID NO: 28145
  peptide (1)..(347): Ceres Seq. ID no. 12340184
  misc_feature (60)..(341): Pfam Name: Phosphorylase family Pfam Description: Phosphorylase family
  misc_feature (61)..(345): Homolog of NCBI NO: 421813 NR Description: storage protein, bark - cottonwood
  misc_feature (116)..(341): Homolog of NCBI NO: 34897886 NR Description: ESTs AU032452(S10068),C23571(S10068) correspond a region of the predicted gene.~Similar to P.trichocarpa x P.
  misc_feature (61)..(345): Homolog of NCBI NO: 481815 NR Description: vegetative storage protein win4.5 - western
  misc_feature (237)..(345): Homolog of NCBI NO: 7487319 NR Description: hypothetical protein T22A6.190 - Arabidopsis
  misc_feature (12)..(235): Homolog of NCBI NO: 7487318 NR Description: hypothetical protein T22A6.180 - Arabidopsis
  misc_feature (12)..(345): Homolog of NCBI NO: 30686500 NR Description: expressed protein [Arabidopsis thaliana]
  misc_feature (12)..(345): Homolog of NCBI NO: 21593613 NR Description: unknown [Arabidopsis thaliana]
  misc_feature (12)..(347): Homolog of NCBI NO: 7487317 NR Description: hypothetical protein T22A6.170 - Arabidopsis
  misc_feature (9)..(347): Homolog of NCBI NO: 18416327 NR Description: putative protein
  misc_feature (9)..(347): Homolog of NCBI NO: 21617914 NR Description: unknown [Arabidopsis thaliana]

SEQ ID NO: 31736 - protein, 339 aa, Arabidopsis thaliana; identical to SEQ ID NO: 28146
  peptide (1)..(339): Ceres Seq. ID no. 12340185
  misc_feature (52)..(333): Pfam Name: Phosphorylase family Pfam Description: Phosphorylase family
  misc_feature (53)..(337): Homolog of NCBI NO: 421813 NR Description: storage protein, bark - cottonwood
  misc_feature (108)..(333): Homolog of NCBI NO: 34897886 NR Description: ESTs AU032452(S10068),C23571(S10068) correspond a region of the predicted gene.~Similar to P.trichocarpa x P.
  misc_feature (53)..(337): Homolog of NCBI NO: 481815 NR Description: vegetative storage protein win4.5 - western
  misc_feature (229)..(337): Homolog of NCBI NO: 7487319 NR Description: hypothetical protein T22A6.190 - Arabidopsis
  misc_feature (4)..(227): Homolog of NCBI NO: 7487318 NR Description: hypothetical protein T22A6.180 - Arabidopsis
  misc_feature (4)..(337): Homolog of NCBI NO: 30686500 NR Description: expressed protein [Arabidopsis thaliana]
  misc_feature (4)..(337): Homolog of NCBI NO: 21593613 NR Description: unknown [Arabidopsis thaliana]
  misc_feature (4)..(339): Homolog of NCBI NO: 7487317 NR Description: hypothetical protein T22A6.170 - Arabidopsis
  misc_feature (1)..(339): Homolog of NCBI NO: 18416327 NR Description: putative protein
  misc_feature (1)..(339): Homolog of NCBI NO: 21617914 NR Description: unknown [Arabidopsis thaliana]

SEQ ID NO: 31737 - protein, 336 aa, Arabidopsis thaliana; identical to SEQ ID NO: 28147
  peptide (1)..(336): Ceres Seq. ID no. 12340186
  misc_feature (49)..(330): Pfam Name: Phosphorylase family Pfam Description: Phosphorylase family
  misc_feature (50)..(334): Homolog of NCBI NO: 421813 NR Description: storage protein, bark - cottonwood
  misc_feature (105)..(330): Homolog of NCBI NO: 34897886 NR Description: ESTs AU032452(S10068),C23571(S10068) correspond a region of the predicted gene.~Similar to P.trichocarpa x P.
  misc_feature (50)..(334): Homolog of NCBI NO: 481815 NR Description: vegetative storage protein win4.5 - western
  misc_feature (226)..(334): Homolog of NCBI NO: 7487319 NR Description: hypothetical protein T22A6.190 - Arabidopsis
  misc_feature (1)..(224): Homolog of NCBI NO: 7487318 NR Description: hypothetical protein T22A6.180 - Arabidopsis
  misc_feature (1)..(334): Homolog of NCBI NO: 30686500 NR Description: expressed protein [Arabidopsis thaliana]
  misc_feature (1)..(334): Homolog of NCBI NO: 21593613 NR Description: unknown [Arabidopsis thaliana]
  misc_feature (1)..(336): Homolog of NCBI NO: 7487317 NR Description: hypothetical protein T22A6.170 - Arabidopsis
  misc_feature (1)..(336): Homolog of NCBI NO: 18416327 NR Description: putative protein
  misc_feature (1)..(336): Homolog of NCBI NO: 21617914 NR Description: unknown [Arabidopsis thaliana]

SEQ ID NO: 31738 - DNA, 837 bp, Arabidopsis thaliana; identical to SEQ ID NO: 28148
  misc_feature (1)..(837): Ceres Seq. ID no. 13490911
  misc_feature: MA Experiment ID: 108435 Result: Down-regulated in Transcription
  misc_feature: MA Experiment 108435 PARAMETER Experiment Name: At_stm_Mutants_cDNA_P Parameter: Plant Line Value: wt Landsburg vs stm
  misc_feature: MA Experiment 108435 PARAMETER Experiment Name: At_stm_Mutants_cDNA_P Parameter: Tissue Value: Shoot Apical Meristem Region
  misc_feature: MA Experiment ID: 108488 Result: Up-regulated in Transcription
  misc_feature: MA Experiment ID: 108561 Result: Down-regulated in Transcription
  misc_feature: MA Experiment 108561 PARAMETER Experiment Name: At_100uM_ABA_cDNA_P Parameter: Timepoint (hr) Value: 6
  misc_feature: MA Experiment 108561 PARAMETER Experiment Name: At_100uM_ABA_cDNA_P Parameter: Tissue Value: Aerial
  misc_feature: MA Experiment 108561 PARAMETER Experiment Name: At_100uM_ABA_cDNA_P Parameter: Treatment Value: 100uM ABA vs. No Treatment
  misc_feature: MA Experiment ID: 108595 Result: Down-regulated in Transcription
  misc_feature: MA Experiment 108595 PARAMETER Experiment Name: At_Ler-pi_Ovule_cDNA_P Parameter: Plant Line Value: null
  misc_feature: MA Experiment ID: 20000069 Result: Down-regulated in Transcription
  misc_feature: MA Experiment 20000069 PARAMETER Experiment Name: At_100uM_ABA_Mutants_cDNA_P Parameter: Plant Line Value: CS23
  misc_feature: MA Experiment 20000069 PARAMETER Experiment Name: At_100uM_ABA_Mutants_cDNA_P Parameter: Timepoint (hr) Value: 6
  misc_feature: MA Experiment 20000069 PARAMETER Experiment Name: At_100uM_ABA_Mutants_cDNA_P Parameter: Tissue Value: Aerial
  misc_feature: MA Experiment 20000069 PARAMETER Experiment Name: At_100uM_ABA_Mutants_cDNA_P Parameter: Treatment Value: 100uM ABA vs. No Treatment
  misc_feature: MA Experiment ID: 20000070 Result: Down-regulated in Transcription
  misc_feature: MA Experiment 20000070 PARAMETER Experiment Name: At_100uM_ABA_Mutants_cDNA_P Parameter: Plant Line Value: CS24
  misc_feature: MA Experiment 20000070 PARAMETER Experiment Name: At_100uM_ABA_Mutants_cDNA_P Parameter: Timepoint (hr) Value: 6
  misc_feature: MA Experiment 20000070 PARAMETER Experiment Name: At_100uM_ABA_Mutants_cDNA_P Parameter: Tissue Value: Aerial
  misc_feature: MA Experiment 20000070 PARAMETER Experiment Name: At_100uM_ABA_Mutants_cDNA_P Parameter: Treatment Value: 100uM ABA vs. No Treatment
  misc_feature: MA Experiment ID: 20000071 Result: Down-regulated in Transcription
  misc_feature: MA Experiment 20000071 PARAMETER Experiment Name: At_100uM_ABA_Mutants_cDNA_P Parameter: Plant Line Value: CS8104
  misc_feature: MA Experiment 20000071 PARAMETER Experiment Name: At_100uM_ABA_Mutants_cDNA_P Parameter: Timepoint (hr) Value: 6
  misc_feature: MA Experiment 20000071 PARAMETER Experiment Name: At_100uM_ABA_Mutants_cDNA_P Parameter: Tissue Value: Aerial
  misc_feature: MA Experiment 20000071 PARAMETER Experiment Name: At_100uM_ABA_Mutants_cDNA_P Parameter: Treatment Value: 100uM ABA vs. No Treatment
  misc_feature: MA Experiment ID: 20000072 Result: Down-regulated in Transcription
  misc_feature: MA Experiment 20000072 PARAMETER Experiment Name: At_100uM_ABA_Mutants_cDNA_P Parameter: Plant Line Value: CS8105
  misc_feature: MA Experiment 20000072 PARAMETER Experiment Name: At_100uM_ABA_Mutants_cDNA_P Parameter: Timepoint (hr) Value: 6
  misc_feature: MA Experiment 20000072 PARAMETER Experiment Name: At_100uM_ABA_Mutants_cDNA_P Parameter: Tissue Value: Aerial
  misc_feature: MA Experiment 20000072 PARAMETER Experiment Name: At_100uM_ABA_Mutants_cDNA_P Parameter: Treatment Value: 100uM ABA vs. No Treatment
  misc_feature: MA Experiment ID: 20000086 Result: Down-regulated in Transcription
  misc_feature: MA Experiment 20000086 PARAMETER Experiment Name: At_100uM_ABA_Mutants_cDNA_P Parameter: Plant Line Value: CS22
  misc_feature: MA Experiment 20000086 PARAMETER Experiment Name: At_100uM_ABA_Mutants_cDNA_P Parameter: Timepoint (hr) Value: 6
  misc_feature: MA Experiment 20000086 PARAMETER Experiment Name: At_100uM_ABA_Mutants_cDNA_P Parameter: Tissue Value: Aerial
  misc_feature: MA Experiment 20000086 PARAMETER Experiment Name: At_100uM_ABA_Mutants_cDNA_P Parameter: Treatment Value: 100uM ABA vs. No Treatment
  misc_feature: MA Experiment ID: 20000087 Result: Down-regulated in Transcription
  misc_feature: MA Experiment 20000087 PARAMETER Experiment Name: At_100uM_ABA_Mutants_cDNA_P Parameter: Plant Line Value: WS
  misc_feature: MA Experiment 20000087 PARAMETER Experiment Name: At_100uM_ABA_Mutants_cDNA_P Parameter: Timepoint (hr) Value: 6
  misc_feature: MA Experiment 20000087 PARAMETER Experiment Name: At_100uM_ABA_Mutants_cDNA_P Parameter: Tissue Value: Aerial
  misc_feature: MA Experiment 20000087 PARAMETER Experiment Name: At_100uM_ABA_Mutants_cDNA_P Parameter: Treatment Value: 100uM ABA vs. No Treatment
  misc_feature: MA Experiment ID: 20000088 Result: Down-regulated in Transcription
  misc_feature: MA Experiment 20000088 PARAMETER Experiment Name: At_100uM_ABA_Mutants_cDNA_P Parameter: Plant Line Value: Landsberg
  misc_feature: MA Experiment 20000088 PARAMETER Experiment Name: At_100uM_ABA_Mutants_cDNA_P Parameter: Timepoint (hr) Value: 6
  misc_feature: MA Experiment 20000088 PARAMETER Experiment Name: At_100uM_ABA_Mutants_cDNA_P Parameter: Tissue Value: Aerial
  misc_feature: MA Experiment 20000088 PARAMETER Experiment Name: At_100uM_ABA_Mutants_cDNA_P Parameter: Treatment Value: 100uM ABA vs. No Treatment
  misc_feature: MA Experiment ID: 20000089 Result: Down-regulated in Transcription
  misc_feature: MA Experiment ID: 20000090 Result: Down-regulated in Transcription
  misc_feature: MA Experiment ID: 20000113 Result: Up-regulated in Transcription
  misc_feature: MA Experiment 20000113 PARAMETER Experiment Name: At_42deg_Heat_cDNA_P Parameter: Temperature (deg C) Value: 42 vs. 22
  misc_feature: MA Experiment 20000113 PARAMETER Experiment Name: At_42deg_Heat_cDNA_P Parameter: Timepoint (hr) Value: 8
  misc_feature: MA Experiment 20000113 PARAMETER Experiment Name: At_42deg_Heat_cDNA_P Parameter: Tissue Value: Aerial
  misc_feature: MA Experiment ID: 20000117 Result: Down-regulated in Transcription
  misc_feature: MA Experiment 20000117 PARAMETER Experiment Name: At_100uM_ABA_Mutants_cDNA_P Parameter: Plant Line Value: Columbia
  misc_feature: MA Experiment 20000117 PARAMETER Experiment Name: At_100uM_ABA_Mutants_cDNA_P Parameter: Timepoint (hr) Value: 6
  misc_feature: MA Experiment 20000117 PARAMETER Experiment Name: At_100uM_ABA_Mutants_cDNA_P Parameter: Tissue Value: Aerial
  misc_feature: MA Experiment 20000117 PARAMETER Experiment Name: At_100uM_ABA_Mutants_cDNA_P Parameter: Treatment Value: 100uM ABA vs. No Treatment
  misc_feature: MA Experiment ID: 20000184 Result: Up-regulated in Transcription
  misc_feature: MA Experiment 20000184 PARAMETER Experiment Name: At_Shoots__P Parameter: Age (day) Value: 7
  misc_feature: MA Experiment 20000184 PARAMETER Experiment Name: At_Shoots__P Parameter: Tissue Value: Shoots vs. Whole Plant
  misc_feature: MA Experiment ID: 20000185 Result: Down-regulated in Transcription
  misc_feature: MA Experiment 20000185 PARAMETER Experiment Name: At_Roots__P Parameter: Age (day) Value: 7 vs. 21
  misc_feature: MA Experiment 20000185 PARAMETER Experiment Name: At_Roots__P Parameter: Organism Value: A. thaliana
  misc_feature: MA Experiment 20000185 PARAMETER Experiment Name: At_Roots__P Parameter: Tissue Value: Roots vs. Whole Plant
  misc_feature: MA Experiment ID: 20000227 Result: Down-regulated in Transcription
  misc_feature: MA Experiment 20000227 PARAMETER Experiment Name: At_Root-Tips-vs-Tops_P Parameter: Tissue Value: Root Tips vs. Root Tops
  misc_feature: MA Experiment ID: 20000439 Result: Down-regulated in Transcription
  misc_feature: MA Experiment 20000439 PARAMETER Experiment Name: At_Roots__P Parameter: Age (day) Value: 14 vs. 21
  misc_feature: MA Experiment 20000439 PARAMETER Experiment Name: At_Roots__P Parameter: Organism Value: A. thaliana
  misc_feature: MA Experiment 20000439 PARAMETER Experiment Name: At_Roots__P Parameter: Tissue Value: Roots vs. Whole Plant
  misc_feature: MA Experiment ID: 20000794 Result: Down-regulated in Transcription
  misc_feature: MA Experiment 20000794 PARAMETER Experiment Name: At_Petals_P Parameter: Age (day) Value: 23-25 days
  misc_feature: MA Experiment 20000794 PARAMETER Experiment Name: At_Petals_P Parameter: Plant Line Value: WS
  misc_feature: MA Experiment 20000794 PARAMETER Experiment Name: At_Petals_P Parameter: Tissue Value: Petals vs. Whole plant

SEQ ID NO: 31739 - protein, 220 aa, Arabidopsis thaliana; identical to SEQ ID NO: 28149
  peptide (1)..(220): Ceres Seq. ID no. 13490912
  misc_feature (108)..(209): Pfam Name: Pterin 4 alpha carbinolamine dehydratase Pfam Description: Pterin 4 alpha carbinolamine dehydratase
  misc_feature (99)..(207): Homolog of NCBI NO: 21673181 NR Description: pterin-4-alpha-carbinolamine dehydratase
  misc_feature (95)..(217): Homolog of NCBI NO: 30690915 NR Description: expressed protein [Arabidopsis thaliana]
  misc_feature (95)..(217): Homolog of NCBI NO: 26449459 NR Description: unknown protein [Arabidopsis thaliana]
  misc_feature (1)..(220): Homolog of NCBI NO: 21617915 NR Description: unknown [Arabidopsis thaliana]
  misc_feature (1)..(220): Homolog of NCBI NO: 15241386 NR Description: expressed protein [Arabidopsis thaliana]

SEQ ID NO: 31740 - DNA, 793 bp, Arabidopsis thaliana; identical to SEQ ID NO: 28150
  misc_feature (1)..(793): Ceres Seq. ID no. 12423232
  misc_feature: MA Experiment ID: 108434 Result: Down-regulated in Transcription
  misc_feature: MA Experiment 108434 PARAMETER Experiment Name: At_Root_Tips_cDNA_P Parameter: Tissue Value: Root Tips
  misc_feature: MA Experiment ID: 108435 Result: Up-regulated in Transcription
  misc_feature: MA Experiment 108435 PARAMETER Experiment Name: At_stm_Mutants_cDNA_P Parameter: Plant Line Value: wt Landsburg vs stm
  misc_feature: MA Experiment 108435 PARAMETER Experiment Name: At_stm_Mutants_cDNA_P Parameter: Tissue Value: Shoot Apical Meristem Region
  misc_feature: MA Experiment ID: 108462 Result: Up-regulated in Transcription
  misc_feature: MA Experiment 108462 PARAMETER Experiment Name: At_Germinating_Seeds_cDNA_P Parameter: Age (day) Value: 2 vs. 0
  misc_feature: MA Experiment 108462 PARAMETER Experiment Name: At_Germinating_Seeds_cDNA_P Parameter: Tissue Value: Germinating Seeds
  misc_feature: MA Experiment ID: 108463 Result: Up-regulated in Transcription
  misc_feature: MA Experiment 108463 PARAMETER Experiment Name: At_Germinating_Seeds_cDNA_P Parameter: Age (day) Value: 3 vs. 0
  misc_feature: MA Experiment 108463 PARAMETER Experiment Name: At_Germinating_Seeds_cDNA_P Parameter: Tissue Value: Germinating Seeds
  misc_feature: MA Experiment ID: 108464 Result: Up-regulated in Transcription
  misc_feature: MA Experiment 108464 PARAMETER Experiment Name: At_Germinating_Seeds_cDNA_P Parameter: Age (day) Value: 4 vs. 0
  misc_feature: MA Experiment 108464 PARAMETER Experiment Name: At_Germinating_Seeds_cDNA_P Parameter: Tissue Value: Germinating Seeds
  misc_feature: MA Experiment ID: 108574 Result: Down-regulated in Transcription
  misc_feature: MA Experiment 108574 PARAMETER Experiment Name: At_Wounding__cDNA_P Parameter: Timepoint (hr) Value: 1
  misc_feature: MA Experiment 108574 PARAMETER Experiment Name: At_Wounding__cDNA_P Parameter: Tissue Value: Aerial
  misc_feature: MA Experiment 108574 PARAMETER Experiment Name: At_Wounding__cDNA_P Parameter: Treatment Value: Wounding vs. No Wounding
  misc_feature: MA Experiment ID: 108577 Result: Down-regulated in Transcription
  misc_feature: MA Experiment 108577 PARAMETER Experiment Name: At_42deg_Heat_cDNA_P Parameter: Temperature (deg C) Value: 42 vs. 22
  misc_feature: MA Experiment 108577 PARAMETER Experiment Name: At_42deg_Heat_cDNA_P Parameter: Timepoint (hr) Value: 6
  misc_feature: MA Experiment 108577 PARAMETER Experiment Name: At_42deg_Heat_cDNA_P Parameter: Tissue Value: Aerial
  misc_feature: MA Experiment ID: 108579 Result: Down-regulated in Transcription
  misc_feature: MA Experiment 108579 PARAMETER Experiment Name: At_4deg_Cold_cDNA_P Parameter: Temperature (deg C) Value: 4 vs. 22
  misc_feature: MA Experiment 108579 PARAMETER Experiment Name: At_4deg_Cold_cDNA_P Parameter: Timepoint (hr) Value: 6
  misc_feature: MA Experiment 108579 PARAMETER Experiment Name: At_4deg_Cold_cDNA_P Parameter: Tissue Value: Aerial
  misc_feature: MA Experiment ID: 108594 Result: Down-regulated in Transcription
  misc_feature: MA Experiment 108594 PARAMETER Experiment Name: At_Ler-rhl_Root_cDNA_P Parameter: Plant Line Value: null
  misc_feature: MA Experiment ID: 108595 Result: Down-regulated in Transcription
  misc_feature: MA Experiment 108595 PARAMETER Experiment Name: At_Ler-pi_Ovule_cDNA_P Parameter: Plant Line Value: null
  misc_feature: MA Experiment ID: 108605 Result: Down-regulated in Transcription
  misc_feature: MA Experiment 108605 PARAMETER Experiment Name: At_100uM_ABA_cDNA_P Parameter: Timepoint (hr) Value: 6
  misc_feature: MA Experiment 108605 PARAMETER Experiment Name: At_100uM_ABA_cDNA_P Parameter: Tissue Value: Aerial
  misc_feature: MA Experiment 108605 PARAMETER Experiment Name: At_100uM_ABA_cDNA_P Parameter: Treatment Value: 100uM ABA vs. No Treatment
  misc_feature: MA Experiment ID: 108607 Result: Down-regulated in Transcription
  misc_feature: MA Experiment 108607 PARAMETER Experiment Name: At_100uM_ABA_cDNA_P Parameter: Timepoint (hr) Value: 4
  misc_feature: MA Experiment 108607 PARAMETER Experiment Name: At_100uM_ABA_cDNA_P Parameter: Tissue Value: Aerial
  misc_feature: MA Experiment 108607 PARAMETER Experiment Name: At_100uM_ABA_cDNA_P Parameter: Treatment Value: 100uM ABA vs. No Treatment
  misc_feature: MA Experiment ID: 20000070 Result: Up-regulated in Transcription
  misc_feature: MA Experiment 20000070 PARAMETER Experiment Name: At_100uM_ABA_Mutants_cDNA_P Parameter: Plant Line Value: CS24
  misc_feature: MA Experiment 20000070 PARAMETER Experiment Name: At_100uM_ABA_Mutants_cDNA_P Parameter: Timepoint (hr) Value: 6
  misc_feature: MA Experiment 20000070 PARAMETER Experiment Name: At_100uM_ABA_Mutants_cDNA_P Parameter: Tissue Value: Aerial
  misc_feature: MA Experiment 20000070 PARAMETER Experiment Name: At_100uM_ABA_Mutants_cDNA_P Parameter: Treatment Value: 100uM ABA vs. No Treatment
  misc_feature: MA Experiment ID: 20000090 Result: Up-regulated in Transcription
  misc_feature: MA Experiment ID: 20000112 Result: Down-regulated in Transcription
  misc_feature: MA Experiment 20000112 PARAMETER Experiment Name: At_42deg_Heat_cDNA_P Parameter: Temperature (deg C) Value: 42 vs. 22
  misc_feature: MA Experiment 20000112 PARAMETER Experiment Name: At_42deg_Heat_cDNA_P Parameter: Timepoint (hr) Value: 2
  misc_feature: MA Experiment 20000112 PARAMETER Experiment Name: At_42deg_Heat_cDNA_P Parameter: Tissue Value: Aerial
  misc_feature: MA Experiment ID: 20000144 Result: Down-regulated in Transcription
  misc_feature: MA Experiment 20000144 PARAMETER Experiment Name: At_42deg_Heat_cDNA_P Parameter: Temperature (deg C) Value: 42 vs. 22
  misc_feature: MA Experiment 20000144 PARAMETER Experiment Name: At_42deg_Heat_cDNA_P Parameter: Timepoint (hr) Value: 1
  misc_feature: MA Experiment 20000144 PARAMETER Experiment Name: At_42deg_Heat_cDNA_P Parameter: Tissue Value: Aerial
  misc_feature: MA Experiment ID: 20000169 Result: Down-regulated in Transcription
  misc_feature: MA Experiment 20000169 PARAMETER Experiment Name: At_100uM_ABA_P Parameter: Age (day) Value: 14
  misc_feature: MA Experiment 20000169 PARAMETER Experiment Name: At_100uM_ABA_P Parameter: Organism Value: A. thaliana
  misc_feature: MA Experiment 20000169 PARAMETER Experiment Name: At_100uM_ABA_P Parameter: Plant Line Value: WS
  misc_feature: MA Experiment 20000169 PARAMETER Experiment Name: At_100uM_ABA_P Parameter: Timepoint (hr) Value: 6
  misc_feature: MA Experiment 20000169 PARAMETER Experiment Name: At_100uM_ABA_P Parameter: Tissue Value: Aerial
  misc_feature: MA Experiment 20000169 PARAMETER Experiment Name: At_100uM_ABA_P Parameter: Treatment Value: 100uM ABA vs. No Treatment
  misc_feature: MA Experiment ID: 20000171 Result: Down-regulated in Transcription
  misc_feature: MA Experiment 20000171 PARAMETER Experiment Name: At_42deg_Heat_P Parameter: Age (day) Value: 14
  misc_feature: MA Experiment 20000171 PARAMETER Experiment Name: At_42deg_Heat_P Parameter: Organism Value: A. thaliana
  misc_feature: MA Experiment 20000171 PARAMETER Experiment Name: At_42deg_Heat_P Parameter: Plant Line Value: WS
  misc_feature: MA Experiment 20000171 PARAMETER Experiment Name: At_42deg_Heat_P Parameter: Temperature (deg C) Value: 42 vs. 22
  misc_feature: MA Experiment 20000171 PARAMETER Experiment Name: At_42deg_Heat_P Parameter: Timepoint (hr) Value: 1
  misc_feature: MA Experiment 20000171 PARAMETER Experiment Name: At_42deg_Heat_P Parameter: Tissue Value: Aerial
  misc_feature: MA Experiment ID: 20000173 Result: Down-regulated in Transcription
  misc_feature: MA Experiment 20000173 PARAMETER Experiment Name: At_42deg_Heat_P Parameter: Age (day) Value: 14
  misc_feature: MA Experiment 20000173 PARAMETER Experiment Name: At_42deg_Heat_P Parameter: Organism Value: A. thaliana
  misc_feature: MA Experiment 20000173 PARAMETER Experiment Name: At_42deg_Heat_P Parameter: Plant Line Value: WS
  misc_feature: MA Experiment 20000173 PARAMETER Experiment Name: At_42deg_Heat_P Parameter: Temperature (deg C) Value: 42 vs. 22
  misc_feature: MA Experiment 20000173 PARAMETER Experiment Name: At_42deg_Heat_P Parameter: Timepoint (hr) Value: 6
  misc_feature: MA Experiment 20000173 PARAMETER Experiment Name: At_42deg_Heat_P Parameter: Tissue Value: Aerial
  misc_feature: MA Experiment ID: 20000184 Result: Down-regulated in Transcription
  misc_feature: MA Experiment 20000184 PARAMETER Experiment Name: At_Shoots__P Parameter: Age (day) Value: 7
  misc_feature: MA Experiment 20000184 PARAMETER Experiment Name: At_Shoots__P Parameter: Tissue Value: Shoots vs. Whole Plant
  misc_feature: MA Experiment ID: 20000213 Result: Down-regulated in Transcription
  misc_feature: MA Experiment 20000213 PARAMETER Experiment Name: At_4deg_Cold_P Parameter: Timepoint (hr) Value: 2
  misc_feature: MA Experiment ID: 20000227 Result: Down-regulated in Transcription
  misc_feature: MA Experiment 20000227 PARAMETER Experiment Name: At_Root-Tips-vs-Tops_P Parameter: Tissue Value: Root Tips vs. Root Tops
  misc_feature: MA Experiment ID: 20000234 Result: Down-regulated in Transcription
  misc_feature: MA Experiment 20000234 PARAMETER Experiment Name: At_Siliques_P Parameter: Age (day) Value: 21
  misc_feature: MA Experiment 20000234 PARAMETER Experiment Name: At_Siliques_P Parameter: Organism Value: A. thaliana
  misc_feature: MA Experiment 20000234 PARAMETER Experiment Name: At_Siliques_P Parameter: Plant Line Value: WS
  misc_feature: MA Experiment 20000234 PARAMETER Experiment Name: At_Siliques_P Parameter: Tissue Value: Less Than 5mm Siliques vs. Whole Plant
  misc_feature: MA Experiment ID: 20000264 Result: Down-regulated in Transcription
  misc_feature: MA Experiment 20000264 PARAMETER Experiment Name: At_Open_Flower_P Parameter: Age (day) Value: 21
  misc_feature: MA Experiment 20000264 PARAMETER Experiment Name: At_Open_Flower_P Parameter: Plant Line Value: WS
  misc_feature: MA Experiment 20000264 PARAMETER Experiment Name: At_Open_Flower_P Parameter: Tissue Value: Open Flower vs. Whole Plant
  misc_feature: MA Experiment ID: 20000265 Result: Down-regulated in Transcription
  misc_feature: MA Experiment 20000265 PARAMETER Experiment Name: At_Open_Flower_P Parameter: Age (day) Value: 21
  misc_feature: MA Experiment 20000265 PARAMETER Experiment Name: At_Open_Flower_P Parameter: Plant Line Value: WS
  misc_feature: MA Experiment 20000265 PARAMETER Experiment Name: At_Open_Flower_P Parameter: Tissue Value: Closed Flower vs. Whole Plant
  misc_feature: MA Experiment ID: 20000269 Result: Down-regulated in Transcription
  misc_feature: MA Experiment 20000269 PARAMETER Experiment Name: At_1mM_KNO3_L-vs-H_Roots_P Parameter: Age (day) Value: 7,10,12
  misc_feature: MA Experiment 20000269 PARAMETER Experiment Name: At_1mM_KNO3_L-vs-H_Roots_P Parameter: Organism Value: A. thaliana
  misc_feature: MA Experiment 20000269 PARAMETER Experiment Name: At_1mM_KNO3_L-vs-H_Roots_P Parameter: Plant Line Value: WS
  misc_feature: MA Experiment 20000269 PARAMETER Experiment Name: At_1mM_KNO3_L-vs-H_Roots_P Parameter: Timepoint (day) Value: 7,10,12
  misc_feature: MA Experiment 20000269 PARAMETER Experiment Name: At_1mM_KNO3_L-vs-H_Roots_P Parameter: Tissue Value: Roots
  misc_feature: MA Experiment 20000269 PARAMETER Experiment Name: At_1mM_KNO3_L-vs-H_Roots_P Parameter: Treatment Value: 1mM KNO3 vs. 50mM KNO3
  misc_feature: MA Experiment ID: 20000286 Result: Down-regulated in Transcription
  misc_feature: MA Experiment 20000286 PARAMETER Experiment Name: At_Open_Flower_P Parameter: Age (day) Value: 21
  misc_feature: MA Experiment 20000286 PARAMETER Experiment Name: At_Open_Flower_P Parameter: Plant Line Value: WS
  misc_feature: MA Experiment 20000286 PARAMETER Experiment Name: At_Open_Flower_P Parameter: Tissue Value: Half Open vs. Whole Plant
  misc_feature: MA Experiment ID: 20000308 Result: Up-regulated in Transcription
  misc_feature: MA Experiment 20000308 PARAMETER Experiment Name: At_100mM_NaCl__P Parameter: Age (day) Value: 17
  misc_feature: MA Experiment 20000308 PARAMETER Experiment Name: At_100mM_NaCl__P Parameter: Organism Value: A. thaliana
  misc_feature: MA Experiment 20000308 PARAMETER Experiment Name: At_100mM_NaCl__P Parameter: Plant Line Value: WS
  misc_feature: MA Experiment 20000308 PARAMETER Experiment Name: At_100mM_NaCl__P Parameter: Timepoint (hr) Value: 72
  misc_feature: MA Experiment 20000308 PARAMETER Experiment Name: At_100mM_NaCl__P Parameter: Tissue Value: Whole Plant
  misc_feature: MA Experiment 20000308 PARAMETER Experiment Name: At_100mM_NaCl__P Parameter: Treatment Value: 100mM NaCl vs. No Treatment
  misc_feature: MA Experiment ID: 20000438 Result: Down-regulated in Transcription
  misc_feature: MA Experiment 20000438 PARAMETER Experiment Name: At_Shoots__P Parameter: Age (day) Value: 14
  misc_feature: MA Experiment 20000438 PARAMETER Experiment Name: At_Shoots__P Parameter: Tissue Value: Shoots vs. Whole Plant
  misc_feature: MA Experiment ID: 20000441 Result: Up-regulated in Transcription
  misc_feature: MA Experiment 20000441 PARAMETER Experiment Name: At_1uM_BR-BRZ__P Parameter: Tissue Value: Shoot Apices
  misc_feature: MA Experiment 20000441 PARAMETER Experiment Name: At_1uM_BR-BRZ__P Parameter: Treatment Value: 1uM BR vs. No Treatment
  misc_feature: MA Experiment ID: 20000443 Result: Up-regulated in Transcription
  misc_feature: MA Experiment 20000443 PARAMETER Experiment Name: At_1uM_BR-BRZ__P Parameter: Tissue Value: Shoot Apices
  misc_feature: MA Experiment 20000443 PARAMETER Experiment Name: At_1uM_BR-BRZ__P Parameter: Treatment Value: 1uM BRZ vs. No Treatment
  misc_feature: MA Experiment ID: 20000452 Result: Up-regulated in Transcription
  misc_feature: MA Experiment 20000452 PARAMETER Experiment Name: At_CS6879_Shoots-Roots_P Parameter: Age (day) Value: 14
  misc_feature: MA Experiment 20000452 PARAMETER Experiment Name: At_CS6879_Shoots-Roots_P Parameter: Organism Value: A. thaliana
  misc_feature: MA Experiment 20000452 PARAMETER Experiment Name: At_CS6879_Shoots-Roots_P Parameter: Plant Line Value: CS6879 vs. WS
  misc_feature: MA Experiment 20000452 PARAMETER Experiment Name: At_CS6879_Shoots-Roots_P Parameter: Tissue Value: Shoots
  misc_feature: MA Experiment ID: 20000456 Result: Down-regulated in Transcription
  misc_feature: MA Experiment 20000456 PARAMETER Experiment Name: At_100uM_BA_P Parameter: Age (day) Value: 14
  misc_feature: MA Experiment 20000456 PARAMETER Experiment Name: At_100uM_BA_P Parameter: Organism Value: A. thaliana
  misc_feature: MA Experiment 20000456 PARAMETER Experiment Name: At_100uM_BA_P Parameter: Plant Line Value: WS
  misc_feature: MA Experiment 20000456 PARAMETER Experiment Name: At_100uM_BA_P Parameter: Timepoint (hr) Value: 6
  misc_feature: MA Experiment 20000456 PARAMETER Experiment Name: At_100uM_BA_P Parameter: Tissue Value: Aerial
  misc_feature: MA Experiment 20000456 PARAMETER Experiment Name: At_100uM_BA_P Parameter: Treatment Value: 100uM BA vs. No Treatment
  misc_feature: MA Experiment ID: 20000527 Result: Down-regulated in Transcription
  misc_feature: MA Experiment 20000527 PARAMETER Experiment Name: At_10percent_PEG_P Parameter: Age (day) Value: 20
  misc_feature: MA Experiment 20000527 PARAMETER Experiment Name: At_10percent_PEG_P Parameter: Organism Value: A. thaliana
  misc_feature: MA Experiment 20000527 PARAMETER Experiment Name: At_10percent_PEG_P Parameter: Plant Line Value: WS
  misc_feature: MA Experiment 20000527 PARAMETER Experiment Name: At_10percent_PEG_P Parameter: Timepoint (day) Value: 20
  misc_feature: MA Experiment 20000527 PARAMETER Experiment Name: At_10percent_PEG_P Parameter: Tissue Value: Whole Plant
  misc_feature: MA Experiment 20000527 PARAMETER Experiment Name: At_10percent_PEG_P Parameter: Treatment Value: 10percent PEG vs. No Treatment
  misc_feature: MA Experiment ID: 20000575 Result: Down-regulated in Transcription
  misc_feature: MA Experiment 20000575 PARAMETER Experiment Name: At_100uM_ABA_Mutants__P Parameter: Organism Value: A. thaliana
  misc_feature: MA Experiment 20000575 PARAMETER Experiment Name: At_100uM_ABA_Mutants__P Parameter: Plant Line Value: CS22
  misc_feature: MA Experiment 20000575 PARAMETER Experiment Name: At_100uM_ABA_Mutants__P Parameter: Timepoint (hr) Value: 6
  misc_feature: MA Experiment 20000575 PARAMETER Experiment Name: At_100uM_ABA_Mutants__P Parameter: Tissue Value: Whole Plant
  misc_feature: MA Experiment 20000575 PARAMETER Experiment Name: At_100uM_ABA_Mutants__P Parameter: Treatment Value: 1uM ABA vs. No Treatment
  misc_feature: MA Experiment ID: 20000576 Result: Down-regulated in Transcription
  misc_feature: MA Experiment 20000576 PARAMETER Experiment Name: At_100uM_ABA_Mutants__P Parameter: Organism Value: A. thaliana
  misc_feature: MA Experiment 20000576 PARAMETER Experiment Name: At_100uM_ABA_Mutants__P Parameter: Plant Line Value: CS23
  misc_feature: MA Experiment 20000576 PARAMETER Experiment Name: At_100uM_ABA_Mutants__P Parameter: Timepoint (hr) Value: 6
  misc_feature: MA Experiment 20000576 PARAMETER Experiment Name: At_100uM_ABA_Mutants__P Parameter: Tissue Value: Whole Plant
  misc_feature: MA Experiment 20000576 PARAMETER Experiment Name: At_100uM_ABA_Mutants__P Parameter: Treatment Value: 1uM ABA vs. No Treatment
  misc_feature: MA Experiment ID: 20000794 Result: Down-regulated in Transcription
  misc_feature: MA Experiment 20000794 PARAMETER Experiment Name: At_Petals_P Parameter: Age (day) Value: 23-25 days
  misc_feature: MA Experiment 20000794 PARAMETER Experiment Name: At_Petals_P Parameter: Plant Line Value: WS
  misc_feature: MA Experiment 20000794 PARAMETER Experiment Name: At_Petals_P Parameter: Tissue Value: Petals vs. Whole plant
  misc_feature: MA Experiment ID: 20001451 Result: Down-regulated in Transcription
  misc_feature: MA Experiment 20001451 PARAMETER Experiment Name: At_Far-red-induction_P Parameter: Age (day) Value: 7
  misc_feature: MA Experiment 20001451 PARAMETER Experiment Name: At_Far-red-induction_P Parameter: Light Value: Far-red vs. White
  misc_feature: MA Experiment 20001451 PARAMETER Experiment Name: At_Far-red-induction_P Parameter: Organism Value: A. thaliana
  misc_feature: MA Experiment 20001451 PARAMETER Experiment Name: At_Far-red-induction_P Parameter: Plant Line Value: Columbia
  misc_feature: MA Experiment 20001451 PARAMETER Experiment Name: At_Far-red-induction_P Parameter: Timepoint (hr) Value: 24
  misc_feature: MA Experiment 20001451 PARAMETER Experiment Name: At_Far-red-induction_P Parameter: Tissue Value: Whole Plant
  misc_feature: MA Experiment ID: 20001554 Result: Down-regulated in Transcription
  misc_feature: MA Experiment 20001554 PARAMETER Experiment Name: At_Drought_Soil_Dry_P Parameter: Age (day) Value: 21
  misc_feature: MA Experiment 20001554 PARAMETER Experiment Name: At_Drought_Soil_Dry_P Parameter: Organism Value: A. thaliana
  misc_feature: MA Experiment 20001554 PARAMETER Experiment Name: At_Drought_Soil_Dry_P Parameter: Plant Line Value: WS
  misc_feature: MA Experiment 20001554 PARAMETER Experiment Name: At_Drought_Soil_Dry_P Parameter: Post Timepoint (hr) Value: None
  misc_feature: MA Experiment 20001554 PARAMETER Experiment Name: At_Drought_Soil_Dry_P Parameter: Post-Treatment Value: None
  misc_feature: MA Experiment 20001554 PARAMETER Experiment Name: At_Drought_Soil_Dry_P Parameter: Timepoint (day) Value: 7
  misc_feature: MA Experiment 20001554 PARAMETER Experiment Name: At_Drought_Soil_Dry_P Parameter: Treatment Value: Drought vs. No Drought
  misc_feature: MA Experiment ID: 20001555 Result: Down-regulated in Transcription
  misc_feature: MA Experiment 20001555 PARAMETER Experiment Name: At_Drought_Soil_Dry_P Parameter: Age (day) Value: 24
  misc_feature: MA Experiment 20001555 PARAMETER Experiment Name: At_Drought_Soil_Dry_P Parameter: Organism Value: A. thaliana
  misc_feature: MA Experiment 20001555 PARAMETER Experiment Name: At_Drought_Soil_Dry_P Parameter: Plant Line Value: WS
  misc_feature: MA Experiment 20001555 PARAMETER Experiment Name: At_Drought_Soil_Dry_P Parameter: Post Timepoint (hr) Value: None
  misc_feature: MA Experiment 20001555 PARAMETER Experiment Name: At_Drought_Soil_Dry_P Parameter: Post-Treatment Value: None
  misc_feature: MA Experiment 20001555 PARAMETER Experiment Name: At_Drought_Soil_Dry_P Parameter: Timepoint (day) Value: 10
  misc_feature: MA Experiment 20001555 PARAMETER Experiment Name: At_Drought_Soil_Dry_P Parameter: Treatment Value: Drought vs. No Drought
  misc_feature: MA Experiment ID: 20001556 Result: Down-regulated in Transcription
  misc_feature: MA Experiment 20001556 PARAMETER Experiment Name: At_Drought_Soil_Dry_P Parameter: Age (day) Value: 26
  misc_feature: MA Experiment 20001556 PARAMETER Experiment Name: At_Drought_Soil_Dry_P Parameter: Organism Value: A. thaliana
  misc_feature: MA Experiment 20001556 PARAMETER Experiment Name: At_Drought_Soil_Dry_P Parameter: Plant Line Value: WS
  misc_feature: MA Experiment 20001556 PARAMETER Experiment Name: At_Drought_Soil_Dry_P Parameter: Post Timepoint (hr) Value: None
  misc_feature: MA Experiment 20001556 PARAMETER Experiment Name: At_Drought_Soil_Dry_P Parameter: Post-Treatment Value: None
  misc_feature: MA Experiment 20001556 PARAMETER Experiment Name: At_Drought_Soil_Dry_P Parameter: Timepoint (day) Value: 12
  misc_feature: MA Experiment 20001556 PARAMETER Experiment Name: At_Drought_Soil_Dry_P Parameter: Treatment Value: Drought vs. No Drought
  misc_feature: MA Experiment ID: 20001557 Result: Down-regulated in Transcription
  misc_feature: MA Experiment 20001557 PARAMETER Experiment Name: At_Drought_Soil_Dry_P Parameter: Age (day) Value: 27
  misc_feature: MA Experiment 20001557 PARAMETER Experiment Name: At_Drought_Soil_Dry_P Parameter: Organism Value: A. thaliana
  misc_feature: MA Experiment 20001557 PARAMETER Experiment Name: At_Drought_Soil_Dry_P Parameter: Plant Line Value: WS
  misc_feature: MA Experiment 20001557 PARAMETER Experiment Name: At_Drought_Soil_Dry_P Parameter: Post Timepoint (hr) Value: 3
  misc_feature: MA Experiment 20001557 PARAMETER Experiment Name: At_Drought_Soil_Dry_P Parameter: Post-Treatment Value: Re-Water vs. No Drought
  misc_feature: MA Experiment 20001557 PARAMETER Experiment Name: At_Drought_Soil_Dry_P Parameter: Timepoint (day) Value: 13
  misc_feature: MA Experiment 20001557 PARAMETER Experiment Name: At_Drought_Soil_Dry_P Parameter: Treatment Value: Drought vs. No Drought
  misc_feature: MA Experiment ID: 20001558 Result: Down-regulated in Transcription
  misc_feature: MA Experiment 20001558 PARAMETER Experiment Name: At_Drought_Soil_Dry_P Parameter: Age (day) Value: 27
  misc_feature: MA Experiment 20001558 PARAMETER Experiment Name: At_Drought_Soil_Dry_P Parameter: Organism Value: A. thaliana
  misc_feature: MA Experiment 20001558 PARAMETER Experiment Name: At_Drought_Soil_Dry_P Parameter: Plant Line Value: WS
  misc_feature: MA Experiment 20001558 PARAMETER Experiment Name: At_Drought_Soil_Dry_P Parameter: Post Timepoint (hr) Value: 6
  misc_feature: MA Experiment 20001558 PARAMETER Experiment Name: At_Drought_Soil_Dry_P Parameter: Post-Treatment Value: Re-Water vs. No Drought
  misc_feature: MA Experiment 20001558 PARAMETER Experiment Name: At_Drought_Soil_Dry_P Parameter: Timepoint (day) Value: 13
  misc_feature: MA Experiment 20001558 PARAMETER Experiment Name: At_Drought_Soil_Dry_P Parameter: Treatment Value: Drought vs. No Drought
  misc_feature: MA Experiment ID: 20001559 Result: Down-regulated in Transcription
  misc_feature: MA Experiment 20001559 PARAMETER Experiment Name: At_Drought_Soil_Dry_P Parameter: Age (day) Value: 28
  misc_feature: MA Experiment 20001559 PARAMETER Experiment Name: At_Drought_Soil_Dry_P Parameter: Organism Value: A. thaliana
  misc_feature: MA Experiment 20001559 PARAMETER Experiment Name: At_Drought_Soil_Dry_P Parameter: Plant Line Value: WS
  misc_feature: MA Experiment 20001559 PARAMETER Experiment Name: At_Drought_Soil_Dry_P Parameter: Post Timepoint (hr) Value: 29
  misc_feature: MA Experiment 20001559 PARAMETER Experiment Name: At_Drought_Soil_Dry_P Parameter: Post-Treatment Value: Re-Water vs. No Drought
  misc_feature: MA Experiment 20001559 PARAMETER Experiment Name: At_Drought_Soil_Dry_P Parameter: Timepoint (day) Value: 14
  misc_feature: MA Experiment 20001559 PARAMETER Experiment Name: At_Drought_Soil_Dry_P Parameter: Treatment Value: Drought vs. No Drought
  misc_feature: MA Experiment ID: 20001560 Result: Down-regulated in Transcription
  misc_feature: MA Experiment 20001560 PARAMETER Experiment Name: At_Drought_Soil_Dry_P Parameter: Age (day) Value: 28
  misc_feature: MA Experiment 20001560 PARAMETER Experiment Name: At_Drought_Soil_Dry_P Parameter: Organism Value: A. thaliana
  misc_feature: MA Experiment 20001560 PARAMETER Experiment Name: At_Drought_Soil_Dry_P Parameter: Plant Line Value: WS
  misc_feature: MA Experiment 20001560 PARAMETER Experiment Name: At_Drought_Soil_Dry_P Parameter: Post Timepoint (hr) Value: None
  misc_feature: MA Experiment 20001560 PARAMETER Experiment Name: At_Drought_Soil_Dry_P Parameter: Post-Treatment Value: None
  misc_feature: MA Experiment 20001560 PARAMETER Experiment Name: At_Drought_Soil_Dry_P Parameter: Timepoint (day) Value: 14
  misc_feature: MA Experiment 20001560 PARAMETER Experiment Name: At_Drought_Soil_Dry_P Parameter: Treatment Value: Drought vs. No Drought
  misc_feature: MA Experiment ID: 20001757 Result: Up-regulated in Transcription
  misc_feature: MA Experiment 20001757 PARAMETER Experiment Name: At_50mM_NH4NO3_L-to-H_P Parameter: Timepoint (hr) Value: 6
  misc_feature: MA Experiment 20001757 PARAMETER Experiment Name: At_50mM_NH4NO3_L-to-H_P Parameter: Tissue Value: Leaf
  misc_feature: MA Experiment 20001757 PARAMETER Experiment Name: At_50mM_NH4NO3_L-to-H_P Parameter: Treatment Value: 50mM NH4NO3 vs 100mM Mannitol
  misc_feature: MA Experiment ID: 20001760 Result: Down-regulated in Transcription
  misc_feature: MA Experiment 20001760 PARAMETER Experiment Name: At_50mM_NH4NO3_L-to-H_P Parameter: Timepoint (hr) Value: 2
  misc_feature: MA Experiment 20001760 PARAMETER Experiment Name: At_50mM_NH4NO3_L-to-H_P Parameter: Tissue Value: Siliques
  misc_feature: MA Experiment 20001760 PARAMETER Experiment Name: At_50mM_NH4NO3_L-to-H_P Parameter: Treatment Value: 50mM NH4NO3 vs 100mM Mannitol
  misc_feature: MA Experiment ID: 20001771 Result: Down-regulated in Transcription
  misc_feature: MA Experiment 20001771 PARAMETER Experiment Name: At_Far-red-enriched-adult_P Parameter: Age (day) Value: 28
  misc_feature: MA Experiment 20001771 PARAMETER Experiment Name: At_Far-red-enriched-adult_P Parameter: Light Value: Far-red enriched vs. White
  misc_feature: MA Experiment 20001771 PARAMETER Experiment Name: At_Far-red-enriched-adult_P Parameter: Organism Value: A. thaliana
  misc_feature: MA Experiment 20001771 PARAMETER Experiment Name: At_Far-red-enriched-adult_P Parameter: Plant Line Value: Columbia
  misc_feature: MA Experiment 20001771 PARAMETER Experiment Name: At_Far-red-enriched-adult_P Parameter: Timepoint (hr) Value: 16
  misc_feature: MA Experiment 20001771 PARAMETER Experiment Name: At_Far-red-enriched-adult_P Parameter: Tissue Value: Aerial
  misc_feature: MA Experiment ID: 20001774 Result: Up-regulated in Transcription
  misc_feature: MA Experiment 20001774 PARAMETER Experiment Name: At_Far-red-enriched-adult_P Parameter: Age (day) Value: 31
  misc_feature: MA Experiment 20001774 PARAMETER Experiment Name: At_Far-red-enriched-adult_P Parameter: Light Value: Far-red enriched vs. White
  misc_feature: MA Experiment 20001774 PARAMETER Experiment Name: At_Far-red-enriched-adult_P Parameter: Organism Value: A. thaliana
  misc_feature: MA Experiment 20001774 PARAMETER Experiment Name: At_Far-red-enriched-adult_P Parameter: Plant Line Value: Columbia
  misc_feature: MA Experiment 20001774 PARAMETER Experiment Name: At_Far-red-enriched-adult_P Parameter: Timepoint (hr) Value: 72
  misc_feature: MA Experiment 20001774 PARAMETER Experiment Name: At_Far-red-enriched-adult_P Parameter: Tissue Value: Aerial
  misc_feature: MA Experiment ID: 20001906 Result: Down-regulated in Transcription
  misc_feature: MA Experiment 20001906 PARAMETER Experiment Name: At_Drought_Reproduction_P Parameter: Age (day) Value: 35
  misc_feature: MA Experiment 20001906 PARAMETER Experiment Name: At_Drought_Reproduction_P Parameter: Organism Value: A. thaliana
  misc_feature: MA Experiment 20001906 PARAMETER Experiment Name: At_Drought_Reproduction_P Parameter: Plant Line Value: WS
  misc_feature: MA Experiment 20001906 PARAMETER Experiment Name: At_Drought_Reproduction_P Parameter: Timepoint (day) Value: 5
  misc_feature: MA Experiment 20001906 PARAMETER Experiment Name: At_Drought_Reproduction_P Parameter: Tissue Value: Siliques
  misc_feature: MA Experiment 20001906 PARAMETER Experiment Name: At_Drought_Reproduction_P Parameter: Treatment Value: Drought vs. No Drought

SEQ ID NO: 31741 - protein, 222 aa, Arabidopsis thaliana; identical to SEQ ID NO: 28151
  peptide (1)..(222): Ceres Seq. ID no. 12423233
  misc_feature (83)..(201): Pfam Name: Barwin family Pfam Description: Barwin family
  misc_feature (16)..(221): Homolog of NCBI NO: 7442144 NR Description: CBP20 preproprotein - common tobacco
  misc_feature (32)..(203): Homolog of NCBI NO: 2832430 NR Description: prohevein [Hevea brasiliensis]
  misc_feature (16)..(221): Homolog of NCBI NO: 632736 NR Description: CBP20 [Nicotiana tabacum]
  misc_feature (19)..(203): Homolog of NCBI NO: 123062 NR Description: Hevein precursor (Major hevein)
  misc_feature (16)..(203): Homolog of NCBI NO: 139698 NR Description: Wound-induced protein WIN1 precursor
  misc_feature (19)..(221): Homolog of NCBI NO: 7442143 NR Description: wound-induced protein (clone TAB7) - tomato
  misc_feature (20)..(221): Homolog of NCBI NO: 139699 NR Description: Wound-induced protein WIN2 precursor
  misc_feature (32)..(220): Homolog of NCBI NO: 6562381 NR Description: pseudo-hevein [Hevea brasiliensis]
  misc_feature (11)..(180): Homolog of NCBI NO: 24417288 NR Description: unknown [Arabidopsis thaliana]
  misc_feature (11)..(222): Homolog of NCBI NO: 15229342 NR Description: hevein-like protein precursor (PR-4)

SEQ ID NO: 31742 - protein, 212 aa, Arabidopsis thaliana; identical to SEQ ID NO: 28152
  peptide (1)..(212): Ceres Seq. ID no. 12423234
  misc_feature (73)..(191): Pfam Name: Barwin family Pfam Description: Barwin family
  misc_feature (6)..(211): Homolog of NCBI NO: 7442144 NR Description: CBP20 preproprotein - common tobacco
  misc_feature (22)..(193): Homolog of NCBI NO: 2832430 NR Description: prohevein [Hevea brasiliensis]
  misc_feature (6)..(211): Homolog of NCBI NO: 632736 NR Description: CBP20 [Nicotiana tabacum]
  misc_feature (9)..(193): Homolog of NCBI NO: 123062 NR Description: Hevein precursor (Major hevein)
  misc_feature (6)..(193): Homolog of NCBI NO: 139698 NR Description: Wound-induced protein WIN1 precursor
  misc_feature (9)..(211): Homolog of NCBI NO: 7442143 NR Description: wound-induced protein (clone TAB7) - tomato
  misc_feature (10)..(211): Homolog of NCBI NO: 139699 NR Description: Wound-induced protein WIN2 precursor
  misc_feature (22)..(210): Homolog of NCBI NO: 6562381 NR Description: pseudo-hevein [Hevea brasiliensis]
  misc_feature (1)..(170): Homolog of NCBI NO: 24417288 NR Description: unknown [Arabidopsis thaliana]
  misc_feature (1)..(212): Homolog of NCBI NO: 15229342 NR Description: hevein-like protein precursor (PR-4)

SEQ ID NO: 31743 - DNA, 1879 bp, Arabidopsis thaliana; identical to SEQ ID NO: 28153
  misc_feature (1)..(1879): Ceres Seq. ID no. 13487772
  misc_feature: MA Experiment ID: 108462 Result: Down-regulated in Transcription
  misc_feature: MA Experiment 108462 PARAMETER Experiment Name: At_Germinating_Seeds_cDNA_P Parameter: Age (day) Value: 2 vs. 0
  misc_feature: MA Experiment 108462 PARAMETER Experiment Name: At_Germinating_Seeds_cDNA_P Parameter: Tissue Value: Germinating Seeds
  misc_feature: MA Experiment ID: 108463 Result: Down-regulated in Transcription
  misc_feature: MA Experiment 108463 PARAMETER Experiment Name: At_Germinating_Seeds_cDNA_P Parameter: Age (day) Value: 3 vs. 0
  misc_feature: MA Experiment 108463 PARAMETER Experiment Name: At_Germinating_Seeds_cDNA_P Parameter: Tissue Value: Germinating Seeds
  misc_feature: MA Experiment ID: 108464 Result: Down-regulated in Transcription
  misc_feature: MA Experiment 108464 PARAMETER Experiment Name: At_Germinating_Seeds_cDNA_P Parameter: Age (day) Value: 4 vs. 0
  misc_feature: MA Experiment 108464 PARAMETER Experiment Name: At_Germinating_Seeds_cDNA_P Parameter: Tissue Value: Germinating Seeds
  misc_feature: MA Experiment ID: 108572 Result: Down-regulated in Transcription
  misc_feature: MA Experiment 108572 PARAMETER Experiment Name: At_Drought_cDNA_P Parameter: Timepoint (hr) Value: 1
  misc_feature: MA Experiment 108572 PARAMETER Experiment Name: At_Drought_cDNA_P Parameter: Tissue Value: Aerial
  misc_feature: MA Experiment 108572 PARAMETER Experiment Name: At_Drought_cDNA_P Parameter: Treatment Value: Drought vs. No Drought
  misc_feature: MA Experiment ID: 108573 Result: Down-regulated in Transcription
  misc_feature: MA Experiment 108573 PARAMETER Experiment Name: At_Drought_cDNA_P Parameter: Timepoint (hr) Value: 6
  misc_feature: MA Experiment 108573 PARAMETER Experiment Name: At_Drought_cDNA_P Parameter: Tissue Value: Aerial
  misc_feature: MA Experiment 108573 PARAMETER Experiment Name: At_Drought_cDNA_P Parameter: Treatment Value: Drought vs. No Drought
  misc_feature: MA Experiment ID: 108585 Result: Down-regulated in Transcription
  misc_feature: MA Experiment 108585 PARAMETER Experiment Name: At_5mM_NaNP_cDNA_P Parameter: Timepoint (hr) Value: 6
  misc_feature: MA Experiment 108585 PARAMETER Experiment Name: At_5mM_NaNP_cDNA_P Parameter: Tissue Value: Aerial
  misc_feature: MA Experiment 108585 PARAMETER Experiment Name: At_5mM_NaNP_cDNA_P Parameter: Treatment Value: null
  misc_feature: MA Experiment ID: 20000087 Result: Down-regulated in Transcription
  misc_feature: MA Experiment 20000087 PARAMETER Experiment Name: At_100uM_ABA_Mutants_cDNA_P Parameter: Plant Line Value: WS
  misc_feature: MA Experiment 20000087 PARAMETER Experiment Name: At_100uM_ABA_Mutants_cDNA_P Parameter: Timepoint (hr) Value: 6
  misc_feature: MA Experiment 20000087 PARAMETER Experiment Name: At_100uM_ABA_Mutants_cDNA_P Parameter: Tissue Value: Aerial
  misc_feature: MA Experiment 20000087 PARAMETER Experiment Name: At_100uM_ABA_Mutants_cDNA_P Parameter: Treatment Value: 100uM ABA vs. No Treatment
  misc_feature: MA Experiment ID: 20000088 Result: Up-regulated in Transcription
  misc_feature: MA Experiment 20000088 PARAMETER Experiment Name: At_100uM_ABA_Mutants_cDNA_P Parameter: Plant Line Value: Landsberg
  misc_feature: MA Experiment 20000088 PARAMETER Experiment Name: At_100uM_ABA_Mutants_cDNA_P Parameter: Timepoint (hr) Value: 6
  misc_feature: MA Experiment 20000088 PARAMETER Experiment Name: At_100uM_ABA_Mutants_cDNA_P Parameter: Tissue Value: Aerial
  misc_feature: MA Experiment 20000088 PARAMETER Experiment Name: At_100uM_ABA_Mutants_cDNA_P Parameter: Treatment Value: 100uM ABA vs. No Treatment
  misc_feature: MA Experiment ID: 20000089 Result: Up-regulated in Transcription
  misc_feature: MA Experiment ID: 20000090 Result: Up-regulated in Transcription
  misc_feature: MA Experiment ID: 20000093 Result: Up-regulated in Transcription
  misc_feature: MA Experiment 20000093 PARAMETER Experiment Name: At_42deg_Heat_cDNA_P Parameter: Temperature (deg C) Value: 42 vs. 22
  misc_feature: MA Experiment 20000093 PARAMETER Experiment Name: At_42deg_Heat_cDNA_P Parameter: Timepoint (hr) Value: 0.5
  misc_feature: MA Experiment 20000093 PARAMETER Experiment Name: At_42deg_Heat_cDNA_P Parameter: Tissue Value: Aerial
  misc_feature: MA Experiment ID: 20001556 Result: Up-regulated in Transcription
  misc_feature: MA Experiment 20001556 PARAMETER Experiment Name: At_Drought_Soil_Dry_P Parameter: Age (day) Value: 26
  misc_feature: MA Experiment 20001556 PARAMETER Experiment Name: At_Drought_Soil_Dry_P Parameter: Organism Value: A. thaliana
  misc_feature: MA Experiment 20001556 PARAMETER Experiment Name: At_Drought_Soil_Dry_P Parameter: Plant Line Value: WS
  misc_feature: MA Experiment 20001556 PARAMETER Experiment Name: At_Drought_Soil_Dry_P Parameter: Post Timepoint (hr) Value: None
  misc_feature: MA Experiment 20001556 PARAMETER Experiment Name: At_Drought_Soil_Dry_P Parameter: Post-Treatment Value: None
  misc_feature: MA Experiment 20001556 PARAMETER Experiment Name: At_Drought_Soil_Dry_P Parameter: Timepoint (day) Value: 12
  misc_feature: MA Experiment 20001556 PARAMETER Experiment Name: At_Drought_Soil_Dry_P Parameter: Treatment Value: Drought vs. No Drought

SEQ ID NO: 31744 - protein, 561 aa, Arabidopsis thaliana; identical to SEQ ID NO: 28154
  peptide (1)..(561): Ceres Seq. ID no. 13487773
  misc_feature (62)..(558): Homolog of NCBI NO: 40740610 NR Description: hypothetical protein AN3592.2 [Aspergillus
  misc_feature (143)..(558): Homolog of NCBI NO: 7441503 NR Description: calnexin - maize (fragment)
  misc_feature (29)..(561): Homolog of NCBI NO: 11131766 NR Description: Calnexin homolog precursor
  misc_feature (38)..(561): Homolog of NCBI NO: 11131469 NR Description: Calnexin homolog precursor
  misc_feature (39)..(561): Homolog of NCBI NO: 21740628 NR Description: OSJNBb0012E08.10 [Oryza sativa (japonica
  misc_feature (56)..(561): Homolog of NCBI NO: 3334138 NR Description: CALNEXIN HOMOLOG PRECURSOR
  misc_feature (30)..(561): Homolog of NCBI NO: 31321896 NR Description: putative papillar cell-specific calnexin
  misc_feature (30)..(561): Homolog of NCBI NO: 15240353 NR Description: calnexin 1 (CNX1) [Arabidopsis thaliana]
  misc_feature (30)..(561): Homolog of NCBI NO: 473878 NR Description: calnexin homolog
  misc_feature (30)..(561): Homolog of NCBI NO: 15240773 NR Description: calnexin, putative [Arabidopsis thaliana]
  misc_feature (62)..(558): Homolog of NCBI NO: 40740610 NR Description: hypothetical protein AN3592.2 [Aspergillus
  misc_feature (143)..(558): Homolog of NCBI NO: 7441503 NR Description: calnexin - maize (fragment)
  misc_feature (29)..(561): Homolog of NCBI NO: 11131766 NR Description: Calnexin homolog precursor
  misc_feature (38)..(561): Homolog of NCBI NO: 11131469 NR Description: Calnexin homolog precursor
  misc_feature (39)..(561): Homolog of NCBI NO: 21740628 NR Description: OSJNBb0012E08.10 [Oryza sativa (japonica
  misc_feature (56)..(561): Homolog of NCBI NO: 3334138 NR Description: CALNEXIN HOMOLOG PRECURSOR
  misc_feature (30)..(561): Homolog of NCBI NO: 31321896 NR Description: putative papillar cell-specific calnexin
  misc_feature (30)..(561): Homolog of NCBI NO: 15240353 NR Description: calnexin 1 (CNX1) [Arabidopsis thaliana]
  misc_feature (30)..(561): Homolog of NCBI NO: 473878 NR Description: calnexin homolog
  misc_feature (30)..(561): Homolog of NCBI NO: 15240773 NR Description: calnexin, putative [Arabidopsis thaliana]

SEQ ID NO: 31745 - protein, 532 aa, Arabidopsis thaliana; identical to SEQ ID NO: 28155
  peptide (1)..(532): Ceres Seq. ID no. 13487774
  misc_feature (33)..(529): Homolog of NCBI NO: 40740610 NR Description: hypothetical protein AN3592.2 [Aspergillus
  misc_feature (114)..(529): Homolog of NCBI NO: 7441503 NR Description: calnexin - maize (fragment)
  misc_feature (1)..(532): Homolog of NCBI NO: 11131766 NR Description: Calnexin homolog precursor
  misc_feature (9)..(532): Homolog of NCBI NO: 11131469 NR Description: Calnexin homolog precursor
  misc_feature (10)..(532): Homolog of NCBI NO: 21740628 NR Description: OSJNBb0012E08.10 [Oryza sativa (japonica
  misc_feature (27)..(532): Homolog of NCBI NO: 3334138 NR Description: CALNEXIN HOMOLOG PRECURSOR
  misc_feature (1)..(532): Homolog of NCBI NO: 31321896 NR Description: putative papillar cell-specific calnexin
  misc_feature (1)..(532): Homolog of NCBI NO: 15240353 NR Description: calnexin 1 (CNX1) [Arabidopsis thaliana]
  misc_feature (1)..(532): Homolog of NCBI NO: 473878 NR Description: calnexin homolog
  misc_feature (1)..(532): Homolog of NCBI NO: 15240773 NR Description: calnexin, putative [Arabidopsis thaliana]
  misc_feature (33)..(529): Homolog of NCBI NO: 40740610 NR Description: hypothetical protein AN3592.2 [Aspergillus
  misc_feature (114)..(529): Homolog of NCBI NO: 7441503 NR Description: calnexin - maize (fragment)
  misc_feature (1)..(532): Homolog of NCBI NO: 11131766 NR Description: Calnexin homolog precursor
  misc_feature (9)..(532): Homolog of NCBI NO: 11131469 NR Description: Calnexin homolog precursor
  misc_feature (10)..(532): Homolog of NCBI NO: 21740628 NR Description: OSJNBb0012E08.10 [Oryza sativa (japonica
  misc_feature (27)..(532): Homolog of NCBI NO: 3334138 NR Description: CALNEXIN HOMOLOG PRECURSOR
  misc_feature (1)..(532): Homolog of NCBI NO: 31321896 NR Description: putative papillar cell-specific calnexin
  misc_feature (1)..(532): Homolog of NCBI NO: 15240353 NR Description: calnexin 1 (CNX1) [Arabidopsis thaliana]
  misc_feature (1)..(532): Homolog of NCBI NO: 473878 NR Description: calnexin homolog
  misc_feature (1)..(532): Homolog of NCBI NO: 15240773 NR Description: calnexin, putative [Arabidopsis thaliana]

SEQ ID NO: 31746 - protein, 394 aa, Arabidopsis thaliana; identical to SEQ ID NO: 28156
  peptide (1)..(394): Ceres Seq. ID no. 13487775
  misc_feature (1)..(391): Homolog of NCBI NO: 40740610 NR Description: hypothetical protein AN3592.2 [Aspergillus
  misc_feature (1)..(391): Homolog of NCBI NO: 7441503 NR Description: calnexin - maize (fragment)
  misc_feature (1)..(394): Homolog of NCBI NO: 11131766 NR Description: Calnexin homolog precursor
  misc_feature (1)..(394): Homolog of NCBI NO: 11131469 NR Description: Calnexin homolog precursor
  misc_feature (1)..(394): Homolog of NCBI NO: 21740628 NR Description: OSJNBb0012E08.10 [Oryza sativa (japonica
  misc_feature (1)..(394): Homolog of NCBI NO: 3334138 NR Description: CALNEXIN HOMOLOG PRECURSOR
  misc_feature (1)..(394): Homolog of NCBI NO: 31321896 NR Description: putative papillar cell-specific calnexin
  misc_feature (1)..(394): Homolog of NCBI NO: 15240353 NR Description: calnexin 1 (CNX1) [Arabidopsis thaliana]
  misc_feature (1)..(394): Homolog of NCBI NO: 473878 NR Description: calnexin homolog
  misc_feature (1)..(394): Homolog of NCBI NO: 15240773 NR Description: calnexin, putative [Arabidopsis thaliana]
  misc_feature (1)..(391): Homolog of NCBI NO: 40740610 NR Description: hypothetical protein AN3592.2 [Aspergillus
  misc_feature (1)..(391): Homolog of NCBI NO: 7441503 NR Description: calnexin - maize (fragment)
  misc_feature (1)..(394): Homolog of NCBI NO: 11131766 NR Description: Calnexin homolog precursor
  misc_feature (1)..(394): Homolog of NCBI NO: 11131469 NR Description: Calnexin homolog precursor
  misc_feature (1)..(394): Homolog of NCBI NO: 21740628 NR Description: OSJNBb0012E08.10 [Oryza sativa (japonica
  misc_feature (1)..(394): Homolog of NCBI NO: 3334138 NR Description: CALNEXIN HOMOLOG PRECURSOR
  misc_feature (1)..(394): Homolog of NCBI NO: 31321896 NR Description: putative papillar cell-specific calnexin
  misc_feature (1)..(394): Homolog of NCBI NO: 15240353 NR Description: calnexin 1 (CNX1) [Arabidopsis thaliana]
  misc_feature (1)..(394): Homolog of NCBI NO: 473878 NR Description: calnexin homolog
  misc_feature (1)..(394): Homolog of NCBI NO: 15240773 NR Description: calnexin, putative [Arabidopsis thaliana]

SEQ ID NO: 31747 - DNA, 912 bp, Arabidopsis thaliana; identical to SEQ ID NO: 28157
  misc_feature (1)..(912): Ceres Seq. ID no. 12340195
  misc_feature: MA Experiment ID: 20000227 Result: Down-regulated in Transcription
  misc_feature: MA Experiment 20000227 PARAMETER Experiment Name: At_Root-Tips-vs-Tops_P Parameter: Tissue Value: Root Tips vs. Root Tops
  misc_feature: MA Experiment ID: 20000264 Result: Up-regulated in Transcription
  misc_feature: MA Experiment 20000264 PARAMETER Experiment Name: At_Open_Flower_P Parameter: Age (day) Value: 21
  misc_feature: MA Experiment 20000264 PARAMETER Experiment Name: At_Open_Flower_P Parameter: Plant Line Value: WS
  misc_feature: MA Experiment 20000264 PARAMETER Experiment Name: At_Open_Flower_P Parameter: Tissue Value: Open Flower vs. Whole Plant
  misc_feature: MA Experiment ID: 20000286 Result: Up-regulated in Transcription
  misc_feature: MA Experiment 20000286 PARAMETER Experiment Name: At_Open_Flower_P Parameter: Age (day) Value: 21
  misc_feature: MA Experiment 20000286 PARAMETER Experiment Name: At_Open_Flower_P Parameter: Plant Line Value: WS
  misc_feature: MA Experiment 20000286 PARAMETER Experiment Name: At_Open_Flower_P Parameter: Tissue Value: Half Open vs. Whole Plant
  misc_feature: MA Experiment ID: 20000794 Result: Up-regulated in Transcription
  misc_feature: MA Experiment 20000794 PARAMETER Experiment Name: At_Petals_P Parameter: Age (day) Value: 23-25 days
  misc_feature: MA Experiment 20000794 PARAMETER Experiment Name: At_Petals_P Parameter: Plant Line Value: WS
  misc_feature: MA Experiment 20000794 PARAMETER Experiment Name: At_Petals_P Parameter: Tissue Value: Petals vs. Whole plant
  misc_feature: MA Experiment ID: 20001557 Result: Up-regulated in Transcription
  misc_feature: MA Experiment 20001557 PARAMETER Experiment Name: At_Drought_Soil_Dry_P Parameter: Age (day) Value: 27
  misc_feature: MA Experiment 20001557 PARAMETER Experiment Name: At_Drought_Soil_Dry_P Parameter: Organism Value: A. thaliana
  misc_feature: MA Experiment 20001557 PARAMETER Experiment Name: At_Drought_Soil_Dry_P Parameter: Plant Line Value: WS
  misc_feature: MA Experiment 20001557 PARAMETER Experiment Name: At_Drought_Soil_Dry_P Parameter: Post Timepoint (hr) Value: 3
  misc_feature: MA Experiment 20001557 PARAMETER Experiment Name: At_Drought_Soil_Dry_P Parameter: Post-Treatment Value: Re-Water vs. No Drought
  misc_feature: MA Experiment 20001557 PARAMETER Experiment Name: At_Drought_Soil_Dry_P Parameter: Timepoint (day) Value: 13
  misc_feature: MA Experiment 20001557 PARAMETER Experiment Name: At_Drought_Soil_Dry_P Parameter: Treatment Value: Drought vs. No Drought

SEQ ID NO: 31748 - protein, 231 aa, Arabidopsis thaliana; identical to SEQ ID NO: 28158
  peptide (1)..(231): Ceres Seq. ID no. 12340196
  misc_feature (1)..(178): Pfam Name: Phosphoenolpyruvate carboxykinase Pfam Description: Phosphoenolpyruvate carboxykinase
  misc_feature (1)..(231): Homolog of NCBI NO: 1346771 NR Description: Phosphoenolpyruvate carboxykinase [ATP] 1
  misc_feature (1)..(231): Homolog of NCBI NO: 13785469 NR Description: phosphoenolpyruvate carboxykinase [Flaveria
  misc_feature (1)..(231): Homolog of NCBI NO: 13785467 NR Description: phosphoenolpyruvate carboxykinase [Flaveria
  misc_feature (1)..(231): Homolog of NCBI NO: 22328084 NR Description: similar to phosphoenolpyruvate carboxykinase
  misc_feature (1)..(231): Homolog of NCBI NO: 13785471 NR Description: phosphoenolpyruvate carboxykinase [Flaveria
  misc_feature (1)..(231): Homolog of NCBI NO: 17225488 NR Description: phosphoenolpyruvate carboxykinase [Lycopersicon
  misc_feature (1)..(231): Homolog of NCBI NO: 16950587 NR Description: phosphoenolpyruvate carboxykinase [Lycopersicon
  misc_feature (1)..(231): Homolog of NCBI NO: 7449799 NR Description: probable phosphoenolpyruvate carboxykinase (ATP)
  misc_feature (1)..(231): Homolog of NCBI NO: 15235730 NR Description: phosphoenolpyruvate carboxykinase (ATP) -like

SEQ ID NO: 31749 - protein, 171 aa, Arabidopsis thaliana; identical to SEQ ID NO: 28159
  peptide (1)..(171): Ceres Seq. ID no. 12340197
  misc_feature (1)..(118): Pfam Name: Phosphoenolpyruvate carboxykinase Pfam Description: Phosphoenolpyruvate carboxykinase
  misc_feature (1)..(171): Homolog of NCBI NO: 1346771 NR Description: Phosphoenolpyruvate carboxykinase [ATP] 1
  misc_feature (1)..(171): Homolog of NCBI NO: 13785469 NR Description: phosphoenolpyruvate carboxykinase [Flaveria
  misc_feature (1)..(171): Homolog of NCBI NO: 13785467 NR Description: phosphoenolpyruvate carboxykinase [Flaveria
  misc_feature (1)..(171): Homolog of NCBI NO: 22328084 NR Description: similar to phosphoenolpyruvate carboxykinase
  misc_feature (1)..(171): Homolog of NCBI NO: 13785471 NR Description: phosphoenolpyruvate carboxykinase [Flaveria
  misc_feature (1)..(171): Homolog of NCBI NO: 17225488 NR Description: phosphoenolpyruvate carboxykinase [Lycopersicon
  misc_feature (1)..(171): Homolog of NCBI NO: 16950587 NR Description: phosphoenolpyruvate carboxykinase [Lycopersicon
  misc_feature (1)..(171): Homolog of NCBI NO: 7449799 NR Description: probable phosphoenolpyruvate carboxykinase (ATP)
  misc_feature (1)..(171): Homolog of NCBI NO: 15235730 NR Description: phosphoenolpyruvate carboxykinase (ATP) -like

SEQ ID NO: 31750 - protein, 136 aa, Arabidopsis thaliana; identical to SEQ ID NO: 28160
  peptide (1)..(136): Ceres Seq. ID no. 12340198
  misc_feature (1)..(83): Pfam Name: Phosphoenolpyruvate carboxykinase Pfam Description: Phosphoenolpyruvate carboxykinase
  misc_feature (1)..(136): Homolog of NCBI NO: 1346771 NR Description: Phosphoenolpyruvate carboxykinase [ATP] 1
  misc_feature (1)..(136): Homolog of NCBI NO: 13785469 NR Description: phosphoenolpyruvate carboxykinase [Flaveria
  misc_feature (1)..(136): Homolog of NCBI NO: 13785467 NR Description: phosphoenolpyruvate carboxykinase [Flaveria
  misc_feature (1)..(136): Homolog of NCBI NO: 22328084 NR Description: similar to phosphoenolpyruvate carboxykinase
  misc_feature (1)..(136): Homolog of NCBI NO: 13785471 NR Description: phosphoenolpyruvate carboxykinase [Flaveria
  misc_feature (1)..(136): Homolog of NCBI NO: 17225488 NR Description: phosphoenolpyruvate carboxykinase [Lycopersicon
  misc_feature (1)..(136): Homolog of NCBI NO: 16950587 NR Description: phosphoenolpyruvate carboxykinase [Lycopersicon
  misc_feature (1)..(136): Homolog of NCBI NO: 7449799 NR Description: probable phosphoenolpyruvate carboxykinase (ATP)
  misc_feature (1)..(136): Homolog of NCBI NO: 15235730 NR Description: phosphoenolpyruvate carboxykinase (ATP) -like

SEQ ID NO: 31751 - DNA, 828 bp, Arabidopsis thaliana; identical to SEQ ID NO: 28161
  misc_feature (1)..(828): Ceres Seq. ID no. 12340170
  misc_feature: MA Experiment ID: 20000166 Result: Up-regulated in Transcription
  misc_feature: MA Experiment 20000166 PARAMETER Experiment Name: At_100uM_ABA_P Parameter: Age (day) Value: 14
  misc_feature: MA Experiment 20000166 PARAMETER Experiment Name: At_100uM_ABA_P Parameter: Organism Value: A. thaliana
  misc_feature: MA Experiment 20000166 PARAMETER Experiment Name: At_100uM_ABA_P Parameter: Plant Line Value: WS
  misc_feature: MA Experiment 20000166 PARAMETER Experiment Name: At_100uM_ABA_P Parameter: Timepoint (hr) Value: 1
  misc_feature: MA Experiment 20000166 PARAMETER Experiment Name: At_100uM_ABA_P Parameter: Tissue Value: Aerial
  misc_feature: MA Experiment 20000166 PARAMETER Experiment Name: At_100uM_ABA_P Parameter: Treatment Value: 100uM ABA vs. No Treatment
  misc_feature: MA Experiment ID: 20000182 Result: Up-regulated in Transcription
  misc_feature: MA Experiment 20000182 PARAMETER Experiment Name: At_2mM_SA_P Parameter: Age (day) Value: 14
  misc_feature: MA Experiment 20000182 PARAMETER Experiment Name: At_2mM_SA_P Parameter: Organism Value: A. thaliana
  misc_feature: MA Experiment 20000182 PARAMETER Experiment Name: At_2mM_SA_P Parameter: Plant Line Value: WS
  misc_feature: MA Experiment 20000182 PARAMETER Experiment Name: At_2mM_SA_P Parameter: Timepoint (hr) Value: 6
  misc_feature: MA Experiment 20000182 PARAMETER Experiment Name: At_2mM_SA_P Parameter: Tissue Value: Aerial
  misc_feature: MA Experiment 20000182 PARAMETER Experiment Name: At_2mM_SA_P Parameter: Treatment Value: 2mM SA vs. No Treatment
  misc_feature: MA Experiment ID: 20000184 Result: Down-regulated in Transcription
  misc_feature: MA Experiment 20000184 PARAMETER Experiment Name: At_Shoots__P Parameter: Age (day) Value: 7
  misc_feature: MA Experiment 20000184 PARAMETER Experiment Name: At_Shoots__P Parameter: Tissue Value: Shoots vs. Whole Plant
  misc_feature: MA Experiment ID: 20000213 Result: Up-regulated in Transcription
  misc_feature: MA Experiment 20000213 PARAMETER Experiment Name: At_4deg_Cold_P Parameter: Timepoint (hr) Value: 2
  misc_feature: MA Experiment ID: 20000264 Result: Up-regulated in Transcription
  misc_feature: MA Experiment 20000264 PARAMETER Experiment Name: At_Open_Flower_P Parameter: Age (day) Value: 21
  misc_feature: MA Experiment 20000264 PARAMETER Experiment Name: At_Open_Flower_P Parameter: Plant Line Value: WS
  misc_feature: MA Experiment 20000264 PARAMETER Experiment Name: At_Open_Flower_P Parameter: Tissue Value: Open Flower vs. Whole Plant
  misc_feature: MA Experiment ID: 20000437 Result: Up-regulated in Transcription
  misc_feature: MA Experiment 20000437 PARAMETER Experiment Name: At_Drought_P Parameter: Age (day) Value: 8
  misc_feature: MA Experiment 20000437 PARAMETER Experiment Name: At_Drought_P Parameter: Organism Value: A. thaliana
  misc_feature: MA Experiment 20000437 PARAMETER Experiment Name: At_Drought_P Parameter: Plant Line Value: WS
  misc_feature: MA Experiment 20000437 PARAMETER Experiment Name: At_Drought_P Parameter: Timepoint (hr) Value: 24
  misc_feature: MA Experiment 20000437 PARAMETER Experiment Name: At_Drought_P Parameter: Tissue Value: Whole Plant
  misc_feature: MA Experiment 20000437 PARAMETER Experiment Name: At_Drought_P Parameter: Treatment Value: Drought vs. No Drought
  misc_feature: MA Experiment ID: 20000439 Result: Up-regulated in Transcription
  misc_feature: MA Experiment 20000439 PARAMETER Experiment Name: At_Roots__P Parameter: Age (day) Value: 14 vs. 21
  misc_feature: MA Experiment 20000439 PARAMETER Experiment Name: At_Roots__P Parameter: Organism Value: A. thaliana
  misc_feature: MA Experiment 20000439 PARAMETER Experiment Name: At_Roots__P Parameter: Tissue Value: Roots vs. Whole Plant
  misc_feature: MA Experiment ID: 20000794 Result: Up-regulated in Transcription
  misc_feature: MA Experiment 20000794 PARAMETER Experiment Name: At_Petals_P Parameter: Age (day) Value: 23-25 days
  misc_feature: MA Experiment 20000794 PARAMETER Experiment Name: At_Petals_P Parameter: Plant Line Value: WS
  misc_feature: MA Experiment 20000794 PARAMETER Experiment Name: At_Petals_P Parameter: Tissue Value: Petals vs. Whole plant
  misc_feature: MA Experiment ID: 20001450 Result: Down-regulated in Transcription
  misc_feature: MA Experiment 20001450 PARAMETER Experiment Name: At_Far-red-induction_P Parameter: Age (day) Value: 7
  misc_feature: MA Experiment 20001450 PARAMETER Experiment Name: At_Far-red-induction_P Parameter: Light Value: Far-red vs. White
  misc_feature: MA Experiment 20001450 PARAMETER Experiment Name: At_Far-red-induction_P Parameter: Organism Value: A. thaliana
  misc_feature: MA Experiment 20001450 PARAMETER Experiment Name: At_Far-red-induction_P Parameter: Plant Line Value: Columbia
  misc_feature: MA Experiment 20001450 PARAMETER Experiment Name: At_Far-red-induction_P Parameter: Timepoint (hr) Value: 8
  misc_feature: MA Experiment 20001450 PARAMETER Experiment Name: At_Far-red-induction_P Parameter: Tissue Value: Whole Plant
  misc_feature: MA Experiment ID: 20001451 Result: Down-regulated in Transcription
  misc_feature: MA Experiment 20001451 PARAMETER Experiment Name: At_Far-red-induction_P Parameter: Age (day) Value: 7
  misc_feature: MA Experiment 20001451 PARAMETER Experiment Name: At_Far-red-induction_P Parameter: Light Value: Far-red vs. White
  misc_feature: MA Experiment 20001451 PARAMETER Experiment Name: At_Far-red-induction_P Parameter: Organism Value: A. thaliana
  misc_feature: MA Experiment 20001451 PARAMETER Experiment Name: At_Far-red-induction_P Parameter: Plant Line Value: Columbia
  misc_feature: MA Experiment 20001451 PARAMETER Experiment Name: At_Far-red-induction_P Parameter: Timepoint (hr) Value: 24
  misc_feature: MA Experiment 20001451 PARAMETER Experiment Name: At_Far-red-induction_P Parameter: Tissue Value: Whole Plant

SEQ ID NO: 31752 - protein, 214 aa, Arabidopsis thaliana; identical to SEQ ID NO: 28162
  peptide (1)..(214): Ceres Seq. ID no. 12340171
  misc_feature (54)..(163): Pfam Name: Glutathione peroxidase Pfam Description: Glutathione peroxidase
  misc_feature (46)..(213): Homolog of NCBI NO: 20138384 NR Description: Probable phospholipid hydroperoxide glutathione
  misc_feature (46)..(210): Homolog of NCBI NO: 6179604 NR Description: glutathione peroxidase-like protein GPX54Hv
  misc_feature (46)..(211): Homolog of NCBI NO: 21360380 NR Description: glutathione peroxidase 1 [Oryza sativa]
  misc_feature (46)..(211): Homolog of NCBI NO: 34334012 NR Description: cytosolic glutathione peroxidase [Triticum
  misc_feature (48)..(212): Homolog of NCBI NO: 20138151 NR Description: Probable phospholipid hydroperoxide glutathione
  misc_feature (46)..(211): Homolog of NCBI NO: 22268405 NR Description: putative glutathione peroxidase [Zea mays]
  misc_feature (47)..(210): Homolog of NCBI NO: 27544804 NR Description: phospholipid hydroperoxide glutathione
  misc_feature (36)..(210): Homolog of NCBI NO: 6179600 NR Description: GPX12Hv, glutathione peroxidase-like protein
  misc_feature (46)..(214): Homolog of NCBI NO: 20138157 NR Description: Probable phospholipid hydroperoxide glutathione
  misc_feature (1)..(214): Homolog of NCBI NO: 30681827 NR Description: glutathione peroxidase, putative [Arabidopsis

SEQ ID NO: 31753 - protein, 169 aa, Arabidopsis thaliana; identical to SEQ ID NO: 28163
  peptide (1)..(169): Ceres Seq. ID no. 12340172
  misc_feature (9)..(118): Pfam Name: Glutathione peroxidase Pfam Description: Glutathione peroxidase
  misc_feature (1)..(168): Homolog of NCBI NO: 20138384 NR Description: Probable phospholipid hydroperoxide glutathione
  misc_feature (1)..(165): Homolog of NCBI NO: 6179604 NR Description: glutathione peroxidase-like protein GPX54Hv
  misc_feature (1)..(166): Homolog of NCBI NO: 21360380 NR Description: glutathione peroxidase 1 [Oryza sativa]
  misc_feature (1)..(166): Homolog of NCBI NO: 34334012 NR Description: cytosolic glutathione peroxidase [Triticum
  misc_feature (3)..(167): Homolog of NCBI NO: 20138151 NR Description: Probable phospholipid hydroperoxide glutathione
  misc_feature (1)..(166): Homolog of NCBI NO: 22268405 NR Description: putative glutathione peroxidase [Zea mays]
  misc_feature (2)..(165): Homolog of NCBI NO: 27544804 NR Description: phospholipid hydroperoxide glutathione
  misc_feature (1)..(165): Homolog of NCBI NO: 6179600 NR Description: GPX12Hv, glutathione peroxidase-like protein
  misc_feature (1)..(169): Homolog of NCBI NO: 20138157 NR Description: Probable phospholipid hydroperoxide glutathione
  misc_feature (1)..(169): Homolog of NCBI NO: 30681827 NR Description: glutathione peroxidase, putative [Arabidopsis

SEQ ID NO: 31754 - DNA, 1206 bp, Arabidopsis thaliana; identical to SEQ ID NO: 28164
  misc_feature (1)..(1206): Ceres Seq. ID no. 12377569
  misc_feature: MA Experiment ID: 108595 Result: Down-regulated in Transcription
  misc_feature: MA Experiment 108595 PARAMETER Experiment Name: At_Ler-pi_Ovule_cDNA_P Parameter: Plant Line Value: null
  misc_feature: MA Experiment ID: 108668 Result: Down-regulated in Transcription
  misc_feature: MA Experiment 108668 PARAMETER Experiment Name: At_2mM_SA_cDNA_P Parameter: Plant Line Value: WS
  misc_feature: MA Experiment 108668 PARAMETER Experiment Name: At_2mM_SA_cDNA_P Parameter: Timepoint (hr) Value: 6
  misc_feature: MA Experiment 108668 PARAMETER Experiment Name: At_2mM_SA_cDNA_P Parameter: Treatment Value: 2mM SA vs. No Treatment
  misc_feature: MA Experiment ID: 20000184 Result: Up-regulated in Transcription
  misc_feature: MA Experiment 20000184 PARAMETER Experiment Name: At_Shoots__P Parameter: Age (day) Value: 7
  misc_feature: MA Experiment 20000184 PARAMETER Experiment Name: At_Shoots__P Parameter: Tissue Value: Shoots vs. Whole Plant
  misc_feature: MA Experiment ID: 20000185 Result: Down-regulated in Transcription
  misc_feature: MA Experiment 20000185 PARAMETER Experiment Name: At_Roots__P Parameter: Age (day) Value: 7 vs. 21
  misc_feature: MA Experiment 20000185 PARAMETER Experiment Name: At_Roots__P Parameter: Organism Value: A. thaliana
  misc_feature: MA Experiment 20000185 PARAMETER Experiment Name: At_Roots__P Parameter: Tissue Value: Roots vs. Whole Plant
  misc_feature: MA Experiment ID: 20000234 Result: Up-regulated in Transcription
  misc_feature: MA Experiment 20000234 PARAMETER Experiment Name: At_Siliques_P Parameter: Age (day) Value: 21
  misc_feature: MA Experiment 20000234 PARAMETER Experiment Name: At_Siliques_P Parameter: Organism Value: A. thaliana
  misc_feature: MA Experiment 20000234 PARAMETER Experiment Name: At_Siliques_P Parameter: Plant Line Value: WS
  misc_feature: MA Experiment 20000234 PARAMETER Experiment Name: At_Siliques_P Parameter: Tissue Value: Less Than 5mm Siliques vs. Whole Plant
  misc_feature: MA Experiment ID: 20000437 Result: Down-regulated in Transcription
  misc_feature: MA Experiment 20000437 PARAMETER Experiment Name: At_Drought_P Parameter: Age (day) Value: 8
  misc_feature: MA Experiment 20000437 PARAMETER Experiment Name: At_Drought_P Parameter: Organism Value: A. thaliana
  misc_feature: MA Experiment 20000437 PARAMETER Experiment Name: At_Drought_P Parameter: Plant Line Value: WS
  misc_feature: MA Experiment 20000437 PARAMETER Experiment Name: At_Drought_P Parameter: Timepoint (hr) Value: 24
  misc_feature: MA Experiment 20000437 PARAMETER Experiment Name: At_Drought_P Parameter: Tissue Value: Whole Plant
  misc_feature: MA Experiment 20000437 PARAMETER Experiment Name: At_Drought_P Parameter: Treatment Value: Drought vs. No Drought
  misc_feature: MA Experiment ID: 20000438 Result: Up-regulated in Transcription
  misc_feature: MA Experiment 20000438 PARAMETER Experiment Name: At_Shoots__P Parameter: Age (day) Value: 14
  misc_feature: MA Experiment 20000438 PARAMETER Experiment Name: At_Shoots__P Parameter: Tissue Value: Shoots vs. Whole Plant
  misc_feature: MA Experiment ID: 20000439 Result: Down-regulated in Transcription
  misc_feature: MA Experiment 20000439 PARAMETER Experiment Name: At_Roots__P Parameter: Age (day) Value: 14 vs. 21
  misc_feature: MA Experiment 20000439 PARAMETER Experiment Name: At_Roots__P Parameter: Organism Value: A. thaliana
  misc_feature: MA Experiment 20000439 PARAMETER Experiment Name: At_Roots__P Parameter: Tissue Value: Roots vs. Whole Plant
  misc_feature: MA Experiment ID: 20000495 Result: Up-regulated in Transcription
  misc_feature: MA Experiment 20000495 PARAMETER Experiment Name: At_Guard_Cells_P Parameter: Harvest Date Value: 8/2/2002
  misc_feature: MA Experiment 20000495 PARAMETER Experiment Name: At_Guard_Cells_P Parameter: Organism Value: A. thaliana
  misc_feature: MA Experiment 20000495 PARAMETER Experiment Name: At_Guard_Cells_P Parameter: Tissue Value: Guard Cells vs. Leaves
  misc_feature: MA Experiment ID: 20001451 Result: Up-regulated in Transcription
  misc_feature: MA Experiment 20001451 PARAMETER Experiment Name: At_Far-red-induction_P Parameter: Age (day) Value: 7
  misc_feature: MA Experiment 20001451 PARAMETER Experiment Name: At_Far-red-induction_P Parameter: Light Value: Far-red vs. White
  misc_feature: MA Experiment 20001451 PARAMETER Experiment Name: At_Far-red-induction_P Parameter: Organism Value: A. thaliana
  misc_feature: MA Experiment 20001451 PARAMETER Experiment Name: At_Far-red-induction_P Parameter: Plant Line Value: Columbia
  misc_feature: MA Experiment 20001451 PARAMETER Experiment Name: At_Far-red-induction_P Parameter: Timepoint (hr) Value: 24
  misc_feature: MA Experiment 20001451 PARAMETER Experiment Name: At_Far-red-induction_P Parameter: Tissue Value: Whole Plant
  misc_feature: MA Experiment ID: 20001757 Result: Up-regulated in Transcription
  misc_feature: MA Experiment 20001757 PARAMETER Experiment Name: At_50mM_NH4NO3_L-to-H_P Parameter: Timepoint (hr) Value: 6
  misc_feature: MA Experiment 20001757 PARAMETER Experiment Name: At_50mM_NH4NO3_L-to-H_P Parameter: Tissue Value: Leaf
  misc_feature: MA Experiment 20001757 PARAMETER Experiment Name: At_50mM_NH4NO3_L-to-H_P Parameter: Treatment Value: 50mM NH4NO3 vs 100mM Mannitol

SEQ ID NO: 31755 - protein, 309 aa, Arabidopsis thaliana; identical to SEQ ID NO: 28165
  peptide (1)..(309): Ceres Seq. ID no. 12377570
  misc_feature (226)..(297): Pfam Name: RNA recognition motif. (a.k.a. RRM, RBD, or RNP domain) Pfam Description: RNA recognition motif. (a.k.a. RRM, RBD, or RNP
  misc_feature (21)..(309): Homolog of NCBI NO: 1350820 NR Description: 30 kDa ribonucleoprotein, chloroplast precursor
  misc_feature (21)..(309): Homolog of NCBI NO: 12230584 NR Description: 29 kDa ribonucleoprotein A, chloroplast precursor
  misc_feature (196)..(309): Homolog of NCBI NO: 681904 NR Description: cp29 [Arabidopsis thaliana]
  misc_feature (31)..(222): Homolog of NCBI NO: 681904 NR Description: cp29 [Arabidopsis thaliana]
  misc_feature (196)..(309): Homolog of NCBI NO: 30693824 NR Description: 29 kDa ribonucleoprotein, chloroplast
  misc_feature (21)..(222): Homolog of NCBI NO: 30693824 NR Description: 29 kDa ribonucleoprotein, chloroplast
  misc_feature (196)..(309): Homolog of NCBI NO: 15231817 NR Description: 29 kDa ribonucleoprotein, chloroplast precursor
  misc_feature (21)..(222): Homolog of NCBI NO: 15231817 NR Description: 29 kDa ribonucleoprotein, chloroplast precursor
  misc_feature (21)..(309): Homolog of NCBI NO: 15228102 NR Description: chloroplast RNA-binding protein cp29, putative
  misc_feature (21)..(309): Homolog of NCBI NO: 21617920 NR Description: putative RNA-binding protein [Arabidopsis

SEQ ID NO: 31756 - protein, 289 aa, Arabidopsis thaliana; identical to SEQ ID NO: 28166
  peptide (1)..(289): Ceres Seq. ID no. 12377571
  misc_feature (206)..(277): Pfam Name: RNA recognition motif. (a.k.a. RRM, RBD, or RNP domain) Pfam Description: RNA recognition motif. (a.k.a. RRM, RBD, or RNP
  misc_feature (1)..(289): Homolog of NCBI NO: 1350820 NR Description: 30 kDa ribonucleoprotein, chloroplast precursor
  misc_feature (1)..(289): Homolog of NCBI NO: 12230584 NR Description: 29 kDa ribonucleoprotein A, chloroplast precursor
  misc_feature (176)..(289): Homolog of NCBI NO: 681904 NR Description: cp29 [Arabidopsis thaliana]
  misc_feature (11)..(202): Homolog of NCBI NO: 681904 NR Description: cp29 [Arabidopsis thaliana]
  misc_feature (176)..(289): Homolog of NCBI NO: 30693824 NR Description: 29 kDa ribonucleoprotein, chloroplast
  misc_feature (1)..(202): Homolog of NCBI NO: 30693824 NR Description: 29 kDa ribonucleoprotein, chloroplast
  misc_feature (176)..(289): Homolog of NCBI NO: 15231817 NR Description: 29 kDa ribonucleoprotein, chloroplast precursor
  misc_feature (1)..(202): Homolog of NCBI NO: 15231817 NR Description: 29 kDa ribonucleoprotein, chloroplast precursor
  misc_feature (1)..(289): Homolog of NCBI NO: 15228102 NR Description: chloroplast RNA-binding protein cp29, putative
  misc_feature (1)..(289): Homolog of NCBI NO: 21617920 NR Description: putative RNA-binding protein [Arabidopsis

SEQ ID NO: 31757 - protein, 171 aa, Arabidopsis thaliana; identical to SEQ ID NO: 28167
  peptide (1)..(171): Ceres Seq. ID no. 12377572
  misc_feature (88)..(159): Pfam Name: RNA recognition motif. (a.k.a. RRM, RBD, or RNP domain) Pfam Description: RNA recognition motif. (a.k.a. RRM, RBD, or RNP
  misc_feature (1)..(171): Homolog of NCBI NO: 1350820 NR Description: 30 kDa ribonucleoprotein, chloroplast precursor
  misc_feature (1)..(171): Homolog of NCBI NO: 12230584 NR Description: 29 kDa ribonucleoprotein A, chloroplast precursor
  misc_feature (58)..(171): Homolog of NCBI NO: 681904 NR Description: cp29 [Arabidopsis thaliana]
  misc_feature (1)..(84): Homolog of NCBI NO: 681904 NR Description: cp29 [Arabidopsis thaliana]
  misc_feature (58)..(171): Homolog of NCBI NO: 30693824 NR Description: 29 kDa ribonucleoprotein, chloroplast
  misc_feature (1)..(84): Homolog of NCBI NO: 30693824 NR Description: 29 kDa ribonucleoprotein, chloroplast
  misc_feature (58)..(171): Homolog of NCBI NO: 15231817 NR Description: 29 kDa ribonucleoprotein, chloroplast precursor
  misc_feature (1)..(84): Homolog of NCBI NO: 15231817 NR Description: 29 kDa ribonucleoprotein, chloroplast precursor
  misc_feature (1)..(171): Homolog of NCBI NO: 15228102 NR Description: chloroplast RNA-binding protein cp29, putative
  misc_feature (1)..(171): Homolog of NCBI NO: 21617920 NR Description: putative RNA-binding protein [Arabidopsis

SEQ ID NO: 31758 - DNA, 1037 bp, Arabidopsis thaliana; identical to SEQ ID NO: 28168
  misc_feature (1)..(1037): Ceres Seq. ID no. 12396853
  misc_feature: MA Experiment ID: 108461 Result: Down-regulated in Transcription
  misc_feature: MA Experiment 108461 PARAMETER Experiment Name: At_Germinating_Seeds_cDNA_P Parameter: Age (day) Value: 1 vs. 0
  misc_feature: MA Experiment 108461 PARAMETER Experiment Name: At_Germinating_Seeds_cDNA_P Parameter: Tissue Value: Germinating Seeds
  misc_feature: MA Experiment ID: 108462 Result: Down-regulated in Transcription
  misc_feature: MA Experiment 108462 PARAMETER Experiment Name: At_Germinating_Seeds_cDNA_P Parameter: Age (day) Value: 2 vs. 0
  misc_feature: MA Experiment 108462 PARAMETER Experiment Name: At_Germinating_Seeds_cDNA_P Parameter: Tissue Value: Germinating Seeds
  misc_feature: MA Experiment ID: 108463 Result: Down-regulated in Transcription
  misc_feature: MA Experiment 108463 PARAMETER Experiment Name: At_Germinating_Seeds_cDNA_P Parameter: Age (day) Value: 3 vs. 0
  misc_feature: MA Experiment 108463 PARAMETER Experiment Name: At_Germinating_Seeds_cDNA_P Parameter: Tissue Value: Germinating Seeds
  misc_feature: MA Experiment ID: 108488 Result: Down-regulated in Transcription
  misc_feature: MA Experiment ID: 108501 Result: Up-regulated in Transcription
  misc_feature: MA Experiment 108501 PARAMETER Experiment Name: At_ap2_floral_buds_cDNA_P Parameter: Plant Line Value: ap2 (Ler.)
  misc_feature: MA Experiment 108501 PARAMETER Experiment Name: At_ap2_floral_buds_cDNA_P Parameter: Tissue Value: Closed Flower
  misc_feature: MA Experiment ID: 108595 Result: Up-regulated in Transcription
  misc_feature: MA Experiment 108595 PARAMETER Experiment Name: At_Ler-pi_Ovule_cDNA_P Parameter: Plant Line Value: null
  misc_feature: MA Experiment ID: 20000070 Result: Up-regulated in Transcription
  misc_feature: MA Experiment 20000070 PARAMETER Experiment Name: At_100uM_ABA_Mutants_cDNA_P Parameter: Plant Line Value: CS24
  misc_feature: MA Experiment 20000070 PARAMETER Experiment Name: At_100uM_ABA_Mutants_cDNA_P Parameter: Timepoint (hr) Value: 6
  misc_feature: MA Experiment 20000070 PARAMETER Experiment Name: At_100uM_ABA_Mutants_cDNA_P Parameter: Tissue Value: Aerial
  misc_feature: MA Experiment 20000070 PARAMETER Experiment Name: At_100uM_ABA_Mutants_cDNA_P Parameter: Treatment Value: 100uM ABA vs. No Treatment
  misc_feature: MA Experiment ID: 20000071 Result: Up-regulated in Transcription
  misc_feature: MA Experiment 20000071 PARAMETER Experiment Name: At_100uM_ABA_Mutants_cDNA_P Parameter: Plant Line Value: CS8104
  misc_feature: MA Experiment 20000071 PARAMETER Experiment Name: At_100uM_ABA_Mutants_cDNA_P Parameter: Timepoint (hr) Value: 6
  misc_feature: MA Experiment 20000071 PARAMETER Experiment Name: At_100uM_ABA_Mutants_cDNA_P Parameter: Tissue Value: Aerial
  misc_feature: MA Experiment 20000071 PARAMETER Experiment Name: At_100uM_ABA_Mutants_cDNA_P Parameter: Treatment Value: 100uM ABA vs. No Treatment
  misc_feature: MA Experiment ID: 20000072 Result: Up-regulated in Transcription
  misc_feature: MA Experiment 20000072 PARAMETER Experiment Name: At_100uM_ABA_Mutants_cDNA_P Parameter: Plant Line Value: CS8105
  misc_feature: MA Experiment 20000072 PARAMETER Experiment Name: At_100uM_ABA_Mutants_cDNA_P Parameter: Timepoint (hr) Value: 6
  misc_feature: MA Experiment 20000072 PARAMETER Experiment Name: At_100uM_ABA_Mutants_cDNA_P Parameter: Tissue Value: Aerial
  misc_feature: MA Experiment 20000072 PARAMETER Experiment Name: At_100uM_ABA_Mutants_cDNA_P Parameter: Treatment Value: 100uM ABA vs. No Treatment
  misc_feature: MA Experiment ID: 20000086 Result: Up-regulated in Transcription
  misc_feature: MA Experiment 20000086 PARAMETER Experiment Name: At_100uM_ABA_Mutants_cDNA_P Parameter: Plant Line Value: CS22
  misc_feature: MA Experiment 20000086 PARAMETER Experiment Name: At_100uM_ABA_Mutants_cDNA_P Parameter: Timepoint (hr) Value: 6
  misc_feature: MA Experiment 20000086 PARAMETER Experiment Name: At_100uM_ABA_Mutants_cDNA_P Parameter: Tissue Value: Aerial
  misc_feature: MA Experiment 20000086 PARAMETER Experiment Name: At_100uM_ABA_Mutants_cDNA_P Parameter: Treatment Value: 100uM ABA vs. No Treatment
  misc_feature: MA Experiment ID: 20000087 Result: Up-regulated in Transcription
  misc_feature: MA Experiment 20000087 PARAMETER Experiment Name: At_100uM_ABA_Mutants_cDNA_P Parameter: Plant Line Value: WS
  misc_feature: MA Experiment 20000087 PARAMETER Experiment Name: At_100uM_ABA_Mutants_cDNA_P Parameter: Timepoint (hr) Value: 6
  misc_feature: MA Experiment 20000087 PARAMETER Experiment Name: At_100uM_ABA_Mutants_cDNA_P Parameter: Tissue Value: Aerial
  misc_feature: MA Experiment 20000087 PARAMETER Experiment Name: At_100uM_ABA_Mutants_cDNA_P Parameter: Treatment Value: 100uM ABA vs. No Treatment
  misc_feature: MA Experiment ID: 20000112 Result: Up-regulated in Transcription
  misc_feature: MA Experiment 20000112 PARAMETER Experiment Name: At_42deg_Heat_cDNA_P Parameter: Temperature (deg C) Value: 42 vs. 22
  misc_feature: MA Experiment 20000112 PARAMETER Experiment Name: At_42deg_Heat_cDNA_P Parameter: Timepoint (hr) Value: 2
  misc_feature: MA Experiment 20000112 PARAMETER Experiment Name: At_42deg_Heat_cDNA_P Parameter: Tissue Value: Aerial
  misc_feature: MA Experiment ID: 20000117 Result: Up-regulated in Transcription
  misc_feature: MA Experiment 20000117 PARAMETER Experiment Name: At_100uM_ABA_Mutants_cDNA_P Parameter: Plant Line Value: Columbia
  misc_feature: MA Experiment 20000117 PARAMETER Experiment Name: At_100uM_ABA_Mutants_cDNA_P Parameter: Timepoint (hr) Value: 6
  misc_feature: MA Experiment 20000117 PARAMETER Experiment Name: At_100uM_ABA_Mutants_cDNA_P Parameter: Tissue Value: Aerial
  misc_feature: MA Experiment 20000117 PARAMETER Experiment Name: At_100uM_ABA_Mutants_cDNA_P Parameter: Treatment Value: 100uM ABA vs. No Treatment
  misc_feature: MA Experiment ID: 20000180 Result: Down-regulated in Transcription
  misc_feature: MA Experiment 20000180 PARAMETER Experiment Name: At_Germinating_Seeds_P Parameter: Age (hr) Value: 24 vs. 0
  misc_feature: MA Experiment 20000180 PARAMETER Experiment Name: At_Germinating_Seeds_P Parameter: Tissue Value: Germinating Seeds
  misc_feature: MA Experiment ID: 20000234 Result: Up-regulated in Transcription
  misc_feature: MA Experiment 20000234 PARAMETER Experiment Name: At_Siliques_P Parameter: Age (day) Value: 21
  misc_feature: MA Experiment 20000234 PARAMETER Experiment Name: At_Siliques_P Parameter: Organism Value: A. thaliana
  misc_feature: MA Experiment 20000234 PARAMETER Experiment Name: At_Siliques_P Parameter: Plant Line Value: WS
  misc_feature: MA Experiment 20000234 PARAMETER Experiment Name: At_Siliques_P Parameter: Tissue Value: Less Than 5mm Siliques vs. Whole Plant
  misc_feature: MA Experiment ID: 20000235 Result: Up-regulated in Transcription
  misc_feature: MA Experiment 20000235 PARAMETER Experiment Name: At_Siliques_P Parameter: Age (day) Value: 21
  misc_feature: MA Experiment 20000235 PARAMETER Experiment Name: At_Siliques_P Parameter: Organism Value: A. thaliana
  misc_feature: MA Experiment 20000235 PARAMETER Experiment Name: At_Siliques_P Parameter: Plant Line Value: WS
  misc_feature: MA Experiment 20000235 PARAMETER Experiment Name: At_Siliques_P Parameter: Tissue Value: 5-10mm Siliques vs. Whole Plant
  misc_feature: MA Experiment ID: 20000264 Result: Up-regulated in Transcription
  misc_feature: MA Experiment 20000264 PARAMETER Experiment Name: At_Open_Flower_P Parameter: Age (day) Value: 21
  misc_feature: MA Experiment 20000264 PARAMETER Experiment Name: At_Open_Flower_P Parameter: Plant Line Value: WS
  misc_feature: MA Experiment 20000264 PARAMETER Experiment Name: At_Open_Flower_P Parameter: Tissue Value: Open Flower vs. Whole Plant
  misc_feature: MA Experiment ID: 20000286 Result: Up-regulated in Transcription
  misc_feature: MA Experiment 20000286 PARAMETER Experiment Name: At_Open_Flower_P Parameter: Age (day) Value: 21
  misc_feature: MA Experiment 20000286 PARAMETER Experiment Name: At_Open_Flower_P Parameter: Plant Line Value: WS
  misc_feature: MA Experiment 20000286 PARAMETER Experiment Name: At_Open_Flower_P Parameter: Tissue Value: Half Open vs. Whole Plant
  misc_feature: MA Experiment ID: 20000437 Result: Up-regulated in Transcription
  misc_feature: MA Experiment 20000437 PARAMETER Experiment Name: At_Drought_P Parameter: Age (day) Value: 8
  misc_feature: MA Experiment 20000437 PARAMETER Experiment Name: At_Drought_P Parameter: Organism Value: A. thaliana
  misc_feature: MA Experiment 20000437 PARAMETER Experiment Name: At_Drought_P Parameter: Plant Line Value: WS
  misc_feature: MA Experiment 20000437 PARAMETER Experiment Name: At_Drought_P Parameter: Timepoint (hr) Value: 24
  misc_feature: MA Experiment 20000437 PARAMETER Experiment Name: At_Drought_P Parameter: Tissue Value: Whole Plant
  misc_feature: MA Experiment 20000437 PARAMETER Experiment Name: At_Drought_P Parameter: Treatment Value: Drought vs. No Drought
  misc_feature: MA Experiment ID: 20000527 Result: Down-regulated in Transcription
  misc_feature: MA Experiment 20000527 PARAMETER Experiment Name: At_10percent_PEG_P Parameter: Age (day) Value: 20
  misc_feature: MA Experiment 20000527 PARAMETER Experiment Name: At_10percent_PEG_P Parameter: Organism Value: A. thaliana
  misc_feature: MA Experiment 20000527 PARAMETER Experiment Name: At_10percent_PEG_P Parameter: Plant Line Value: WS
  misc_feature: MA Experiment 20000527 PARAMETER Experiment Name: At_10percent_PEG_P Parameter: Timepoint (day) Value: 20
  misc_feature: MA Experiment 20000527 PARAMETER Experiment Name: At_10percent_PEG_P Parameter: Tissue Value: Whole Plant
  misc_feature: MA Experiment 20000527 PARAMETER Experiment Name: At_10percent_PEG_P Parameter: Treatment Value: 10percent PEG vs. No Treatment
  misc_feature: MA Experiment ID: 20000794 Result: Up-regulated in Transcription
  misc_feature: MA Experiment 20000794 PARAMETER Experiment Name: At_Petals_P Parameter: Age (day) Value: 23-25 days
  misc_feature: MA Experiment 20000794 PARAMETER Experiment Name: At_Petals_P Parameter: Plant Line Value: WS
  misc_feature: MA Experiment 20000794 PARAMETER Experiment Name: At_Petals_P Parameter: Tissue Value: Petals vs. Whole plant
  misc_feature: MA Experiment ID: 20001556 Result: Up-regulated in Transcription
  misc_feature: MA Experiment 20001556 PARAMETER Experiment Name: At_Drought_Soil_Dry_P Parameter: Age (day) Value: 26
  misc_feature: MA Experiment 20001556 PARAMETER Experiment Name: At_Drought_Soil_Dry_P Parameter: Organism Value: A. thaliana
  misc_feature: MA Experiment 20001556 PARAMETER Experiment Name: At_Drought_Soil_Dry_P Parameter: Plant Line Value: WS
  misc_feature: MA Experiment 20001556 PARAMETER Experiment Name: At_Drought_Soil_Dry_P Parameter: Post Timepoint (hr) Value: None
  misc_feature: MA Experiment 20001556 PARAMETER Experiment Name: At_Drought_Soil_Dry_P Parameter: Post-Treatment Value: None
  misc_feature: MA Experiment 20001556 PARAMETER Experiment Name: At_Drought_Soil_Dry_P Parameter: Timepoint (day) Value: 12
  misc_feature: MA Experiment 20001556 PARAMETER Experiment Name: At_Drought_Soil_Dry_P Parameter: Treatment Value: Drought vs. No Drought
  misc_feature: MA Experiment ID: 20001904 Result: Up-regulated in Transcription
  misc_feature: MA Experiment 20001904 PARAMETER Experiment Name: At_Drought_Reproduction_P Parameter: Age (day) Value: 37
  misc_feature: MA Experiment 20001904 PARAMETER Experiment Name: At_Drought_Reproduction_P Parameter: Organism Value: A. thaliana
  misc_feature: MA Experiment 20001904 PARAMETER Experiment Name: At_Drought_Reproduction_P Parameter: Plant Line Value: WS
  misc_feature: MA Experiment 20001904 PARAMETER Experiment Name: At_Drought_Reproduction_P Parameter: Timepoint (day) Value: 7
  misc_feature: MA Experiment 20001904 PARAMETER Experiment Name: At_Drought_Reproduction_P Parameter: Tissue Value: Rosettes
  misc_feature: MA Experiment 20001904 PARAMETER Experiment Name: At_Drought_Reproduction_P Parameter: Treatment Value: Drought vs. No Drought
  misc_feature: MA Experiment ID: 20001905 Result: Up-regulated in Transcription
  misc_feature: MA Experiment 20001905 PARAMETER Experiment Name: At_Drought_Reproduction_P Parameter: Age (day) Value: 40
  misc_feature: MA Experiment 20001905 PARAMETER Experiment Name: At_Drought_Reproduction_P Parameter: Organism Value: A. thaliana
  misc_feature: MA Experiment 20001905 PARAMETER Experiment Name: At_Drought_Reproduction_P Parameter: Plant Line Value: WS
  misc_feature: MA Experiment 20001905 PARAMETER Experiment Name: At_Drought_Reproduction_P Parameter: Timepoint (day) Value: 10
  misc_feature: MA Experiment 20001905 PARAMETER Experiment Name: At_Drought_Reproduction_P Parameter: Tissue Value: Rosettes
  misc_feature: MA Experiment 20001905 PARAMETER Experiment Name: At_Drought_Reproduction_P Parameter: Treatment Value: Drought vs. No Drought
  misc_feature: MA Experiment ID: 20001911 Result: Up-regulated in Transcription
  misc_feature: MA Experiment 20001911 PARAMETER Experiment Name: At_Drought_Reproduction_P Parameter: Age (day) Value: 40
  misc_feature: MA Experiment 20001911 PARAMETER Experiment Name: At_Drought_Reproduction_P Parameter: Organism Value: A. thaliana
  misc_feature: MA Experiment 20001911 PARAMETER Experiment Name: At_Drought_Reproduction_P Parameter: Plant Line Value: WS
  misc_feature: MA Experiment 20001911 PARAMETER Experiment Name: At_Drought_Reproduction_P Parameter: Timepoint (day) Value: 10
  misc_feature: MA Experiment 20001911 PARAMETER Experiment Name: At_Drought_Reproduction_P Parameter: Tissue Value: Flowers
  misc_feature: MA Experiment 20001911 PARAMETER Experiment Name: At_Drought_Reproduction_P Parameter: Treatment Value: Drought vs. No Drought

SEQ ID NO: 31759 - protein, 277 aa, Arabidopsis thaliana; identical to SEQ ID NO: 28169
  peptide (1)..(277): Ceres Seq. ID no. 12396854
  misc_feature (34)..(218): Pfam Name: Glycosyl hydrolases family 16 Pfam Description: Glycosyl hydrolases family 16
  misc_feature (32)..(273): Homolog of NCBI NO: 3986172 NR Description: EXGT1 [Pisum sativum]
  misc_feature (7)..(273): Homolog of NCBI NO: 7447416 NR Description: xyloglucan endo-1,4-beta-D-glucanase (EC 3.2.1.-)
  misc_feature (32)..(273): Homolog of NCBI NO: 11138242 NR Description: xyloglucan endotransglycosylase [Pisum sativum]
  misc_feature (9)..(273): Homolog of NCBI NO: 15240733 NR Description: xyloglucan endotransglycosylase (EXGT-A4)
  misc_feature (8)..(273): Homolog of NCBI NO: 38605518 NR Description: Putative xyloglucan
  misc_feature (8)..(273): Homolog of NCBI NO: 22328589 NR Description: xyloglucan endotransglycosylase, putative
  misc_feature (15)..(273): Homolog of NCBI NO: 15235587 NR Description: xyloglucan endotransglycosylase, putative
  misc_feature (8)..(273): Homolog of NCBI NO: 15230246 NR Description: xyloglucan endotransglycosylase, putative
  misc_feature (11)..(277): Homolog of NCBI NO: 38605515 NR Description: Probable xyloglucan
  misc_feature (1)..(277): Homolog of NCBI NO: 18408662 NR Description: xyloglucan endotransglycosylase, putative

SEQ ID NO: 31760 - protein, 267 aa, Arabidopsis thaliana; identical to SEQ ID NO: 28170
  peptide (1)..(267): Ceres Seq. ID no. 12396855
  misc_feature (24)..(208): Pfam Name: Glycosyl hydrolases family 16 Pfam Description: Glycosyl hydrolases family 16
  misc_feature (22)..(263): Homolog of NCBI NO: 3986172 NR Description: EXGT1 [Pisum sativum]
  misc_feature (1)..(263): Homolog of NCBI NO: 7447416 NR Description: xyloglucan endo-1,4-beta-D-glucanase (EC 3.2.1.-)
  misc_feature (22)..(263): Homolog of NCBI NO: 11138242 NR Description: xyloglucan endotransglycosylase [Pisum sativum]
  misc_feature (1)..(263): Homolog of NCBI NO: 15240733 NR Description: xyloglucan endotransglycosylase (EXGT-A4)
  misc_feature (1)..(263): Homolog of NCBI NO: 38605518 NR Description: Putative xyloglucan
  misc_feature (1)..(263): Homolog of NCBI NO: 22328589 NR Description: xyloglucan endotransglycosylase, putative
  misc_feature (5)..(263): Homolog of NCBI NO: 15235587 NR Description: xyloglucan endotransglycosylase, putative
  misc_feature (1)..(263): Homolog of NCBI NO: 15230246 NR Description: xyloglucan endotransglycosylase, putative
  misc_feature (1)..(267): Homolog of NCBI NO: 38605515 NR Description: Probable xyloglucan
  misc_feature (1)..(267): Homolog of NCBI NO: 18408662 NR Description: xyloglucan endotransglycosylase, putative

SEQ ID NO: 31761 - protein, 265 aa, Arabidopsis thaliana; identical to SEQ ID NO: 28171
  peptide (1)..(265): Ceres Seq. ID no. 12396856
  misc_feature (22)..(206): Pfam Name: Glycosyl hydrolases family 16 Pfam Description: Glycosyl hydrolases family 16
  misc_feature (20)..(261): Homolog of NCBI NO: 3986172 NR Description: EXGT1 [Pisum sativum]
  misc_feature (1)..(261): Homolog of NCBI NO: 7447416 NR Description: xyloglucan endo-1,4-beta-D-glucanase (EC 3.2.1.-)
  misc_feature (20)..(261): Homolog of NCBI NO: 11138242 NR Description: xyloglucan endotransglycosylase [Pisum sativum]
  misc_feature (1)..(261): Homolog of NCBI NO: 15240733 NR Description: xyloglucan endotransglycosylase (EXGT-A4)
  misc_feature (1)..(261): Homolog of NCBI NO: 38605518 NR Description: Putative xyloglucan
  misc_feature (1)..(261): Homolog of NCBI NO: 22328589 NR Description: xyloglucan endotransglycosylase, putative
  misc_feature (3)..(261): Homolog of NCBI NO: 15235587 NR Description: xyloglucan endotransglycosylase, putative
  misc_feature (1)..(261): Homolog of NCBI NO: 15230246 NR Description: xyloglucan endotransglycosylase, putative
  misc_feature (1)..(265): Homolog of NCBI NO: 38605515 NR Description: Probable xyloglucan
  misc_feature (1)..(265): Homolog of NCBI NO: 18408662 NR Description: xyloglucan endotransglycosylase, putative

SEQ ID NO: 31762 - DNA, 1297 bp, Arabidopsis thaliana; identical to SEQ ID NO: 28172
  misc_feature (1)..(1297): Ceres Seq. ID no. 12422819
  misc_feature: MA Experiment ID: 108462 Result: Down-regulated in Transcription
  misc_feature: MA Experiment 108462 PARAMETER Experiment Name: At_Germinating_Seeds_cDNA_P Parameter: Age (day) Value: 2 vs. 0
  misc_feature: MA Experiment 108462 PARAMETER Experiment Name: At_Germinating_Seeds_cDNA_P Parameter: Tissue Value: Germinating Seeds
  misc_feature: MA Experiment ID: 108463 Result: Down-regulated in Transcription
  misc_feature: MA Experiment 108463 PARAMETER Experiment Name: At_Germinating_Seeds_cDNA_P Parameter: Age (day) Value: 3 vs. 0
  misc_feature: MA Experiment 108463 PARAMETER Experiment Name: At_Germinating_Seeds_cDNA_P Parameter: Tissue Value: Germinating Seeds
  misc_feature: MA Experiment ID: 108464 Result: Down-regulated in Transcription
  misc_feature: MA Experiment 108464 PARAMETER Experiment Name: At_Germinating_Seeds_cDNA_P Parameter: Age (day) Value: 4 vs. 0
  misc_feature: MA Experiment 108464 PARAMETER Experiment Name: At_Germinating_Seeds_cDNA_P Parameter: Tissue Value: Germinating Seeds
  misc_feature: MA Experiment ID: 108488 Result: Up-regulated in Transcription
  misc_feature: MA Experiment ID: 108569 Result: Up-regulated in Transcription
  misc_feature: MA Experiment 108569 PARAMETER Experiment Name: At_0.001%_MeJA__cDNA_P Parameter: Timepoint (hr) Value: 6
  misc_feature: MA Experiment 108569 PARAMETER Experiment Name: At_0.001%_MeJA__cDNA_P Parameter: Tissue Value: Aerial
  misc_feature: MA Experiment 108569 PARAMETER Experiment Name: At_0.001%_MeJA__cDNA_P Parameter: Treatment Value: 0.001% MeJA vs. No Treatment
  misc_feature: MA Experiment ID: 108572 Result: Down-regulated in Transcription
  misc_feature: MA Experiment 108572 PARAMETER Experiment Name: At_Drought_cDNA_P Parameter: Timepoint (hr) Value: 1
  misc_feature: MA Experiment 108572 PARAMETER Experiment Name: At_Drought_cDNA_P Parameter: Tissue Value: Aerial
  misc_feature: MA Experiment 108572 PARAMETER Experiment Name: At_Drought_cDNA_P Parameter: Treatment Value: Drought vs. No Drought
  misc_feature: MA Experiment ID: 108577 Result: Up-regulated in Transcription
  misc_feature: MA Experiment 108577 PARAMETER Experiment Name: At_42deg_Heat_cDNA_P Parameter: Temperature (deg C) Value: 42 vs. 22
  misc_feature: MA Experiment 108577 PARAMETER Experiment Name: At_42deg_Heat_cDNA_P Parameter: Timepoint (hr) Value: 6
  misc_feature: MA Experiment 108577 PARAMETER Experiment Name: At_42deg_Heat_cDNA_P Parameter: Tissue Value: Aerial
  misc_feature: MA Experiment ID: 108579 Result: Up-regulated in Transcription
  misc_feature: MA Experiment 108579 PARAMETER Experiment Name: At_4deg_Cold_cDNA_P Parameter: Temperature (deg C) Value: 4 vs. 22
  misc_feature: MA Experiment 108579 PARAMETER Experiment Name: At_4deg_Cold_cDNA_P Parameter: Timepoint (hr) Value: 6
  misc_feature: MA Experiment 108579 PARAMETER Experiment Name: At_4deg_Cold_cDNA_P Parameter: Tissue Value: Aerial
  misc_feature: MA Experiment ID: 108595 Result: Down-regulated in Transcription
  misc_feature: MA Experiment 108595 PARAMETER Experiment Name: At_Ler-pi_Ovule_cDNA_P Parameter: Plant Line Value: null
  misc_feature: MA Experiment ID: 108605 Result: Down-regulated in Transcription
  misc_feature: MA Experiment 108605 PARAMETER Experiment Name: At_100uM_ABA_cDNA_P Parameter: Timepoint (hr) Value: 6
  misc_feature: MA Experiment 108605 PARAMETER Experiment Name: At_100uM_ABA_cDNA_P Parameter: Tissue Value: Aerial
  misc_feature: MA Experiment 108605 PARAMETER Experiment Name: At_100uM_ABA_cDNA_P Parameter: Treatment Value: 100uM ABA vs. No Treatment
  misc_feature: MA Experiment ID: 20000069 Result: Down-regulated in Transcription
  misc_feature: MA Experiment 20000069 PARAMETER Experiment Name: At_100uM_ABA_Mutants_cDNA_P Parameter: Plant Line Value: CS23
  misc_feature: MA Experiment 20000069 PARAMETER Experiment Name: At_100uM_ABA_Mutants_cDNA_P Parameter: Timepoint (hr) Value: 6
  misc_feature: MA Experiment 20000069 PARAMETER Experiment Name: At_100uM_ABA_Mutants_cDNA_P Parameter: Tissue Value: Aerial
  misc_feature: MA Experiment 20000069 PARAMETER Experiment Name: At_100uM_ABA_Mutants_cDNA_P Parameter: Treatment Value: 100uM ABA vs. No Treatment
  misc_feature: MA Experiment ID: 20000070 Result: Down-regulated in Transcription
  misc_feature: MA Experiment 20000070 PARAMETER Experiment Name: At_100uM_ABA_Mutants_cDNA_P Parameter: Plant Line Value: CS24
  misc_feature: MA Experiment 20000070 PARAMETER Experiment Name: At_100uM_ABA_Mutants_cDNA_P Parameter: Timepoint (hr) Value: 6
  misc_feature: MA Experiment 20000070 PARAMETER Experiment Name: At_100uM_ABA_Mutants_cDNA_P Parameter: Tissue Value: Aerial
  misc_feature: MA Experiment 20000070 PARAMETER Experiment Name: At_100uM_ABA_Mutants_cDNA_P Parameter: Treatment Value: 100uM ABA vs. No Treatment
  misc_feature: MA Experiment ID: 20000071 Result: Down-regulated in Transcription
  misc_feature: MA Experiment 20000071 PARAMETER Experiment Name: At_100uM_ABA_Mutants_cDNA_P Parameter: Plant Line Value: CS8104
  misc_feature: MA Experiment 20000071 PARAMETER Experiment Name: At_100uM_ABA_Mutants_cDNA_P Parameter: Timepoint (hr) Value: 6
  misc_feature: MA Experiment 20000071 PARAMETER Experiment Name: At_100uM_ABA_Mutants_cDNA_P Parameter: Tissue Value: Aerial
  misc_feature: MA Experiment 20000071 PARAMETER Experiment Name: At_100uM_ABA_Mutants_cDNA_P Parameter: Treatment Value: 100uM ABA vs. No Treatment
  misc_feature: MA Experiment ID: 20000086 Result: Down-regulated in Transcription
  misc_feature: MA Experiment 20000086 PARAMETER Experiment Name: At_100uM_ABA_Mutants_cDNA_P Parameter: Plant Line Value: CS22
  misc_feature: MA Experiment 20000086 PARAMETER Experiment Name: At_100uM_ABA_Mutants_cDNA_P Parameter: Timepoint (hr) Value: 6
  misc_feature: MA Experiment 20000086 PARAMETER Experiment Name: At_100uM_ABA_Mutants_cDNA_P Parameter: Tissue Value: Aerial
  misc_feature: MA Experiment 20000086 PARAMETER Experiment Name: At_100uM_ABA_Mutants_cDNA_P Parameter: Treatment Value: 100uM ABA vs. No Treatment
  misc_feature: MA Experiment ID: 20000087 Result: Down-regulated in Transcription
  misc_feature: MA Experiment 20000087 PARAMETER Experiment Name: At_100uM_ABA_Mutants_cDNA_P Parameter: Plant Line Value: WS
  misc_feature: MA Experiment 20000087 PARAMETER Experiment Name: At_100uM_ABA_Mutants_cDNA_P Parameter: Timepoint (hr) Value: 6
  misc_feature: MA Experiment 20000087 PARAMETER Experiment Name: At_100uM_ABA_Mutants_cDNA_P Parameter: Tissue Value: Aerial
  misc_feature: MA Experiment 20000087 PARAMETER Experiment Name: At_100uM_ABA_Mutants_cDNA_P Parameter: Treatment Value: 100uM ABA vs. No Treatment
  misc_feature: MA Experiment ID: 20000088 Result: Down-regulated in Transcription
  misc_feature: MA Experiment 20000088 PARAMETER Experiment Name: At_100uM_ABA_Mutants_cDNA_P Parameter: Plant Line Value: Landsberg
  misc_feature: MA Experiment 20000088 PARAMETER Experiment Name: At_100uM_ABA_Mutants_cDNA_P Parameter: Timepoint (hr) Value: 6
  misc_feature: MA Experiment 20000088 PARAMETER Experiment Name: At_100uM_ABA_Mutants_cDNA_P Parameter: Tissue Value: Aerial
  misc_feature: MA Experiment 20000088 PARAMETER Experiment Name: At_100uM_ABA_Mutants_cDNA_P Parameter: Treatment Value: 100uM ABA vs. No Treatment
  misc_feature: MA Experiment ID: 20000089 Result: Down-regulated in Transcription
  misc_feature: MA Experiment ID: 20000090 Result: Down-regulated in Transcription
  misc_feature: MA Experiment ID: 20000111 Result: Up-regulated in Transcription
  misc_feature: MA Experiment 20000111 PARAMETER Experiment Name: At_42deg_Heat_cDNA_P Parameter: Temperature (deg C) Value: 42 vs. 22
  misc_feature: MA Experiment 20000111 PARAMETER Experiment Name: At_42deg_Heat_cDNA_P Parameter: Timepoint (hr) Value: 6
  misc_feature: MA Experiment 20000111 PARAMETER Experiment Name: At_42deg_Heat_cDNA_P Parameter: Tissue Value: Aerial
  misc_feature: MA Experiment ID: 20000112 Result: Up-regulated in Transcription
  misc_feature: MA Experiment 20000112 PARAMETER Experiment Name: At_42deg_Heat_cDNA_P Parameter: Temperature (deg C) Value: 42 vs. 22
  misc_feature: MA Experiment 20000112 PARAMETER Experiment Name: At_42deg_Heat_cDNA_P Parameter: Timepoint (hr) Value: 2
  misc_feature: MA Experiment 20000112 PARAMETER Experiment Name: At_42deg_Heat_cDNA_P Parameter: Tissue Value: Aerial
  misc_feature: MA Experiment ID: 20000113 Result: Up-regulated in Transcription
  misc_feature: MA Experiment 20000113 PARAMETER Experiment Name: At_42deg_Heat_cDNA_P Parameter: Temperature (deg C) Value: 42 vs. 22
  misc_feature: MA Experiment 20000113 PARAMETER Experiment Name: At_42deg_Heat_cDNA_P Parameter: Timepoint (hr) Value: 8
  misc_feature: MA Experiment 20000113 PARAMETER Experiment Name: At_42deg_Heat_cDNA_P Parameter: Tissue Value: Aerial
  misc_feature: MA Experiment ID: 20000117 Result: Down-regulated in Transcription
  misc_feature: MA Experiment 20000117 PARAMETER Experiment Name: At_100uM_ABA_Mutants_cDNA_P Parameter: Plant Line Value: Columbia
  misc_feature: MA Experiment 20000117 PARAMETER Experiment Name: At_100uM_ABA_Mutants_cDNA_P Parameter: Timepoint (hr) Value: 6
  misc_feature: MA Experiment 20000117 PARAMETER Experiment Name: At_100uM_ABA_Mutants_cDNA_P Parameter: Tissue Value: Aerial
  misc_feature: MA Experiment 20000117 PARAMETER Experiment Name: At_100uM_ABA_Mutants_cDNA_P Parameter: Treatment Value: 100uM ABA vs. No Treatment
  misc_feature: MA Experiment ID: 20000169 Result: Down-regulated in Transcription
  misc_feature: MA Experiment 20000169 PARAMETER Experiment Name: At_100uM_ABA_P Parameter: Age (day) Value: 14
  misc_feature: MA Experiment 20000169 PARAMETER Experiment Name: At_100uM_ABA_P Parameter: Organism Value: A. thaliana
  misc_feature: MA Experiment 20000169 PARAMETER Experiment Name: At_100uM_ABA_P Parameter: Plant Line Value: WS
  misc_feature: MA Experiment 20000169 PARAMETER Experiment Name: At_100uM_ABA_P Parameter: Timepoint (hr) Value: 6
  misc_feature: MA Experiment 20000169 PARAMETER Experiment Name: At_100uM_ABA_P Parameter: Tissue Value: Aerial
  misc_feature: MA Experiment 20000169 PARAMETER Experiment Name: At_100uM_ABA_P Parameter: Treatment Value: 100uM ABA vs. No Treatment
  misc_feature: MA Experiment ID: 20000173 Result: Up-regulated in Transcription
  misc_feature: MA Experiment 20000173 PARAMETER Experiment Name: At_42deg_Heat_P Parameter: Age (day) Value: 14
  misc_feature: MA Experiment 20000173 PARAMETER Experiment Name: At_42deg_Heat_P Parameter: Organism Value: A. thaliana
  misc_feature: MA Experiment 20000173 PARAMETER Experiment Name: At_42deg_Heat_P Parameter: Plant Line Value: WS
  misc_feature: MA Experiment 20000173 PARAMETER Experiment Name: At_42deg_Heat_P Parameter: Temperature (deg C) Value: 42 vs. 22
  misc_feature: MA Experiment 20000173 PARAMETER Experiment Name: At_42deg_Heat_P Parameter: Timepoint (hr) Value: 6
  misc_feature: MA Experiment 20000173 PARAMETER Experiment Name: At_42deg_Heat_P Parameter: Tissue Value: Aerial
  misc_feature: MA Experiment ID: 20000184 Result: Up-regulated in Transcription
  misc_feature: MA Experiment 20000184 PARAMETER Experiment Name: At_Shoots__P Parameter: Age (day) Value: 7
  misc_feature: MA Experiment 20000184 PARAMETER Experiment Name: At_Shoots__P Parameter: Tissue Value: Shoots vs. Whole Plant
  misc_feature: MA Experiment ID: 20000437 Result: Down-regulated in Transcription
  misc_feature: MA Experiment 20000437 PARAMETER Experiment Name: At_Drought_P Parameter: Age (day) Value: 8
  misc_feature: MA Experiment 20000437 PARAMETER Experiment Name: At_Drought_P Parameter: Organism Value: A. thaliana
  misc_feature: MA Experiment 20000437 PARAMETER Experiment Name: At_Drought_P Parameter: Plant Line Value: WS
  misc_feature: MA Experiment 20000437 PARAMETER Experiment Name: At_Drought_P Parameter: Timepoint (hr) Value: 24
  misc_feature: MA Experiment 20000437 PARAMETER Experiment Name: At_Drought_P Parameter: Tissue Value: Whole Plant
  misc_feature: MA Experiment 20000437 PARAMETER Experiment Name: At_Drought_P Parameter: Treatment Value: Drought vs. No Drought
  misc_feature: MA Experiment ID: 20001248 Result: Down-regulated in Transcription
  misc_feature: MA Experiment 20001248 PARAMETER Experiment Name: At_Far-red-induction_P Parameter: Age (day) Value: 7
  misc_feature: MA Experiment 20001248 PARAMETER Experiment Name: At_Far-red-induction_P Parameter: Light Value: Far-red vs. White
  misc_feature: MA Experiment 20001248 PARAMETER Experiment Name: At_Far-red-induction_P Parameter: Organism Value: A. thaliana
  misc_feature: MA Experiment 20001248 PARAMETER Experiment Name: At_Far-red-induction_P Parameter: Plant Line Value: Columbia
  misc_feature: MA Experiment 20001248 PARAMETER Experiment Name: At_Far-red-induction_P Parameter: Timepoint (hr) Value: 4
  misc_feature: MA Experiment 20001248 PARAMETER Experiment Name: At_Far-red-induction_P Parameter: Tissue Value: Whole Plant
  misc_feature: MA Experiment ID: 20001450 Result: Down-regulated in Transcription
  misc_feature: MA Experiment 20001450 PARAMETER Experiment Name: At_Far-red-induction_P Parameter: Age (day) Value: 7
  misc_feature: MA Experiment 20001450 PARAMETER Experiment Name: At_Far-red-induction_P Parameter: Light Value: Far-red vs. White
  misc_feature: MA Experiment 20001450 PARAMETER Experiment Name: At_Far-red-induction_P Parameter: Organism Value: A. thaliana
  misc_feature: MA Experiment 20001450 PARAMETER Experiment Name: At_Far-red-induction_P Parameter: Plant Line Value: Columbia
  misc_feature: MA Experiment 20001450 PARAMETER Experiment Name: At_Far-red-induction_P Parameter: Timepoint (hr) Value: 8
  misc_feature: MA Experiment 20001450 PARAMETER Experiment Name: At_Far-red-induction_P Parameter: Tissue Value: Whole Plant
  misc_feature: Phenotype: ROSETTE LEAVES Curled-Cup-shaped
  misc_feature: Phenotype: ROSETTE LEAVES Curled-Cup-shaped
  misc_feature: Phenotype: ROSETTE LEAVES Curled-Curled 3
  misc_feature: Phenotype: ROSETTE LEAVES Other
  misc_feature: Phenotype: INFLORESCENCE Height-Short
  misc_feature: Phenotype: ROSETTE LEAVES Shape-Serrate
  misc_feature: Phenotype: ROSETTE LEAVES Shape-Serrate
  misc_feature: Phenotype: WHOLE PLANT Color-Dark Green
  misc_feature: Phenotype: WHOLE PLANT Color-Dark Green
  misc_feature: Phenotype: INFLORESCENCE Height-Short

SEQ ID NO: 31763 - protein, 309 aa, Arabidopsis thaliana; identical to SEQ ID NO: 28173
  peptide (1)..(309): Ceres Seq. ID no. 12422820
  misc_feature (22)..(228): Pfam Name: SOR/SNZ family Pfam Description: SOR/SNZ family
  misc_feature (14)..(307): Homolog of NCBI NO: 11359355 NR Description: pyridoxine biosynthesis protein pyroA
  misc_feature (19)..(307): Homolog of NCBI NO: 22970419 NR Description: hypothetical protein [Chloroflexus aurantiacus]
  misc_feature (2)..(309): Homolog of NCBI NO: 37530308 NR Description: putative pyridoxine/pyridoxal 5-phosphate
  misc_feature (1)..(309): Homolog of NCBI NO: 13310484 NR Description: Sor-like protein [Ginkgo biloba]
  misc_feature (2)..(309): Homolog of NCBI NO: 34394152 NR Description: putative ethylene-inducible protein
  misc_feature (1)..(309): Homolog of NCBI NO: 15224470 NR Description: similar to SOR1 from the fungus Cercospora
  misc_feature (2)..(309): Homolog of NCBI NO: 10719739 NR Description: putative pyridoxine biosynthetic enzyme
  misc_feature (1)..(309): Homolog of NCBI NO: 2501578 NR Description: ETHYLENE-INDUCIBLE PROTEIN HEVER
  misc_feature (1)..(309): Homolog of NCBI NO: 21617922 NR Description: pyridoxine biosynthesis protein-like [Arabidopsis
  misc_feature (1)..(309): Homolog of NCBI NO: 15240972 NR Description: pyridoxine biosynthesis protein - like

SEQ ID NO: 31764 - protein, 278 aa, Arabidopsis thaliana; identical to SEQ ID NO: 28174
  peptide (1)..(278): Ceres Seq. ID no. 12422821
  misc_feature (1)..(197): Pfam Name: SOR/SNZ family Pfam Description: SOR/SNZ family
  misc_feature (1)..(276): Homolog of NCBI NO: 11359355 NR Description: pyridoxine biosynthesis protein pyroA
  misc_feature (1)..(276): Homolog of NCBI NO: 22970419 NR Description: hypothetical protein [Chloroflexus aurantiacus]
  misc_feature (1)..(278): Homolog of NCBI NO: 37530308 NR Description: putative pyridoxine/pyridoxal 5-phosphate
  misc_feature (1)..(278): Homolog of NCBI NO: 13310484 NR Description: Sor-like protein [Ginkgo biloba]
  misc_feature (1)..(278): Homolog of NCBI NO: 34394152 NR Description: putative ethylene-inducible protein
  misc_feature (1)..(278): Homolog of NCBI NO: 15224470 NR Description: similar to SOR1 from the fungus Cercospora
  misc_feature (1)..(278): Homolog of NCBI NO: 10719739 NR Description: putative pyridoxine biosynthetic enzyme
  misc_feature (1)..(278): Homolog of NCBI NO: 2501578 NR Description: ETHYLENE-INDUCIBLE PROTEIN HEVER
  misc_feature (1)..(278): Homolog of NCBI NO: 21617922 NR Description: pyridoxine biosynthesis protein-like [Arabidopsis
  misc_feature (1)..(278): Homolog of NCBI NO: 15240972 NR Description: pyridoxine biosynthesis protein - like

SEQ ID NO: 31765 - protein, 271 aa, Arabidopsis thaliana; identical to SEQ ID NO: 28175
  peptide (1)..(271): Ceres Seq. ID no. 12422822
  misc_feature (1)..(190): Pfam Name: SOR/SNZ family Pfam Description: SOR/SNZ family
  misc_feature (1)..(269): Homolog of NCBI NO: 11359355 NR Description: pyridoxine biosynthesis protein pyroA
  misc_feature (1)..(269): Homolog of NCBI NO: 22970419 NR Description: hypothetical protein [Chloroflexus aurantiacus]
  misc_feature (1)..(271): Homolog of NCBI NO: 37530308 NR Description: putative pyridoxine/pyridoxal 5-phosphate
  misc_feature (1)..(271): Homolog of NCBI NO: 13310484 NR Description: Sor-like protein [Ginkgo biloba]
  misc_feature (1)..(271): Homolog of NCBI NO: 34394152 NR Description: putative ethylene-inducible protein
  misc_feature (1)..(271): Homolog of NCBI NO: 15224470 NR Description: similar to SOR1 from the fungus Cercospora
  misc_feature (1)..(271): Homolog of NCBI NO: 10719739 NR Description: putative pyridoxine biosynthetic enzyme
  misc_feature (1)..(271): Homolog of NCBI NO: 2501578 NR Description: ETHYLENE-INDUCIBLE PROTEIN HEVER
  misc_feature (1)..(271): Homolog of NCBI NO: 21617922 NR Description: pyridoxine biosynthesis protein-like [Arabidopsis
  misc_feature (1)..(271): Homolog of NCBI NO: 15240972 NR Description: pyridoxine biosynthesis protein - like

SEQ ID NO: 31766 - DNA, 2308 bp, Arabidopsis thaliana; identical to SEQ ID NO: 28176
  misc_feature (1)..(2308): Ceres Seq. ID no. 12325938
  misc_feature: MA Experiment ID: 108434 Result: Up-regulated in Transcription
  misc_feature: MA Experiment 108434 PARAMETER Experiment Name: At_Root_Tips_cDNA_P Parameter: Tissue Value: Root Tips
  misc_feature: MA Experiment ID: 20000113 Result: Down-regulated in Transcription
  misc_feature: MA Experiment 20000113 PARAMETER Experiment Name: At_42deg_Heat_cDNA_P Parameter: Temperature (deg C) Value: 42 vs. 22
  misc_feature: MA Experiment 20000113 PARAMETER Experiment Name: At_42deg_Heat_cDNA_P Parameter: Timepoint (hr) Value: 8
  misc_feature: MA Experiment 20000113 PARAMETER Experiment Name: At_42deg_Heat_cDNA_P Parameter: Tissue Value: Aerial
  misc_feature: MA Experiment ID: 20000117 Result: Down-regulated in Transcription
  misc_feature: MA Experiment 20000117 PARAMETER Experiment Name: At_100uM_ABA_Mutants_cDNA_P Parameter: Plant Line Value: Columbia
  misc_feature: MA Experiment 20000117 PARAMETER Experiment Name: At_100uM_ABA_Mutants_cDNA_P Parameter: Timepoint (hr) Value: 6
  misc_feature: MA Experiment 20000117 PARAMETER Experiment Name: At_100uM_ABA_Mutants_cDNA_P Parameter: Tissue Value: Aerial
  misc_feature: MA Experiment 20000117 PARAMETER Experiment Name: At_100uM_ABA_Mutants_cDNA_P Parameter: Treatment Value: 100uM ABA vs. No Treatment
  misc_feature: MA Experiment ID: 20000179 Result: Up-regulated in Transcription
  misc_feature: MA Experiment 20000179 PARAMETER Experiment Name: At_Germinating_Seeds_P Parameter: Age (hr) Value: 6 vs. 0
  misc_feature: MA Experiment 20000179 PARAMETER Experiment Name: At_Germinating_Seeds_P Parameter: Tissue Value: Germinating Seeds
  misc_feature: MA Experiment ID: 20000180 Result: Up-regulated in Transcription
  misc_feature: MA Experiment 20000180 PARAMETER Experiment Name: At_Germinating_Seeds_P Parameter: Age (hr) Value: 24 vs. 0
  misc_feature: MA Experiment 20000180 PARAMETER Experiment Name: At_Germinating_Seeds_P Parameter: Tissue Value: Germinating Seeds
  misc_feature: MA Experiment ID: 20000227 Result: Up-regulated in Transcription
  misc_feature: MA Experiment 20000227 PARAMETER Experiment Name: At_Root-Tips-vs-Tops_P Parameter: Tissue Value: Root Tips vs. Root Tops
  misc_feature: MA Experiment ID: 20000234 Result: Up-regulated in Transcription
  misc_feature: MA Experiment 20000234 PARAMETER Experiment Name: At_Siliques_P Parameter: Age (day) Value: 21
  misc_feature: MA Experiment 20000234 PARAMETER Experiment Name: At_Siliques_P Parameter: Organism Value: A. thaliana
  misc_feature: MA Experiment 20000234 PARAMETER Experiment Name: At_Siliques_P Parameter: Plant Line Value: WS
  misc_feature: MA Experiment 20000234 PARAMETER Experiment Name: At_Siliques_P Parameter: Tissue Value: Less Than 5mm Siliques vs. Whole Plant
  misc_feature: MA Experiment ID: 20000495 Result: Up-regulated in Transcription
  misc_feature: MA Experiment 20000495 PARAMETER Experiment Name: At_Guard_Cells_P Parameter: Harvest Date Value: 8/2/2002
  misc_feature: MA Experiment 20000495 PARAMETER Experiment Name: At_Guard_Cells_P Parameter: Organism Value: A. thaliana
  misc_feature: MA Experiment 20000495 PARAMETER Experiment Name: At_Guard_Cells_P Parameter: Tissue Value: Guard Cells vs. Leaves
  misc_feature: MA Experiment ID: 20001557 Result: Up-regulated in Transcription
  misc_feature: MA Experiment 20001557 PARAMETER Experiment Name: At_Drought_Soil_Dry_P Parameter: Age (day) Value: 27
  misc_feature: MA Experiment 20001557 PARAMETER Experiment Name: At_Drought_Soil_Dry_P Parameter: Organism Value: A. thaliana
  misc_feature: MA Experiment 20001557 PARAMETER Experiment Name: At_Drought_Soil_Dry_P Parameter: Plant Line Value: WS
  misc_feature: MA Experiment 20001557 PARAMETER Experiment Name: At_Drought_Soil_Dry_P Parameter: Post Timepoint (hr) Value: 3
  misc_feature: MA Experiment 20001557 PARAMETER Experiment Name: At_Drought_Soil_Dry_P Parameter: Post-Treatment Value: Re-Water vs. No Drought
  misc_feature: MA Experiment 20001557 PARAMETER Experiment Name: At_Drought_Soil_Dry_P Parameter: Timepoint (day) Value: 13
  misc_feature: MA Experiment 20001557 PARAMETER Experiment Name: At_Drought_Soil_Dry_P Parameter: Treatment Value: Drought vs. No Drought
  misc_feature: MA Experiment ID: 20001560 Result: Up-regulated in Transcription
  misc_feature: MA Experiment 20001560 PARAMETER Experiment Name: At_Drought_Soil_Dry_P Parameter: Age (day) Value: 28
  misc_feature: MA Experiment 20001560 PARAMETER Experiment Name: At_Drought_Soil_Dry_P Parameter: Organism Value: A. thaliana
  misc_feature: MA Experiment 20001560 PARAMETER Experiment Name: At_Drought_Soil_Dry_P Parameter: Plant Line Value: WS
  misc_feature: MA Experiment 20001560 PARAMETER Experiment Name: At_Drought_Soil_Dry_P Parameter: Post Timepoint (hr) Value: None
  misc_feature: MA Experiment 20001560 PARAMETER Experiment Name: At_Drought_Soil_Dry_P Parameter: Post-Treatment Value: None
  misc_feature: MA Experiment 20001560 PARAMETER Experiment Name: At_Drought_Soil_Dry_P Parameter: Timepoint (day) Value: 14
  misc_feature: MA Experiment 20001560 PARAMETER Experiment Name: At_Drought_Soil_Dry_P Parameter: Treatment Value: Drought vs. No Drought

SEQ ID NO: 31767 - protein, 682 aa, Arabidopsis thaliana; identical to SEQ ID NO: 28177
  peptide (1)..(682): Ceres Seq. ID no. 12325939
  misc_feature (158)..(661): Pfam Name: Putative methyltransferase Pfam Description: Putative methyltransferase
  misc_feature (108)..(649): Homolog of NCBI NO: 25403070 NR Description: unknown protein, 55790-52851 [imported] -
  misc_feature (101)..(649): Homolog of NCBI NO: 15230391 NR Description: putative protein; protein id: At3g51070.1
  misc_feature (89)..(646): Homolog of NCBI NO: 20161455 NR Description: ankyrin-like protein [Oryza sativa (japonica
  misc_feature (599)..(649): Homolog of NCBI NO: 38567836 NR Description: OSJNBb0020J19.14 [Oryza sativa (japonica
  misc_feature (77)..(601): Homolog of NCBI NO: 38567836 NR Description: OSJNBb0020J19.14 [Oryza sativa (japonica
  misc_feature (47)..(661): Homolog of NCBI NO: 34908262 NR Description: ankyrin-like protein [Oryza sativa (japonica
  misc_feature (1)..(653): Homolog of NCBI NO: 7486995 NR Description: hypothetical protein T14N5.11 - Arabidopsis
  misc_feature (1)..(662): Homolog of NCBI NO: 18411424 NR Description: expressed protein
  misc_feature (1)..(96): Homolog of NCBI NO: 18405149 NR Description: expressed protein
  misc_feature (77)..(662): Homolog of NCBI NO: 18405149 NR Description: expressed protein

SEQ ID NO: 31768 - protein, 577 aa, Arabidopsis thaliana; identical to SEQ ID NO: 28178
  peptide (1)..(577): Ceres Seq. ID no. 12325940
  misc_feature (53)..(556): Pfam Name: Putative methyltransferase Pfam Description: Putative methyltransferase
  misc_feature (3)..(544): Homolog of NCBI NO: 30690755 NR Description: dehydration-induced protein-related [Arabidopsis
  misc_feature (3)..(544): Homolog of NCBI NO: 25403070 NR Description: unknown protein, 55790-52851 [imported] -
  misc_feature (1)..(544): Homolog of NCBI NO: 15230391 NR Description: putative protein; protein id: At3g51070.1
  misc_feature (1)..(541): Homolog of NCBI NO: 20161455 NR Description: ankyrin-like protein [Oryza sativa (japonica
  misc_feature (494)..(544): Homolog of NCBI NO: 38567836 NR Description: OSJNBb0020J19.14 [Oryza sativa (japonica
  misc_feature (1)..(496): Homolog of NCBI NO: 38567836 NR Description: OSJNBb0020J19.14 [Oryza sativa (japonica
  misc_feature (1)..(556): Homolog of NCBI NO: 34908262 NR Description: ankyrin-like protein [Oryza sativa (japonica
  misc_feature (1)..(548): Homolog of NCBI NO: 7486995 NR Description: hypothetical protein T14N5.11 - Arabidopsis
  misc_feature (1)..(557): Homolog of NCBI NO: 18411424 NR Description: expressed protein
  misc_feature (1)..(557): Homolog of NCBI NO: 18405149 NR Description: expressed protein

SEQ ID NO: 31769 - protein, 527 aa, Arabidopsis thaliana; identical to SEQ ID NO: 28179
  peptide (1)..(527): Ceres Seq. ID no. 12325941
  misc_feature (3)..(506): Pfam Name: Putative methyltransferase Pfam Description: Putative methyltransferase
  misc_feature (1)..(494): Homolog of NCBI NO: 30690755 NR Description: dehydration-induced protein-related [Arabidopsis
  misc_feature (1)..(494): Homolog of NCBI NO: 25403070 NR Description: unknown protein, 55790-52851 [imported] -
  misc_feature (1)..(494): Homolog of NCBI NO: 15230391 NR Description: putative protein; protein id: At3g51070.1
  misc_feature (1)..(491): Homolog of NCBI NO: 20161455 NR Description: ankyrin-like protein [Oryza sativa (japonica
  misc_feature (444)..(494): Homolog of NCBI NO: 38567836 NR Description: OSJNBb0020J19.14 [Oryza sativa (japonica
  misc_feature (1)..(446): Homolog of NCBI NO: 38567836 NR Description: OSJNBb0020J19.14 [Oryza sativa (japonica
  misc_feature (1)..(506): Homolog of NCBI NO: 34908262 NR Description: ankyrin-like protein [Oryza sativa (japonica
  misc_feature (1)..(498): Homolog of NCBI NO: 7486995 NR Description: hypothetical protein T14N5.11 - Arabidopsis
  misc_feature (1)..(507): Homolog of NCBI NO: 18411424 NR Description: expressed protein
  misc_feature (1)..(507): Homolog of NCBI NO: 18405149 NR Description: expressed protein

SEQ ID NO: 31770 - DNA, 1210 bp, Arabidopsis thaliana; identical to SEQ ID NO: 28180
  misc_feature (1)..(1210): Ceres Seq. ID no. 12482200
  misc_feature: MA Experiment ID: 108434 Result: Down-regulated in Transcription
  misc_feature: MA Experiment 108434 PARAMETER Experiment Name: At_Root_Tips_cDNA_P Parameter: Tissue Value: Root Tips
  misc_feature: MA Experiment ID: 108461 Result: Up-regulated in Transcription
  misc_feature: MA Experiment 108461 PARAMETER Experiment Name: At_Germinating_Seeds_cDNA_P Parameter: Age (day) Value: 1 vs. 0
  misc_feature: MA Experiment 108461 PARAMETER Experiment Name: At_Germinating_Seeds_cDNA_P Parameter: Tissue Value: Germinating Seeds
  misc_feature: MA Experiment ID: 108464 Result: Up-regulated in Transcription
  misc_feature: MA Experiment 108464 PARAMETER Experiment Name: At_Germinating_Seeds_cDNA_P Parameter: Age (day) Value: 4 vs. 0
  misc_feature: MA Experiment 108464 PARAMETER Experiment Name: At_Germinating_Seeds_cDNA_P Parameter: Tissue Value: Germinating Seeds
  misc_feature: MA Experiment ID: 108585 Result: Up-regulated in Transcription
  misc_feature: MA Experiment 108585 PARAMETER Experiment Name: At_5mM_NaNP_cDNA_P Parameter: Timepoint (hr) Value: 6
  misc_feature: MA Experiment 108585 PARAMETER Experiment Name: At_5mM_NaNP_cDNA_P Parameter: Tissue Value: Aerial
  misc_feature: MA Experiment 108585 PARAMETER Experiment Name: At_5mM_NaNP_cDNA_P Parameter: Treatment Value: null
  misc_feature: MA Experiment ID: 108607 Result: Down-regulated in Transcription
  misc_feature: MA Experiment 108607 PARAMETER Experiment Name: At_100uM_ABA_cDNA_P Parameter: Timepoint (hr) Value: 4
  misc_feature: MA Experiment 108607 PARAMETER Experiment Name: At_100uM_ABA_cDNA_P Parameter: Tissue Value: Aerial
  misc_feature: MA Experiment 108607 PARAMETER Experiment Name: At_100uM_ABA_cDNA_P Parameter: Treatment Value: 100uM ABA vs. No Treatment
  misc_feature: MA Experiment ID: 108609 Result: Down-regulated in Transcription
  misc_feature: MA Experiment 108609 PARAMETER Experiment Name: At_100uM_ABA_cDNA_P Parameter: Timepoint (hr) Value: 24
  misc_feature: MA Experiment 108609 PARAMETER Experiment Name: At_100uM_ABA_cDNA_P Parameter: Tissue Value: Aerial
  misc_feature: MA Experiment 108609 PARAMETER Experiment Name: At_100uM_ABA_cDNA_P Parameter: Treatment Value: 100uM ABA vs. No Treatment
  misc_feature: MA Experiment ID: 108668 Result: Up-regulated in Transcription
  misc_feature: MA Experiment 108668 PARAMETER Experiment Name: At_2mM_SA_cDNA_P Parameter: Plant Line Value: WS
  misc_feature: MA Experiment 108668 PARAMETER Experiment Name: At_2mM_SA_cDNA_P Parameter: Timepoint (hr) Value: 6
  misc_feature: MA Experiment 108668 PARAMETER Experiment Name: At_2mM_SA_cDNA_P Parameter: Treatment Value: 2mM SA vs. No Treatment
  misc_feature: MA Experiment ID: 20000030 Result: Down-regulated in Transcription
  misc_feature: MA Experiment 20000030 PARAMETER Experiment Name: At_CS6630_Roots_cDNA_P Parameter: Plant Line Value: CS6630 vs. WS
  misc_feature: MA Experiment 20000030 PARAMETER Experiment Name: At_CS6630_Roots_cDNA_P Parameter: Tissue Value: Roots
  misc_feature: MA Experiment ID: 20000111 Result: Down-regulated in Transcription
  misc_feature: MA Experiment 20000111 PARAMETER Experiment Name: At_42deg_Heat_cDNA_P Parameter: Temperature (deg C) Value: 42 vs. 22
  misc_feature: MA Experiment 20000111 PARAMETER Experiment Name: At_42deg_Heat_cDNA_P Parameter: Timepoint (hr) Value: 6
  misc_feature: MA Experiment 20000111 PARAMETER Experiment Name: At_42deg_Heat_cDNA_P Parameter: Tissue Value: Aerial
  misc_feature: MA Experiment ID: 20000144 Result: Down-regulated in Transcription
  misc_feature: MA Experiment 20000144 PARAMETER Experiment Name: At_42deg_Heat_cDNA_P Parameter: Temperature (deg C) Value: 42 vs. 22
  misc_feature: MA Experiment 20000144 PARAMETER Experiment Name: At_42deg_Heat_cDNA_P Parameter: Timepoint (hr) Value: 1
  misc_feature: MA Experiment 20000144 PARAMETER Experiment Name: At_42deg_Heat_cDNA_P Parameter: Tissue Value: Aerial
  misc_feature: MA Experiment ID: 20000173 Result: Down-regulated in Transcription
  misc_feature: MA Experiment 20000173 PARAMETER Experiment Name: At_42deg_Heat_P Parameter: Age (day) Value: 14
  misc_feature: MA Experiment 20000173 PARAMETER Experiment Name: At_42deg_Heat_P Parameter: Organism Value: A. thaliana
  misc_feature: MA Experiment 20000173 PARAMETER Experiment Name: At_42deg_Heat_P Parameter: Plant Line Value: WS
  misc_feature: MA Experiment 20000173 PARAMETER Experiment Name: At_42deg_Heat_P Parameter: Temperature (deg C) Value: 42 vs. 22
  misc_feature: MA Experiment 20000173 PARAMETER Experiment Name: At_42deg_Heat_P Parameter: Timepoint (hr) Value: 6
  misc_feature: MA Experiment 20000173 PARAMETER Experiment Name: At_42deg_Heat_P Parameter: Tissue Value: Aerial
  misc_feature: MA Experiment ID: 20000265 Result: Down-regulated in Transcription
  misc_feature: MA Experiment 20000265 PARAMETER Experiment Name: At_Open_Flower_P Parameter: Age (day) Value: 21
  misc_feature: MA Experiment 20000265 PARAMETER Experiment Name: At_Open_Flower_P Parameter: Plant Line Value: WS
  misc_feature: MA Experiment 20000265 PARAMETER Experiment Name: At_Open_Flower_P Parameter: Tissue Value: Closed Flower vs. Whole Plant
  misc_feature: MA Experiment ID: 20000438 Result: Down-regulated in Transcription
  misc_feature: MA Experiment 20000438 PARAMETER Experiment Name: At_Shoots__P Parameter: Age (day) Value: 14
  misc_feature: MA Experiment 20000438 PARAMETER Experiment Name: At_Shoots__P Parameter: Tissue Value: Shoots vs. Whole Plant
  misc_feature: MA Experiment ID: 20000460 Result: Down-regulated in Transcription
  misc_feature: MA Experiment 20000460 PARAMETER Experiment Name: At_10percent_PEG_P Parameter: Age (day) Value: 12
  misc_feature: MA Experiment 20000460 PARAMETER Experiment Name: At_10percent_PEG_P Parameter: Organism Value: A. thaliana
  misc_feature: MA Experiment 20000460 PARAMETER Experiment Name: At_10percent_PEG_P Parameter: Plant Line Value: WS
  misc_feature: MA Experiment 20000460 PARAMETER Experiment Name: At_10percent_PEG_P Parameter: Timepoint (day) Value: 12
  misc_feature: MA Experiment 20000460 PARAMETER Experiment Name: At_10percent_PEG_P Parameter: Tissue Value: Whole Plant
  misc_feature: MA Experiment 20000460 PARAMETER Experiment Name: At_10percent_PEG_P Parameter: Treatment Value: 10percent PEG vs. No Treatment
  misc_feature: MA Experiment ID: 20000495 Result: Down-regulated in Transcription
  misc_feature: MA Experiment 20000495 PARAMETER Experiment Name: At_Guard_Cells_P Parameter: Harvest Date Value: 8/2/2002
  misc_feature: MA Experiment 20000495 PARAMETER Experiment Name: At_Guard_Cells_P Parameter: Organism Value: A. thaliana
  misc_feature: MA Experiment 20000495 PARAMETER Experiment Name: At_Guard_Cells_P Parameter: Tissue Value: Guard Cells vs. Leaves
  misc_feature: MA Experiment ID: 20000527 Result: Down-regulated in Transcription
  misc_feature: MA Experiment 20000527 PARAMETER Experiment Name: At_10percent_PEG_P Parameter: Age (day) Value: 20
  misc_feature: MA Experiment 20000527 PARAMETER Experiment Name: At_10percent_PEG_P Parameter: Organism Value: A. thaliana
  misc_feature: MA Experiment 20000527 PARAMETER Experiment Name: At_10percent_PEG_P Parameter: Plant Line Value: WS
  misc_feature: MA Experiment 20000527 PARAMETER Experiment Name: At_10percent_PEG_P Parameter: Timepoint (day) Value: 20
  misc_feature: MA Experiment 20000527 PARAMETER Experiment Name: At_10percent_PEG_P Parameter: Tissue Value: Whole Plant
  misc_feature: MA Experiment 20000527 PARAMETER Experiment Name: At_10percent_PEG_P Parameter: Treatment Value: 10percent PEG vs. No Treatment
  misc_feature: MA Experiment ID: 20000575 Result: Down-regulated in Transcription
  misc_feature: MA Experiment 20000575 PARAMETER Experiment Name: At_100uM_ABA_Mutants__P Parameter: Organism Value: A. thaliana
  misc_feature: MA Experiment 20000575 PARAMETER Experiment Name: At_100uM_ABA_Mutants__P Parameter: Plant Line Value: CS22
  misc_feature: MA Experiment 20000575 PARAMETER Experiment Name: At_100uM_ABA_Mutants__P Parameter: Timepoint (hr) Value: 6
  misc_feature: MA Experiment 20000575 PARAMETER Experiment Name: At_100uM_ABA_Mutants__P Parameter: Tissue Value: Whole Plant
  misc_feature: MA Experiment 20000575 PARAMETER Experiment Name: At_100uM_ABA_Mutants__P Parameter: Treatment Value: 1uM ABA vs. No Treatment
  misc_feature: MA Experiment ID: 20000576 Result: Down-regulated in Transcription
  misc_feature: MA Experiment 20000576 PARAMETER Experiment Name: At_100uM_ABA_Mutants__P Parameter: Organism Value: A. thaliana
  misc_feature: MA Experiment 20000576 PARAMETER Experiment Name: At_100uM_ABA_Mutants__P Parameter: Plant Line Value: CS23
  misc_feature: MA Experiment 20000576 PARAMETER Experiment Name: At_100uM_ABA_Mutants__P Parameter: Timepoint (hr) Value: 6
  misc_feature: MA Experiment 20000576 PARAMETER Experiment Name: At_100uM_ABA_Mutants__P Parameter: Tissue Value: Whole Plant
  misc_feature: MA Experiment 20000576 PARAMETER Experiment Name: At_100uM_ABA_Mutants__P Parameter: Treatment Value: 1uM ABA vs. No Treatment
  misc_feature: MA Experiment ID: 20000794 Result: Down-regulated in Transcription
  misc_feature: MA Experiment 20000794 PARAMETER Experiment Name: At_Petals_P Parameter: Age (day) Value: 23-25 days
  misc_feature: MA Experiment 20000794 PARAMETER Experiment Name: At_Petals_P Parameter: Plant Line Value: WS
  misc_feature: MA Experiment 20000794 PARAMETER Experiment Name: At_Petals_P Parameter: Tissue Value: Petals vs. Whole plant
  misc_feature: MA Experiment ID: 20001451 Result: Down-regulated in Transcription
  misc_feature: MA Experiment 20001451 PARAMETER Experiment Name: At_Far-red-induction_P Parameter: Age (day) Value: 7
  misc_feature: MA Experiment 20001451 PARAMETER Experiment Name: At_Far-red-induction_P Parameter: Light Value: Far-red vs. White
  misc_feature: MA Experiment 20001451 PARAMETER Experiment Name: At_Far-red-induction_P Parameter: Organism Value: A. thaliana
  misc_feature: MA Experiment 20001451 PARAMETER Experiment Name: At_Far-red-induction_P Parameter: Plant Line Value: Columbia
  misc_feature: MA Experiment 20001451 PARAMETER Experiment Name: At_Far-red-induction_P Parameter: Timepoint (hr) Value: 24
  misc_feature: MA Experiment 20001451 PARAMETER Experiment Name: At_Far-red-induction_P Parameter: Tissue Value: Whole Plant
  misc_feature: MA Experiment ID: 20001560 Result: Down-regulated in Transcription
  misc_feature: MA Experiment 20001560 PARAMETER Experiment Name: At_Drought_Soil_Dry_P Parameter: Age (day) Value: 28
  misc_feature: MA Experiment 20001560 PARAMETER Experiment Name: At_Drought_Soil_Dry_P Parameter: Organism Value: A. thaliana
  misc_feature: MA Experiment 20001560 PARAMETER Experiment Name: At_Drought_Soil_Dry_P Parameter: Plant Line Value: WS
  misc_feature: MA Experiment 20001560 PARAMETER Experiment Name: At_Drought_Soil_Dry_P Parameter: Post Timepoint (hr) Value: None
  misc_feature: MA Experiment 20001560 PARAMETER Experiment Name: At_Drought_Soil_Dry_P Parameter: Post-Treatment Value: None
  misc_feature: MA Experiment 20001560 PARAMETER Experiment Name: At_Drought_Soil_Dry_P Parameter: Timepoint (day) Value: 14
  misc_feature: MA Experiment 20001560 PARAMETER Experiment Name: At_Drought_Soil_Dry_P Parameter: Treatment Value: Drought vs. No Drought
  misc_feature: MA Experiment ID: 20001757 Result: Up-regulated in Transcription
  misc_feature: MA Experiment 20001757 PARAMETER Experiment Name: At_50mM_NH4NO3_L-to-H_P Parameter: Timepoint (hr) Value: 6
  misc_feature: MA Experiment 20001757 PARAMETER Experiment Name: At_50mM_NH4NO3_L-to-H_P Parameter: Tissue Value: Leaf
  misc_feature: MA Experiment 20001757 PARAMETER Experiment Name: At_50mM_NH4NO3_L-to-H_P Parameter: Treatment Value: 50mM NH4NO3 vs 100mM Mannitol
  misc_feature: MA Experiment ID: 20001904 Result: Up-regulated in Transcription
  misc_feature: MA Experiment 20001904 PARAMETER Experiment Name: At_Drought_Reproduction_P Parameter: Age (day) Value: 37
  misc_feature: MA Experiment 20001904 PARAMETER Experiment Name: At_Drought_Reproduction_P Parameter: Organism Value: A. thaliana
  misc_feature: MA Experiment 20001904 PARAMETER Experiment Name: At_Drought_Reproduction_P Parameter: Plant Line Value: WS
  misc_feature: MA Experiment 20001904 PARAMETER Experiment Name: At_Drought_Reproduction_P Parameter: Timepoint (day) Value: 7
  misc_feature: MA Experiment 20001904 PARAMETER Experiment Name: At_Drought_Reproduction_P Parameter: Tissue Value: Rosettes
  misc_feature: MA Experiment 20001904 PARAMETER Experiment Name: At_Drought_Reproduction_P Parameter: Treatment Value: Drought vs. No Drought

SEQ ID NO: 31771 - protein, 346 aa, Arabidopsis thaliana; identical to SEQ ID NO: 28181
  peptide (1)..(346): Ceres Seq. ID no. 12482201
  misc_feature (40)..(291): Pfam Name: Peroxidase Pfam Description: Peroxidase
  misc_feature (1)..(328): Homolog of NCBI NO: 2129514 NR Description: peroxidase (EC 1.11.1.7) A4a precursor - Japanese
  misc_feature (5)..(346): Homolog of NCBI NO: 480907 NR Description: peroxidase (EC 1.11.1.7) Cb - Arabidopsis
  misc_feature (5)..(346): Homolog of NCBI NO: 15229084 NR Description: peroxidase
  misc_feature (3)..(346): Homolog of NCBI NO: 21592888 NR Description: peroxidase [Arabidopsis thaliana]
  misc_feature (5)..(346): Homolog of NCBI NO: 15229095 NR Description: peroxidase, putative
  misc_feature (3)..(346): Homolog of NCBI NO: 25453209 NR Description: Peroxidase 32 precursor (Atperox P32) (PRXR3)
  misc_feature (1)..(346): Homolog of NCBI NO: 129809 NR Description: Peroxidase C2 precursor
  misc_feature (1)..(346): Homolog of NCBI NO: 15236608 NR Description: peroxidase, putative; protein id: At4g08780.1
  misc_feature (1)..(346): Homolog of NCBI NO: 22531052 NR Description: peroxidase C2 precursor-like protein [Arabidopsis
  misc_feature (1)..(346): Homolog of NCBI NO: 15236606 NR Description: peroxidase, putative

SEQ ID NO: 31772 - protein, 242 aa, Arabidopsis thaliana; identical to SEQ ID NO: 28182
  peptide (1)..(242): Ceres Seq. ID no. 12482202
  misc_feature (1)..(187): Pfam Name: Peroxidase Pfam Description: Peroxidase
  misc_feature (1)..(224): Homolog of NCBI NO: 2129514 NR Description: peroxidase (EC 1.11.1.7) A4a precursor - Japanese
  misc_feature (1)..(242): Homolog of NCBI NO: 480907 NR Description: peroxidase (EC 1.11.1.7) Cb - Arabidopsis
  misc_feature (1)..(242): Homolog of NCBI NO: 15229084 NR Description: peroxidase
  misc_feature (1)..(242): Homolog of NCBI NO: 21592888 NR Description: peroxidase [Arabidopsis thaliana]
  misc_feature (1)..(242): Homolog of NCBI NO: 15229095 NR Description: peroxidase, putative
  misc_feature (1)..(242): Homolog of NCBI NO: 25453209 NR Description: Peroxidase 32 precursor (Atperox P32) (PRXR3)
  misc_feature (1)..(242): Homolog of NCBI NO: 129809 NR Description: Peroxidase C2 precursor
  misc_feature (1)..(242): Homolog of NCBI NO: 15236608 NR Description: peroxidase, putative; protein id: At4g08780.1
  misc_feature (1)..(242): Homolog of NCBI NO: 22531052 NR Description: peroxidase C2 precursor-like protein [Arabidopsis
  misc_feature (1)..(242): Homolog of NCBI NO: 15236606 NR Description: peroxidase, putative

SEQ ID NO: 31773 - protein, 194 aa, Arabidopsis thaliana; identical to SEQ ID NO: 28183
  peptide (1)..(194): Ceres Seq. ID no. 12482203
  misc_feature (1)..(139): Pfam Name: Peroxidase Pfam Description: Peroxidase
  misc_feature (1)..(176): Homolog of NCBI NO: 2129514 NR Description: peroxidase (EC 1.11.1.7) A4a precursor - Japanese
  misc_feature (1)..(194): Homolog of NCBI NO: 480907 NR Description: peroxidase (EC 1.11.1.7) Cb - Arabidopsis
  misc_feature (1)..(194): Homolog of NCBI NO: 15229084 NR Description: peroxidase
  misc_feature (1)..(194): Homolog of NCBI NO: 21592888 NR Description: peroxidase [Arabidopsis thaliana]
  misc_feature (1)..(194): Homolog of NCBI NO: 15229095 NR Description: peroxidase, putative
  misc_feature (1)..(194): Homolog of NCBI NO: 25453209 NR Description: Peroxidase 32 precursor (Atperox P32) (PRXR3)
  misc_feature (1)..(194): Homolog of NCBI NO: 129809 NR Description: Peroxidase C2 precursor
  misc_feature (1)..(194): Homolog of NCBI NO: 15236608 NR Description: peroxidase, putative; protein id: At4g08780.1
  misc_feature (1)..(194): Homolog of NCBI NO: 22531052 NR Description: peroxidase C2 precursor-like protein [Arabidopsis
  misc_feature (1)..(194): Homolog of NCBI NO: 15236606 NR Description: peroxidase, putative

SEQ ID NO: 31774 - DNA, 2332 bp, Arabidopsis thaliana; identical to SEQ ID NO: 28184
  misc_feature (1)..(2332): Ceres Seq. ID no. 12372009
  misc_feature: MA Experiment ID: 108434 Result: Up-regulated in Transcription
  misc_feature: MA Experiment 108434 PARAMETER Experiment Name: At_Root_Tips_cDNA_P Parameter: Tissue Value: Root Tips
  misc_feature: MA Experiment ID: 108462 Result: Down-regulated in Transcription
  misc_feature: MA Experiment 108462 PARAMETER Experiment Name: At_Germinating_Seeds_cDNA_P Parameter: Age (day) Value: 2 vs. 0
  misc_feature: MA Experiment 108462 PARAMETER Experiment Name: At_Germinating_Seeds_cDNA_P Parameter: Tissue Value: Germinating Seeds
  misc_feature: MA Experiment ID: 108463 Result: Down-regulated in Transcription
  misc_feature: MA Experiment 108463 PARAMETER Experiment Name: At_Germinating_Seeds_cDNA_P Parameter: Age (day) Value: 3 vs. 0
  misc_feature: MA Experiment 108463 PARAMETER Experiment Name: At_Germinating_Seeds_cDNA_P Parameter: Tissue Value: Germinating Seeds
  misc_feature: MA Experiment ID: 108464 Result: Down-regulated in Transcription
  misc_feature: MA Experiment 108464 PARAMETER Experiment Name: At_Germinating_Seeds_cDNA_P Parameter: Age (day) Value: 4 vs. 0
  misc_feature: MA Experiment 108464 PARAMETER Experiment Name: At_Germinating_Seeds_cDNA_P Parameter: Tissue Value: Germinating Seeds
  misc_feature: MA Experiment ID: 20000086 Result: Up-regulated in Transcription
  misc_feature: MA Experiment 20000086 PARAMETER Experiment Name: At_100uM_ABA_Mutants_cDNA_P Parameter: Plant Line Value: CS22
  misc_feature: MA Experiment 20000086 PARAMETER Experiment Name: At_100uM_ABA_Mutants_cDNA_P Parameter: Timepoint (hr) Value: 6
  misc_feature: MA Experiment 20000086 PARAMETER Experiment Name: At_100uM_ABA_Mutants_cDNA_P Parameter: Tissue Value: Aerial
  misc_feature: MA Experiment 20000086 PARAMETER Experiment Name: At_100uM_ABA_Mutants_cDNA_P Parameter: Treatment Value: 100uM ABA vs. No Treatment
  misc_feature: MA Experiment ID: 20000088 Result: Up-regulated in Transcription
  misc_feature: MA Experiment 20000088 PARAMETER Experiment Name: At_100uM_ABA_Mutants_cDNA_P Parameter: Plant Line Value: Landsberg
  misc_feature: MA Experiment 20000088 PARAMETER Experiment Name: At_100uM_ABA_Mutants_cDNA_P Parameter: Timepoint (hr) Value: 6
  misc_feature: MA Experiment 20000088 PARAMETER Experiment Name: At_100uM_ABA_Mutants_cDNA_P Parameter: Tissue Value: Aerial
  misc_feature: MA Experiment 20000088 PARAMETER Experiment Name: At_100uM_ABA_Mutants_cDNA_P Parameter: Treatment Value: 100uM ABA vs. No Treatment
  misc_feature: MA Experiment ID: 20000179 Result: Down-regulated in Transcription
  misc_feature: MA Experiment 20000179 PARAMETER Experiment Name: At_Germinating_Seeds_P Parameter: Age (hr) Value: 6 vs. 0
  misc_feature: MA Experiment 20000179 PARAMETER Experiment Name: At_Germinating_Seeds_P Parameter: Tissue Value: Germinating Seeds
  misc_feature: MA Experiment ID: 20000180 Result: Down-regulated in Transcription
  misc_feature: MA Experiment 20000180 PARAMETER Experiment Name: At_Germinating_Seeds_P Parameter: Age (hr) Value: 24 vs. 0
  misc_feature: MA Experiment 20000180 PARAMETER Experiment Name: At_Germinating_Seeds_P Parameter: Tissue Value: Germinating Seeds
  misc_feature: MA Experiment ID: 20001248 Result: Up-regulated in Transcription
  misc_feature: MA Experiment 20001248 PARAMETER Experiment Name: At_Far-red-induction_P Parameter: Age (day) Value: 7
  misc_feature: MA Experiment 20001248 PARAMETER Experiment Name: At_Far-red-induction_P Parameter: Light Value: Far-red vs. White
  misc_feature: MA Experiment 20001248 PARAMETER Experiment Name: At_Far-red-induction_P Parameter: Organism Value: A. thaliana
  misc_feature: MA Experiment 20001248 PARAMETER Experiment Name: At_Far-red-induction_P Parameter: Plant Line Value: Columbia
  misc_feature: MA Experiment 20001248 PARAMETER Experiment Name: At_Far-red-induction_P Parameter: Timepoint (hr) Value: 4
  misc_feature: MA Experiment 20001248 PARAMETER Experiment Name: At_Far-red-induction_P Parameter: Tissue Value: Whole Plant
  misc_feature: MA Experiment ID: 20001458 Result: Up-regulated in Transcription
  misc_feature: MA Experiment 20001458 PARAMETER Experiment Name: At_50mM_NH4NO3_L-to-H_P Parameter: Age (day) Value: Undefined
  misc_feature: MA Experiment 20001458 PARAMETER Experiment Name: At_50mM_NH4NO3_L-to-H_P Parameter: Organism Value: Undefined
  misc_feature: MA Experiment 20001458 PARAMETER Experiment Name: At_50mM_NH4NO3_L-to-H_P Parameter: Plant Line Value: Undefined
  misc_feature: MA Experiment 20001458 PARAMETER Experiment Name: At_50mM_NH4NO3_L-to-H_P Parameter: Timepoint (hr) Value: 2
  misc_feature: MA Experiment 20001458 PARAMETER Experiment Name: At_50mM_NH4NO3_L-to-H_P Parameter: Tissue Value: Siliques
  misc_feature: MA Experiment 20001458 PARAMETER Experiment Name: At_50mM_NH4NO3_L-to-H_P Parameter: Treatment Value: 50mM NH4NO3 vs. 100mM Manitol
  misc_feature: MA Experiment ID: 20001555 Result: Up-regulated in Transcription
  misc_feature: MA Experiment 20001555 PARAMETER Experiment Name: At_Drought_Soil_Dry_P Parameter: Age (day) Value: 24
  misc_feature: MA Experiment 20001555 PARAMETER Experiment Name: At_Drought_Soil_Dry_P Parameter: Organism Value: A. thaliana
  misc_feature: MA Experiment 20001555 PARAMETER Experiment Name: At_Drought_Soil_Dry_P Parameter: Plant Line Value: WS
  misc_feature: MA Experiment 20001555 PARAMETER Experiment Name: At_Drought_Soil_Dry_P Parameter: Post Timepoint (hr) Value: None
  misc_feature: MA Experiment 20001555 PARAMETER Experiment Name: At_Drought_Soil_Dry_P Parameter: Post-Treatment Value: None
  misc_feature: MA Experiment 20001555 PARAMETER Experiment Name: At_Drought_Soil_Dry_P Parameter: Timepoint (day) Value: 10
  misc_feature: MA Experiment 20001555 PARAMETER Experiment Name: At_Drought_Soil_Dry_P Parameter: Treatment Value: Drought vs. No Drought
  misc_feature: MA Experiment ID: 20001556 Result: Up-regulated in Transcription
  misc_feature: MA Experiment 20001556 PARAMETER Experiment Name: At_Drought_Soil_Dry_P Parameter: Age (day) Value: 26
  misc_feature: MA Experiment 20001556 PARAMETER Experiment Name: At_Drought_Soil_Dry_P Parameter: Organism Value: A. thaliana
  misc_feature: MA Experiment 20001556 PARAMETER Experiment Name: At_Drought_Soil_Dry_P Parameter: Plant Line Value: WS
  misc_feature: MA Experiment 20001556 PARAMETER Experiment Name: At_Drought_Soil_Dry_P Parameter: Post Timepoint (hr) Value: None
  misc_feature: MA Experiment 20001556 PARAMETER Experiment Name: At_Drought_Soil_Dry_P Parameter: Post-Treatment Value: None
  misc_feature: MA Experiment 20001556 PARAMETER Experiment Name: At_Drought_Soil_Dry_P Parameter: Timepoint (day) Value: 12
  misc_feature: MA Experiment 20001556 PARAMETER Experiment Name: At_Drought_Soil_Dry_P Parameter: Treatment Value: Drought vs. No Drought
  misc_feature: MA Experiment ID: 20001557 Result: Up-regulated in Transcription
  misc_feature: MA Experiment 20001557 PARAMETER Experiment Name: At_Drought_Soil_Dry_P Parameter: Age (day) Value: 27
  misc_feature: MA Experiment 20001557 PARAMETER Experiment Name: At_Drought_Soil_Dry_P Parameter: Organism Value: A. thaliana
  misc_feature: MA Experiment 20001557 PARAMETER Experiment Name: At_Drought_Soil_Dry_P Parameter: Plant Line Value: WS
  misc_feature: MA Experiment 20001557 PARAMETER Experiment Name: At_Drought_Soil_Dry_P Parameter: Post Timepoint (hr) Value: 3
  misc_feature: MA Experiment 20001557 PARAMETER Experiment Name: At_Drought_Soil_Dry_P Parameter: Post-Treatment Value: Re-Water vs. No Drought
  misc_feature: MA Experiment 20001557 PARAMETER Experiment Name: At_Drought_Soil_Dry_P Parameter: Timepoint (day) Value: 13
  misc_feature: MA Experiment 20001557 PARAMETER Experiment Name: At_Drought_Soil_Dry_P Parameter: Treatment Value: Drought vs. No Drought
  misc_feature: MA Experiment ID: 20001558 Result: Up-regulated in Transcription
  misc_feature: MA Experiment 20001558 PARAMETER Experiment Name: At_Drought_Soil_Dry_P Parameter: Age (day) Value: 27
  misc_feature: MA Experiment 20001558 PARAMETER Experiment Name: At_Drought_Soil_Dry_P Parameter: Organism Value: A. thaliana
  misc_feature: MA Experiment 20001558 PARAMETER Experiment Name: At_Drought_Soil_Dry_P Parameter: Plant Line Value: WS
  misc_feature: MA Experiment 20001558 PARAMETER Experiment Name: At_Drought_Soil_Dry_P Parameter: Post Timepoint (hr) Value: 6
  misc_feature: MA Experiment 20001558 PARAMETER Experiment Name: At_Drought_Soil_Dry_P Parameter: Post-Treatment Value: Re-Water vs. No Drought
  misc_feature: MA Experiment 20001558 PARAMETER Experiment Name: At_Drought_Soil_Dry_P Parameter: Timepoint (day) Value: 13
  misc_feature: MA Experiment 20001558 PARAMETER Experiment Name: At_Drought_Soil_Dry_P Parameter: Treatment Value: Drought vs. No Drought
  misc_feature: MA Experiment ID: 20001559 Result: Up-regulated in Transcription
  misc_feature: MA Experiment 20001559 PARAMETER Experiment Name: At_Drought_Soil_Dry_P Parameter: Age (day) Value: 28
  misc_feature: MA Experiment 20001559 PARAMETER Experiment Name: At_Drought_Soil_Dry_P Parameter: Organism Value: A. thaliana
  misc_feature: MA Experiment 20001559 PARAMETER Experiment Name: At_Drought_Soil_Dry_P Parameter: Plant Line Value: WS
  misc_feature: MA Experiment 20001559 PARAMETER Experiment Name: At_Drought_Soil_Dry_P Parameter: Post Timepoint (hr) Value: 29
  misc_feature: MA Experiment 20001559 PARAMETER Experiment Name: At_Drought_Soil_Dry_P Parameter: Post-Treatment Value: Re-Water vs. No Drought
  misc_feature: MA Experiment 20001559 PARAMETER Experiment Name: At_Drought_Soil_Dry_P Parameter: Timepoint (day) Value: 14
  misc_feature: MA Experiment 20001559 PARAMETER Experiment Name: At_Drought_Soil_Dry_P Parameter: Treatment Value: Drought vs. No Drought

SEQ ID NO: 31775 - protein, 671 aa, Arabidopsis thaliana; identical to SEQ ID NO: 27774
  peptide (1)..(671): Ceres Seq. ID no. 12372010
  misc_feature (109)..(327): Pfam Name: DEAD/DEAH box helicase Pfam Description: DEAD/DEAH box helicase
  misc_feature (1)..(669): Homolog of NCBI NO: 16975508 NR Description: RNA helicase II/Gu [Xenopus laevis]
  misc_feature (23)..(669): Homolog of NCBI NO: 10764780 NR Description: RNA helicase II/Gu [Xenopus laevis]
  misc_feature (1)..(670): Homolog of NCBI NO: 31455230 NR Description: DDX21 protein [Homo sapiens]
  misc_feature (1)..(670): Homolog of NCBI NO: 2135315 NR Description: RNA helicase Gu - human (fragment)
  misc_feature (12)..(670): Homolog of NCBI NO: 26368308 NR Description: unnamed protein product [Mus musculus]
  misc_feature (12)..(670): Homolog of NCBI NO: 21410145 NR Description: Similar to DEAD/H (Asp-Glu-Ala-Asp/His) box
  misc_feature (12)..(670): Homolog of NCBI NO: 10092595 NR Description: DEAD/H (Asp-Glu-Ala-Asp/His) box polypeptide 21
  misc_feature (12)..(670): Homolog of NCBI NO: 13959325 NR Description: Nucleolar RNA helicase II (Nucleolar RNA helicase
  misc_feature (1)..(671): Homolog of NCBI NO: 7484683 NR Description: RNA helicase prh75 - spinach
  misc_feature (6)..(667): Homolog of NCBI NO: 7211427 NR Description: RNA helicase [Vigna radiata]

SEQ ID NO: 31776 - protein, 667 aa, Arabidopsis thaliana; identical to SEQ ID NO: 27775
  peptide (1)..(667): Ceres Seq. ID no. 12372011
  misc_feature (105)..(323): Pfam Name: DEAD/DEAH box helicase Pfam Description: DEAD/DEAH box helicase
  misc_feature (1)..(665): Homolog of NCBI NO: 16975508 NR Description: RNA helicase II/Gu [Xenopus laevis]
  misc_feature (19)..(665): Homolog of NCBI NO: 10764780 NR Description: RNA helicase II/Gu [Xenopus laevis]
  misc_feature (1)..(666): Homolog of NCBI NO: 31455230 NR Description: DDX21 protein [Homo sapiens]
  misc_feature (1)..(666): Homolog of NCBI NO: 2135315 NR Description: RNA helicase Gu - human (fragment)
  misc_feature (8)..(666): Homolog of NCBI NO: 21410145 NR Description: Similar to DEAD/H (Asp-Glu-Ala-Asp/His) box
  misc_feature (8)..(666): Homolog of NCBI NO: 26368308 NR Description: unnamed protein product [Mus musculus]
  misc_feature (8)..(666): Homolog of NCBI NO: 10092595 NR Description: DEAD/H (Asp-Glu-Ala-Asp/His) box polypeptide 21
  misc_feature (8)..(666): Homolog of NCBI NO: 13959325 NR Description: Nucleolar RNA helicase II (Nucleolar RNA helicase
  misc_feature (1)..(667): Homolog of NCBI NO: 7484683 NR Description: RNA helicase prh75 - spinach
  misc_feature (2)..(663): Homolog of NCBI NO: 7211427 NR Description: RNA helicase [Vigna radiata]

SEQ ID NO: 31777 - protein, 657 aa, Arabidopsis thaliana; identical to SEQ ID NO: 27776
  peptide (1)..(657): Ceres Seq. ID no. 12372012
  misc_feature (95)..(313): Pfam Name: DEAD/DEAH box helicase Pfam Description: DEAD/DEAH box helicase
  misc_feature (1)..(655): Homolog of NCBI NO: 16975508 NR Description: RNA helicase II/Gu [Xenopus laevis]
  misc_feature (9)..(655): Homolog of NCBI NO: 10764780 NR Description: RNA helicase II/Gu [Xenopus laevis]
  misc_feature (1)..(656): Homolog of NCBI NO: 31455230 NR Description: DDX21 protein [Homo sapiens]
  misc_feature (1)..(656): Homolog of NCBI NO: 2135315 NR Description: RNA helicase Gu - human (fragment)
  misc_feature (1)..(656): Homolog of NCBI NO: 26368308 NR Description: unnamed protein product [Mus musculus]
  misc_feature (1)..(656): Homolog of NCBI NO: 21410145 NR Description: Similar to DEAD/H (Asp-Glu-Ala-Asp/His) box
  misc_feature (1)..(656): Homolog of NCBI NO: 10092595 NR Description: DEAD/H (Asp-Glu-Ala-Asp/His) box polypeptide 21
  misc_feature (1)..(656): Homolog of NCBI NO: 13959325 NR Description: Nucleolar RNA helicase II (Nucleolar RNA helicase
  misc_feature (1)..(657): Homolog of NCBI NO: 7484683 NR Description: RNA helicase prh75 - spinach
  misc_feature (1)..(653): Homolog of NCBI NO: 7211427 NR Description: RNA helicase [Vigna radiata]

SEQ ID NO: 31778 - DNA, 1591 bp, Arabidopsis thaliana; identical to SEQ ID NO: 28188
  misc_feature (1)..(1591): Ceres Seq. ID no. 12324793
  misc_feature: MA Experiment ID: 108464 Result: Up-regulated in Transcription
  misc_feature: MA Experiment 108464 PARAMETER Experiment Name: At_Germinating_Seeds_cDNA_P Parameter: Age (day) Value: 4 vs. 0
  misc_feature: MA Experiment 108464 PARAMETER Experiment Name: At_Germinating_Seeds_cDNA_P Parameter: Tissue Value: Germinating Seeds
  misc_feature: MA Experiment ID: 108573 Result: Up-regulated in Transcription
  misc_feature: MA Experiment 108573 PARAMETER Experiment Name: At_Drought_cDNA_P Parameter: Timepoint (hr) Value: 6
  misc_feature: MA Experiment 108573 PARAMETER Experiment Name: At_Drought_cDNA_P Parameter: Tissue Value: Aerial
  misc_feature: MA Experiment 108573 PARAMETER Experiment Name: At_Drought_cDNA_P Parameter: Treatment Value: Drought vs. No Drought
  misc_feature: MA Experiment ID: 108585 Result: Up-regulated in Transcription
  misc_feature: MA Experiment 108585 PARAMETER Experiment Name: At_5mM_NaNP_cDNA_P Parameter: Timepoint (hr) Value: 6
  misc_feature: MA Experiment 108585 PARAMETER Experiment Name: At_5mM_NaNP_cDNA_P Parameter: Tissue Value: Aerial
  misc_feature: MA Experiment 108585 PARAMETER Experiment Name: At_5mM_NaNP_cDNA_P Parameter: Treatment Value: null
  misc_feature: MA Experiment ID: 20000087 Result: Down-regulated in Transcription
  misc_feature: MA Experiment 20000087 PARAMETER Experiment Name: At_100uM_ABA_Mutants_cDNA_P Parameter: Plant Line Value: WS
  misc_feature: MA Experiment 20000087 PARAMETER Experiment Name: At_100uM_ABA_Mutants_cDNA_P Parameter: Timepoint (hr) Value: 6
  misc_feature: MA Experiment 20000087 PARAMETER Experiment Name: At_100uM_ABA_Mutants_cDNA_P Parameter: Tissue Value: Aerial
  misc_feature: MA Experiment 20000087 PARAMETER Experiment Name: At_100uM_ABA_Mutants_cDNA_P Parameter: Treatment Value: 100uM ABA vs. No Treatment
  misc_feature: MA Experiment ID: 20000089 Result: Down-regulated in Transcription
  misc_feature: MA Experiment ID: 20000111 Result: Down-regulated in Transcription
  misc_feature: MA Experiment 20000111 PARAMETER Experiment Name: At_42deg_Heat_cDNA_P Parameter: Temperature (deg C) Value: 42 vs. 22
  misc_feature: MA Experiment 20000111 PARAMETER Experiment Name: At_42deg_Heat_cDNA_P Parameter: Timepoint (hr) Value: 6
  misc_feature: MA Experiment 20000111 PARAMETER Experiment Name: At_42deg_Heat_cDNA_P Parameter: Tissue Value: Aerial
  misc_feature: MA Experiment ID: 20000113 Result: Down-regulated in Transcription
  misc_feature: MA Experiment 20000113 PARAMETER Experiment Name: At_42deg_Heat_cDNA_P Parameter: Temperature (deg C) Value: 42 vs. 22
  misc_feature: MA Experiment 20000113 PARAMETER Experiment Name: At_42deg_Heat_cDNA_P Parameter: Timepoint (hr) Value: 8
  misc_feature: MA Experiment 20000113 PARAMETER Experiment Name: At_42deg_Heat_cDNA_P Parameter: Tissue Value: Aerial
  misc_feature: MA Experiment ID: 20000173 Result: Down-regulated in Transcription
  misc_feature: MA Experiment 20000173 PARAMETER Experiment Name: At_42deg_Heat_P Parameter: Age (day) Value: 14
  misc_feature: MA Experiment 20000173 PARAMETER Experiment Name: At_42deg_Heat_P Parameter: Organism Value: A. thaliana
  misc_feature: MA Experiment 20000173 PARAMETER Experiment Name: At_42deg_Heat_P Parameter: Plant Line Value: WS
  misc_feature: MA Experiment 20000173 PARAMETER Experiment Name: At_42deg_Heat_P Parameter: Temperature (deg C) Value: 42 vs. 22
  misc_feature: MA Experiment 20000173 PARAMETER Experiment Name: At_42deg_Heat_P Parameter: Timepoint (hr) Value: 6
  misc_feature: MA Experiment 20000173 PARAMETER Experiment Name: At_42deg_Heat_P Parameter: Tissue Value: Aerial
  misc_feature: MA Experiment ID: 20000184 Result: Up-regulated in Transcription
  misc_feature: MA Experiment 20000184 PARAMETER Experiment Name: At_Shoots__P Parameter: Age (day) Value: 7
  misc_feature: MA Experiment 20000184 PARAMETER Experiment Name: At_Shoots__P Parameter: Tissue Value: Shoots vs. Whole Plant
  misc_feature: MA Experiment ID: 20000437 Result: Down-regulated in Transcription
  misc_feature: MA Experiment 20000437 PARAMETER Experiment Name: At_Drought_P Parameter: Age (day) Value: 8
  misc_feature: MA Experiment 20000437 PARAMETER Experiment Name: At_Drought_P Parameter: Organism Value: A. thaliana
  misc_feature: MA Experiment 20000437 PARAMETER Experiment Name: At_Drought_P Parameter: Plant Line Value: WS
  misc_feature: MA Experiment 20000437 PARAMETER Experiment Name: At_Drought_P Parameter: Timepoint (hr) Value: 24
  misc_feature: MA Experiment 20000437 PARAMETER Experiment Name: At_Drought_P Parameter: Tissue Value: Whole Plant
  misc_feature: MA Experiment 20000437 PARAMETER Experiment Name: At_Drought_P Parameter: Treatment Value: Drought vs. No Drought
  misc_feature: MA Experiment ID: 20000439 Result: Up-regulated in Transcription
  misc_feature: MA Experiment 20000439 PARAMETER Experiment Name: At_Roots__P Parameter: Age (day) Value: 14 vs. 21
  misc_feature: MA Experiment 20000439 PARAMETER Experiment Name: At_Roots__P Parameter: Organism Value: A. thaliana
  misc_feature: MA Experiment 20000439 PARAMETER Experiment Name: At_Roots__P Parameter: Tissue Value: Roots vs. Whole Plant
  misc_feature: MA Experiment ID: 20001558 Result: Down-regulated in Transcription
  misc_feature: MA Experiment 20001558 PARAMETER Experiment Name: At_Drought_Soil_Dry_P Parameter: Age (day) Value: 27
  misc_feature: MA Experiment 20001558 PARAMETER Experiment Name: At_Drought_Soil_Dry_P Parameter: Organism Value: A. thaliana
  misc_feature: MA Experiment 20001558 PARAMETER Experiment Name: At_Drought_Soil_Dry_P Parameter: Plant Line Value: WS
  misc_feature: MA Experiment 20001558 PARAMETER Experiment Name: At_Drought_Soil_Dry_P Parameter: Post Timepoint (hr) Value: 6
  misc_feature: MA Experiment 20001558 PARAMETER Experiment Name: At_Drought_Soil_Dry_P Parameter: Post-Treatment Value: Re-Water vs. No Drought
  misc_feature: MA Experiment 20001558 PARAMETER Experiment Name: At_Drought_Soil_Dry_P Parameter: Timepoint (day) Value: 13
  misc_feature: MA Experiment 20001558 PARAMETER Experiment Name: At_Drought_Soil_Dry_P Parameter: Treatment Value: Drought vs. No Drought

SEQ ID NO: 31779 - protein, 152 aa, Arabidopsis thaliana; identical to SEQ ID NO: 28189
  peptide (1)..(152): Ceres Seq. ID no. 12324794
  misc_feature (1)..(149): Pfam Name: Protein of unknown function (DUF789) Pfam Description: Protein of unknown function (DUF789)
  misc_feature (1)..(152): Homolog of NCBI NO: 34914654 NR Description: P0504D03.18 [Oryza sativa (japonica
  misc_feature (1)..(149): Homolog of NCBI NO: 15450996 NR Description: Unknown protein [Arabidopsis thaliana]
  misc_feature (1)..(149): Homolog of NCBI NO: 22327664 NR Description: putative protein
  misc_feature (1)..(149): Homolog of NCBI NO: 10177151 NR Description: gb|AAF31026.1~gene_id:K21P3.10~similar to unknown
  misc_feature (50)..(152): Homolog of NCBI NO: 25373432 NR Description: hypothetical protein At2g01260 [imported] -
  misc_feature (1)..(152): Homolog of NCBI NO: 34897254 NR Description: hypothetical protein [Oryza sativa (japonica
  misc_feature (1)..(152): Homolog of NCBI NO: 31249743 NR Description: hypothetical protein [Oryza sativa (japonica
  misc_feature (1)..(152): Homolog of NCBI NO: 22329567 NR Description: hypothetical protein
  misc_feature (1)..(47): Homolog of NCBI NO: 25373432 NR Description: hypothetical protein At2g01260 [imported] -
  misc_feature (1)..(152): Homolog of NCBI NO: 18379188 NR Description: predicted by genscan and genefinder

SEQ ID NO: 31780 - protein, 122 aa, Arabidopsis thaliana; identical to SEQ ID NO: 28190
  peptide (1)..(122): Ceres Seq. ID no. 12324795
  misc_feature (1)..(119): Pfam Name: Protein of unknown function (DUF789) Pfam Description: Protein of unknown function (DUF789)
  misc_feature (1)..(122): Homolog of NCBI NO: 34914654 NR Description: P0504D03.18 [Oryza sativa (japonica
  misc_feature (1)..(119): Homolog of NCBI NO: 15450996 NR Description: Unknown protein [Arabidopsis thaliana]
  misc_feature (1)..(119): Homolog of NCBI NO: 22327664 NR Description: putative protein
  misc_feature (1)..(119): Homolog of NCBI NO: 10177151 NR Description: gb|AAF31026.1~gene_id:K21P3.10~similar to unknown
  misc_feature (20)..(122): Homolog of NCBI NO: 25373432 NR Description: hypothetical protein At2g01260 [imported] -
  misc_feature (1)..(122): Homolog of NCBI NO: 34897254 NR Description: hypothetical protein [Oryza sativa (japonica
  misc_feature (1)..(122): Homolog of NCBI NO: 31249743 NR Description: hypothetical protein [Oryza sativa (japonica
  misc_feature (1)..(122): Homolog of NCBI NO: 22329567 NR Description: hypothetical protein
  misc_feature (1)..(17): Homolog of NCBI NO: 25373432 NR Description: hypothetical protein At2g01260 [imported] -
  misc_feature (1)..(122): Homolog of NCBI NO: 18379188 NR Description: predicted by genscan and genefinder

SEQ ID NO: 31781 - protein, 79 aa, Arabidopsis thaliana; identical to SEQ ID NO: 28191
  peptide (1)..(79): Ceres Seq. ID no. 12324796

SEQ ID NO: 31782 - DNA, 1108 bp, Arabidopsis thaliana; identical to SEQ ID NO: 28192
  misc_feature (1)..(1108): Ceres Seq. ID no. 13486907
  misc_feature: MA Experiment ID: 108434 Result: Up-regulated in Transcription
  misc_feature: MA Experiment 108434 PARAMETER Experiment Name: At_Root_Tips_cDNA_P Parameter: Tissue Value: Root Tips
  misc_feature: MA Experiment ID: 108461 Result: Up-regulated in Transcription
  misc_feature: MA Experiment 108461 PARAMETER Experiment Name: At_Germinating_Seeds_cDNA_P Parameter: Age (day) Value: 1 vs. 0
  misc_feature: MA Experiment 108461 PARAMETER Experiment Name: At_Germinating_Seeds_cDNA_P Parameter: Tissue Value: Germinating Seeds
  misc_feature: MA Experiment ID: 108462 Result: Up-regulated in Transcription
  misc_feature: MA Experiment 108462 PARAMETER Experiment Name: At_Germinating_Seeds_cDNA_P Parameter: Age (day) Value: 2 vs. 0
  misc_feature: MA Experiment 108462 PARAMETER Experiment Name: At_Germinating_Seeds_cDNA_P Parameter: Tissue Value: Germinating Seeds
  misc_feature: MA Experiment ID: 108463 Result: Up-regulated in Transcription
  misc_feature: MA Experiment 108463 PARAMETER Experiment Name: At_Germinating_Seeds_cDNA_P Parameter: Age (day) Value: 3 vs. 0
  misc_feature: MA Experiment 108463 PARAMETER Experiment Name: At_Germinating_Seeds_cDNA_P Parameter: Tissue Value: Germinating Seeds
  misc_feature: MA Experiment ID: 108464 Result: Up-regulated in Transcription
  misc_feature: MA Experiment 108464 PARAMETER Experiment Name: At_Germinating_Seeds_cDNA_P Parameter: Age (day) Value: 4 vs. 0
  misc_feature: MA Experiment 108464 PARAMETER Experiment Name: At_Germinating_Seeds_cDNA_P Parameter: Tissue Value: Germinating Seeds
  misc_feature: MA Experiment ID: 108595 Result: Down-regulated in Transcription
  misc_feature: MA Experiment 108595 PARAMETER Experiment Name: At_Ler-pi_Ovule_cDNA_P Parameter: Plant Line Value: null
  misc_feature: MA Experiment ID: 20000069 Result: Down-regulated in Transcription
  misc_feature: MA Experiment 20000069 PARAMETER Experiment Name: At_100uM_ABA_Mutants_cDNA_P Parameter: Plant Line Value: CS23
  misc_feature: MA Experiment 20000069 PARAMETER Experiment Name: At_100uM_ABA_Mutants_cDNA_P Parameter: Timepoint (hr) Value: 6
  misc_feature: MA Experiment 20000069 PARAMETER Experiment Name: At_100uM_ABA_Mutants_cDNA_P Parameter: Tissue Value: Aerial
  misc_feature: MA Experiment 20000069 PARAMETER Experiment Name: At_100uM_ABA_Mutants_cDNA_P Parameter: Treatment Value: 100uM ABA vs. No Treatment
  misc_feature: MA Experiment ID: 20000070 Result: Down-regulated in Transcription
  misc_feature: MA Experiment 20000070 PARAMETER Experiment Name: At_100uM_ABA_Mutants_cDNA_P Parameter: Plant Line Value: CS24
  misc_feature: MA Experiment 20000070 PARAMETER Experiment Name: At_100uM_ABA_Mutants_cDNA_P Parameter: Timepoint (hr) Value: 6
  misc_feature: MA Experiment 20000070 PARAMETER Experiment Name: At_100uM_ABA_Mutants_cDNA_P Parameter: Tissue Value: Aerial
  misc_feature: MA Experiment 20000070 PARAMETER Experiment Name: At_100uM_ABA_Mutants_cDNA_P Parameter: Treatment Value: 100uM ABA vs. No Treatment
  misc_feature: MA Experiment ID: 20000071 Result: Down-regulated in Transcription
  misc_feature: MA Experiment 20000071 PARAMETER Experiment Name: At_100uM_ABA_Mutants_cDNA_P Parameter: Plant Line Value: CS8104
  misc_feature: MA Experiment 20000071 PARAMETER Experiment Name: At_100uM_ABA_Mutants_cDNA_P Parameter: Timepoint (hr) Value: 6
  misc_feature: MA Experiment 20000071 PARAMETER Experiment Name: At_100uM_ABA_Mutants_cDNA_P Parameter: Tissue Value: Aerial
  misc_feature: MA Experiment 20000071 PARAMETER Experiment Name: At_100uM_ABA_Mutants_cDNA_P Parameter: Treatment Value: 100uM ABA vs. No Treatment
  misc_feature: MA Experiment ID: 20000072 Result: Down-regulated in Transcription
  misc_feature: MA Experiment 20000072 PARAMETER Experiment Name: At_100uM_ABA_Mutants_cDNA_P Parameter: Plant Line Value: CS8105
  misc_feature: MA Experiment 20000072 PARAMETER Experiment Name: At_100uM_ABA_Mutants_cDNA_P Parameter: Timepoint (hr) Value: 6
  misc_feature: MA Experiment 20000072 PARAMETER Experiment Name: At_100uM_ABA_Mutants_cDNA_P Parameter: Tissue Value: Aerial
  misc_feature: MA Experiment 20000072 PARAMETER Experiment Name: At_100uM_ABA_Mutants_cDNA_P Parameter: Treatment Value: 100uM ABA vs. No Treatment
  misc_feature: MA Experiment ID: 20000086 Result: Down-regulated in Transcription
  misc_feature: MA Experiment 20000086 PARAMETER Experiment Name: At_100uM_ABA_Mutants_cDNA_P Parameter: Plant Line Value: CS22
  misc_feature: MA Experiment 20000086 PARAMETER Experiment Name: At_100uM_ABA_Mutants_cDNA_P Parameter: Timepoint (hr) Value: 6
  misc_feature: MA Experiment 20000086 PARAMETER Experiment Name: At_100uM_ABA_Mutants_cDNA_P Parameter: Tissue Value: Aerial
  misc_feature: MA Experiment 20000086 PARAMETER Experiment Name: At_100uM_ABA_Mutants_cDNA_P Parameter: Treatment Value: 100uM ABA vs. No Treatment
  misc_feature: MA Experiment ID: 20000087 Result: Down-regulated in Transcription
  misc_feature: MA Experiment 20000087 PARAMETER Experiment Name: At_100uM_ABA_Mutants_cDNA_P Parameter: Plant Line Value: WS
  misc_feature: MA Experiment 20000087 PARAMETER Experiment Name: At_100uM_ABA_Mutants_cDNA_P Parameter: Timepoint (hr) Value: 6
  misc_feature: MA Experiment 20000087 PARAMETER Experiment Name: At_100uM_ABA_Mutants_cDNA_P Parameter: Tissue Value: Aerial
  misc_feature: MA Experiment 20000087 PARAMETER Experiment Name: At_100uM_ABA_Mutants_cDNA_P Parameter: Treatment Value: 100uM ABA vs. No Treatment
  misc_feature: MA Experiment ID: 20000088 Result: Down-regulated in Transcription
  misc_feature: MA Experiment 20000088 PARAMETER Experiment Name: At_100uM_ABA_Mutants_cDNA_P Parameter: Plant Line Value: Landsberg
  misc_feature: MA Experiment 20000088 PARAMETER Experiment Name: At_100uM_ABA_Mutants_cDNA_P Parameter: Timepoint (hr) Value: 6
  misc_feature: MA Experiment 20000088 PARAMETER Experiment Name: At_100uM_ABA_Mutants_cDNA_P Parameter: Tissue Value: Aerial
  misc_feature: MA Experiment 20000088 PARAMETER Experiment Name: At_100uM_ABA_Mutants_cDNA_P Parameter: Treatment Value: 100uM ABA vs. No Treatment
  misc_feature: MA Experiment ID: 20000089 Result: Down-regulated in Transcription
  misc_feature: MA Experiment ID: 20000090 Result: Down-regulated in Transcription
  misc_feature: MA Experiment ID: 20000117 Result: Down-regulated in Transcription
  misc_feature: MA Experiment 20000117 PARAMETER Experiment Name: At_100uM_ABA_Mutants_cDNA_P Parameter: Plant Line Value: Columbia
  misc_feature: MA Experiment 20000117 PARAMETER Experiment Name: At_100uM_ABA_Mutants_cDNA_P Parameter: Timepoint (hr) Value: 6
  misc_feature: MA Experiment 20000117 PARAMETER Experiment Name: At_100uM_ABA_Mutants_cDNA_P Parameter: Tissue Value: Aerial
  misc_feature: MA Experiment 20000117 PARAMETER Experiment Name: At_100uM_ABA_Mutants_cDNA_P Parameter: Treatment Value: 100uM ABA vs. No Treatment
  misc_feature: MA Experiment ID: 20000180 Result: Up-regulated in Transcription
  misc_feature: MA Experiment 20000180 PARAMETER Experiment Name: At_Germinating_Seeds_P Parameter: Age (hr) Value: 24 vs. 0
  misc_feature: MA Experiment 20000180 PARAMETER Experiment Name: At_Germinating_Seeds_P Parameter: Tissue Value: Germinating Seeds
  misc_feature: MA Experiment ID: 20000184 Result: Up-regulated in Transcription
  misc_feature: MA Experiment 20000184 PARAMETER Experiment Name: At_Shoots__P Parameter: Age (day) Value: 7
  misc_feature: MA Experiment 20000184 PARAMETER Experiment Name: At_Shoots__P Parameter: Tissue Value: Shoots vs. Whole Plant
  misc_feature: MA Experiment ID: 20000185 Result: Down-regulated in Transcription
  misc_feature: MA Experiment 20000185 PARAMETER Experiment Name: At_Roots__P Parameter: Age (day) Value: 7 vs. 21
  misc_feature: MA Experiment 20000185 PARAMETER Experiment Name: At_Roots__P Parameter: Organism Value: A. thaliana
  misc_feature: MA Experiment 20000185 PARAMETER Experiment Name: At_Roots__P Parameter: Tissue Value: Roots vs. Whole Plant
  misc_feature: MA Experiment ID: 20000436 Result: Down-regulated in Transcription
  misc_feature: MA Experiment 20000436 PARAMETER Experiment Name: At_Drought_P Parameter: Age (day) Value: 7
  misc_feature: MA Experiment 20000436 PARAMETER Experiment Name: At_Drought_P Parameter: Organism Value: A. thaliana
  misc_feature: MA Experiment 20000436 PARAMETER Experiment Name: At_Drought_P Parameter: Plant Line Value: WS
  misc_feature: MA Experiment 20000436 PARAMETER Experiment Name: At_Drought_P Parameter: Timepoint (hr) Value: 12
  misc_feature: MA Experiment 20000436 PARAMETER Experiment Name: At_Drought_P Parameter: Tissue Value: Whole Plant
  misc_feature: MA Experiment 20000436 PARAMETER Experiment Name: At_Drought_P Parameter: Treatment Value: Drought vs. No Drought
  misc_feature: MA Experiment ID: 20000437 Result: Down-regulated in Transcription
  misc_feature: MA Experiment 20000437 PARAMETER Experiment Name: At_Drought_P Parameter: Age (day) Value: 8
  misc_feature: MA Experiment 20000437 PARAMETER Experiment Name: At_Drought_P Parameter: Organism Value: A. thaliana
  misc_feature: MA Experiment 20000437 PARAMETER Experiment Name: At_Drought_P Parameter: Plant Line Value: WS
  misc_feature: MA Experiment 20000437 PARAMETER Experiment Name: At_Drought_P Parameter: Timepoint (hr) Value: 24
  misc_feature: MA Experiment 20000437 PARAMETER Experiment Name: At_Drought_P Parameter: Tissue Value: Whole Plant
  misc_feature: MA Experiment 20000437 PARAMETER Experiment Name: At_Drought_P Parameter: Treatment Value: Drought vs. No Drought
  misc_feature: MA Experiment ID: 20000438 Result: Up-regulated in Transcription
  misc_feature: MA Experiment 20000438 PARAMETER Experiment Name: At_Shoots__P Parameter: Age (day) Value: 14
  misc_feature: MA Experiment 20000438 PARAMETER Experiment Name: At_Shoots__P Parameter: Tissue Value: Shoots vs. Whole Plant
  misc_feature: MA Experiment ID: 20000439 Result: Down-regulated in Transcription
  misc_feature: MA Experiment 20000439 PARAMETER Experiment Name: At_Roots__P Parameter: Age (day) Value: 14 vs. 21
  misc_feature: MA Experiment 20000439 PARAMETER Experiment Name: At_Roots__P Parameter: Organism Value: A. thaliana
  misc_feature: MA Experiment 20000439 PARAMETER Experiment Name: At_Roots__P Parameter: Tissue Value: Roots vs. Whole Plant
  misc_feature: MA Experiment ID: 20000573 Result: Down-regulated in Transcription
  misc_feature: MA Experiment 20000573 PARAMETER Experiment Name: At_100uM_ABA_Mutants__P Parameter: Organism Value: A. thaliana
  misc_feature: MA Experiment 20000573 PARAMETER Experiment Name: At_100uM_ABA_Mutants__P Parameter: Plant Line Value: CS22 vs. Ler wt
  misc_feature: MA Experiment 20000573 PARAMETER Experiment Name: At_100uM_ABA_Mutants__P Parameter: Timepoint (hr) Value: N/A
  misc_feature: MA Experiment 20000573 PARAMETER Experiment Name: At_100uM_ABA_Mutants__P Parameter: Tissue Value: Whole Plant
  misc_feature: MA Experiment 20000573 PARAMETER Experiment Name: At_100uM_ABA_Mutants__P Parameter: Treatment Value: None
  misc_feature: MA Experiment ID: 20000574 Result: Down-regulated in Transcription
  misc_feature: MA Experiment 20000574 PARAMETER Experiment Name: At_100uM_ABA_Mutants__P Parameter: Organism Value: A. thaliana
  misc_feature: MA Experiment 20000574 PARAMETER Experiment Name: At_100uM_ABA_Mutants__P Parameter: Plant Line Value: CS23 vs. Ler wt
  misc_feature: MA Experiment 20000574 PARAMETER Experiment Name: At_100uM_ABA_Mutants__P Parameter: Timepoint (hr) Value: N/A
  misc_feature: MA Experiment 20000574 PARAMETER Experiment Name: At_100uM_ABA_Mutants__P Parameter: Tissue Value: Whole Plant
  misc_feature: MA Experiment 20000574 PARAMETER Experiment Name: At_100uM_ABA_Mutants__P Parameter: Treatment Value: None
  misc_feature: MA Experiment ID: 20001248 Result: Down-regulated in Transcription
  misc_feature: MA Experiment 20001248 PARAMETER Experiment Name: At_Far-red-induction_P Parameter: Age (day) Value: 7
  misc_feature: MA Experiment 20001248 PARAMETER Experiment Name: At_Far-red-induction_P Parameter: Light Value: Far-red vs. White
  misc_feature: MA Experiment 20001248 PARAMETER Experiment Name: At_Far-red-induction_P Parameter: Organism Value: A. thaliana
  misc_feature: MA Experiment 20001248 PARAMETER Experiment Name: At_Far-red-induction_P Parameter: Plant Line Value: Columbia
  misc_feature: MA Experiment 20001248 PARAMETER Experiment Name: At_Far-red-induction_P Parameter: Timepoint (hr) Value: 4
  misc_feature: MA Experiment 20001248 PARAMETER Experiment Name: At_Far-red-induction_P Parameter: Tissue Value: Whole Plant
  misc_feature: MA Experiment ID: 20001450 Result: Down-regulated in Transcription
  misc_feature: MA Experiment 20001450 PARAMETER Experiment Name: At_Far-red-induction_P Parameter: Age (day) Value: 7
  misc_feature: MA Experiment 20001450 PARAMETER Experiment Name: At_Far-red-induction_P Parameter: Light Value: Far-red vs. White
  misc_feature: MA Experiment 20001450 PARAMETER Experiment Name: At_Far-red-induction_P Parameter: Organism Value: A. thaliana
  misc_feature: MA Experiment 20001450 PARAMETER Experiment Name: At_Far-red-induction_P Parameter: Plant Line Value: Columbia
  misc_feature: MA Experiment 20001450 PARAMETER Experiment Name: At_Far-red-induction_P Parameter: Timepoint (hr) Value: 8
  misc_feature: MA Experiment 20001450 PARAMETER Experiment Name: At_Far-red-induction_P Parameter: Tissue Value: Whole Plant
  misc_feature: MA Experiment ID: 20001559 Result: Down-regulated in Transcription
  misc_feature: MA Experiment 20001559 PARAMETER Experiment Name: At_Drought_Soil_Dry_P Parameter: Age (day) Value: 28
  misc_feature: MA Experiment 20001559 PARAMETER Experiment Name: At_Drought_Soil_Dry_P Parameter: Organism Value: A. thaliana
  misc_feature: MA Experiment 20001559 PARAMETER Experiment Name: At_Drought_Soil_Dry_P Parameter: Plant Line Value: WS
  misc_feature: MA Experiment 20001559 PARAMETER Experiment Name: At_Drought_Soil_Dry_P Parameter: Post Timepoint (hr) Value: 29
  misc_feature: MA Experiment 20001559 PARAMETER Experiment Name: At_Drought_Soil_Dry_P Parameter: Post-Treatment Value: Re-Water vs. No Drought
  misc_feature: MA Experiment 20001559 PARAMETER Experiment Name: At_Drought_Soil_Dry_P Parameter: Timepoint (day) Value: 14
  misc_feature: MA Experiment 20001559 PARAMETER Experiment Name: At_Drought_Soil_Dry_P Parameter: Treatment Value: Drought vs. No Drought
  misc_feature: MA Experiment ID: 20001905 Result: Down-regulated in Transcription
  misc_feature: MA Experiment 20001905 PARAMETER Experiment Name: At_Drought_Reproduction_P Parameter: Age (day) Value: 40
  misc_feature: MA Experiment 20001905 PARAMETER Experiment Name: At_Drought_Reproduction_P Parameter: Organism Value: A. thaliana
  misc_feature: MA Experiment 20001905 PARAMETER Experiment Name: At_Drought_Reproduction_P Parameter: Plant Line Value: WS
  misc_feature: MA Experiment 20001905 PARAMETER Experiment Name: At_Drought_Reproduction_P Parameter: Timepoint (day) Value: 10
  misc_feature: MA Experiment 20001905 PARAMETER Experiment Name: At_Drought_Reproduction_P Parameter: Tissue Value: Rosettes
  misc_feature: MA Experiment 20001905 PARAMETER Experiment Name: At_Drought_Reproduction_P Parameter: Treatment Value: Drought vs. No Drought

SEQ ID NO: 31783 - protein, 260 aa, Arabidopsis thaliana; identical to SEQ ID NO: 28193
  peptide (1)..(260): Ceres Seq. ID no. 13486908
  misc_feature (96)..(223): Homolog of NCBI NO: 15896657 NR Description: Uncharacterized protein, homolog of YYBI fused to uncharacterized domain similar to A.thaliana (gi:3292817
  misc_feature (73)..(230): Homolog of NCBI NO: 18311568 NR Description: hypothetical protein [Clostridium perfringens]
  misc_feature (36)..(215): Homolog of NCBI NO: 38567838 NR Description: OSJNBb0020J19.16 [Oryza sativa (japonica
  misc_feature (57)..(224): Homolog of NCBI NO: 21592527 NR Description: unknown [Arabidopsis thaliana]
  misc_feature (57)..(224): Homolog of NCBI NO: 18416035 NR Description: expressed protein [Arabidopsis thaliana]
  misc_feature (57)..(235): Homolog of NCBI NO: 15234348 NR Description: expressed protein [Arabidopsis thaliana]
  misc_feature (64)..(224): Homolog of NCBI NO: 15234348 NR Description: expressed protein [Arabidopsis thaliana]
  misc_feature (1)..(260): Homolog of NCBI NO: 18401163 NR Description: expressed protein [Arabidopsis thaliana]
  misc_feature (1)..(249): Homolog of NCBI NO: 8778672 NR Description: F9C16.20 [Arabidopsis thaliana]

SEQ ID NO: 31784 - DNA, 1873 bp, Arabidopsis thaliana; identical to SEQ ID NO: 28194
  misc_feature (1)..(1873): Ceres Seq. ID no. 12680413
  misc_feature: MA Experiment ID: 108569 Result: Up-regulated in Transcription
  misc_feature: MA Experiment 108569 PARAMETER Experiment Name: At_0.001%_MeJA__cDNA_P Parameter: Timepoint (hr) Value: 6
  misc_feature: MA Experiment 108569 PARAMETER Experiment Name: At_0.001%_MeJA__cDNA_P Parameter: Tissue Value: Aerial
  misc_feature: MA Experiment 108569 PARAMETER Experiment Name: At_0.001%_MeJA__cDNA_P Parameter: Treatment Value: 0.001% MeJA vs. No Treatment
  misc_feature: MA Experiment ID: 108573 Result: Up-regulated in Transcription
  misc_feature: MA Experiment 108573 PARAMETER Experiment Name: At_Drought_cDNA_P Parameter: Timepoint (hr) Value: 6
  misc_feature: MA Experiment 108573 PARAMETER Experiment Name: At_Drought_cDNA_P Parameter: Tissue Value: Aerial
  misc_feature: MA Experiment 108573 PARAMETER Experiment Name: At_Drought_cDNA_P Parameter: Treatment Value: Drought vs. No Drought
  misc_feature: MA Experiment ID: 20000071 Result: Up-regulated in Transcription
  misc_feature: MA Experiment 20000071 PARAMETER Experiment Name: At_100uM_ABA_Mutants_cDNA_P Parameter: Plant Line Value: CS8104
  misc_feature: MA Experiment 20000071 PARAMETER Experiment Name: At_100uM_ABA_Mutants_cDNA_P Parameter: Timepoint (hr) Value: 6
  misc_feature: MA Experiment 20000071 PARAMETER Experiment Name: At_100uM_ABA_Mutants_cDNA_P Parameter: Tissue Value: Aerial
  misc_feature: MA Experiment 20000071 PARAMETER Experiment Name: At_100uM_ABA_Mutants_cDNA_P Parameter: Treatment Value: 100uM ABA vs. No Treatment
  misc_feature: MA Experiment ID: 20000086 Result: Up-regulated in Transcription
  misc_feature: MA Experiment 20000086 PARAMETER Experiment Name: At_100uM_ABA_Mutants_cDNA_P Parameter: Plant Line Value: CS22
  misc_feature: MA Experiment 20000086 PARAMETER Experiment Name: At_100uM_ABA_Mutants_cDNA_P Parameter: Timepoint (hr) Value: 6
  misc_feature: MA Experiment 20000086 PARAMETER Experiment Name: At_100uM_ABA_Mutants_cDNA_P Parameter: Tissue Value: Aerial
  misc_feature: MA Experiment 20000086 PARAMETER Experiment Name: At_100uM_ABA_Mutants_cDNA_P Parameter: Treatment Value: 100uM ABA vs. No Treatment
  misc_feature: MA Experiment ID: 20000171 Result: Down-regulated in Transcription
  misc_feature: MA Experiment 20000171 PARAMETER Experiment Name: At_42deg_Heat_P Parameter: Age (day) Value: 14
  misc_feature: MA Experiment 20000171 PARAMETER Experiment Name: At_42deg_Heat_P Parameter: Organism Value: A. thaliana
  misc_feature: MA Experiment 20000171 PARAMETER Experiment Name: At_42deg_Heat_P Parameter: Plant Line Value: WS
  misc_feature: MA Experiment 20000171 PARAMETER Experiment Name: At_42deg_Heat_P Parameter: Temperature (deg C) Value: 42 vs. 22
  misc_feature: MA Experiment 20000171 PARAMETER Experiment Name: At_42deg_Heat_P Parameter: Timepoint (hr) Value: 1
  misc_feature: MA Experiment 20000171 PARAMETER Experiment Name: At_42deg_Heat_P Parameter: Tissue Value: Aerial
  misc_feature: MA Experiment ID: 20000234 Result: Down-regulated in Transcription
  misc_feature: MA Experiment 20000234 PARAMETER Experiment Name: At_Siliques_P Parameter: Age (day) Value: 21
  misc_feature: MA Experiment 20000234 PARAMETER Experiment Name: At_Siliques_P Parameter: Organism Value: A. thaliana
  misc_feature: MA Experiment 20000234 PARAMETER Experiment Name: At_Siliques_P Parameter: Plant Line Value: WS
  misc_feature: MA Experiment 20000234 PARAMETER Experiment Name: At_Siliques_P Parameter: Tissue Value: Less Than 5mm Siliques vs. Whole Plant
  misc_feature: MA Experiment ID: 20000265 Result: Down-regulated in Transcription
  misc_feature: MA Experiment 20000265 PARAMETER Experiment Name: At_Open_Flower_P Parameter: Age (day) Value: 21
  misc_feature: MA Experiment 20000265 PARAMETER Experiment Name: At_Open_Flower_P Parameter: Plant Line Value: WS
  misc_feature: MA Experiment 20000265 PARAMETER Experiment Name: At_Open_Flower_P Parameter: Tissue Value: Closed Flower vs. Whole Plant
  misc_feature: MA Experiment ID: 20000794 Result: Up-regulated in Transcription
  misc_feature: MA Experiment 20000794 PARAMETER Experiment Name: At_Petals_P Parameter: Age (day) Value: 23-25 days
  misc_feature: MA Experiment 20000794 PARAMETER Experiment Name: At_Petals_P Parameter: Plant Line Value: WS
  misc_feature: MA Experiment 20000794 PARAMETER Experiment Name: At_Petals_P Parameter: Tissue Value: Petals vs. Whole plant

SEQ ID NO: 31785 - protein, 522 aa, Arabidopsis thaliana; identical to SEQ ID NO: 28195
  peptide (1)..(522): Ceres Seq. ID no. 12680414
  misc_feature (46)..(372): Pfam Name: Eukaryotic aspartyl protease Pfam Description: Eukaryotic aspartyl protease
  misc_feature (46)..(372): Pfam Name: Eukaryotic aspartyl protease Pfam Description: Eukaryotic aspartyl protease
  misc_feature (24)..(522): Homolog of NCBI NO: 7435837 NR Description: aspartic proteinase (EC 3.4.23.-) - cowpea
  misc_feature (24)..(522): Homolog of NCBI NO: 20800441 NR Description: aspartic proteinase [Vigna unguiculata]
  misc_feature (28)..(522): Homolog of NCBI NO: 2811025 NR Description: Aspartic proteinase precursor
  misc_feature (22)..(522): Homolog of NCBI NO: 21616053 NR Description: aspartic proteinase [Theobroma cacao]
  misc_feature (24)..(522): Homolog of NCBI NO: 7435837 NR Description: aspartic proteinase (EC 3.4.23.-) - cowpea
  misc_feature (28)..(522): Homolog of NCBI NO: 2811025 NR Description: Aspartic proteinase precursor
  misc_feature (17)..(521): Homolog of NCBI NO: 22330379 NR Description: aspartic protease, putative
  misc_feature (39)..(522): Homolog of NCBI NO: 1354272 NR Description: aspartic proteinase [Arabidopsis thaliana]
  misc_feature (17)..(522): Homolog of NCBI NO: 15221141 NR Description: putative aspartic proteinase
  misc_feature (17)..(522): Homolog of NCBI NO: 7435838 NR Description: probable aspartic proteinase (EC 3.4.23.-) 1 -
  misc_feature (22)..(522): Homolog of NCBI NO: 21616053 NR Description: aspartic proteinase [Theobroma cacao]
  misc_feature (24)..(522): Homolog of NCBI NO: 20800441 NR Description: aspartic proteinase [Vigna unguiculata]
  misc_feature (17)..(521): Homolog of NCBI NO: 22330379 NR Description: aspartic protease, putative
  misc_feature (17)..(522): Homolog of NCBI NO: 7435838 NR Description: probable aspartic proteinase (EC 3.4.23.-) 1 -
  misc_feature (39)..(522): Homolog of NCBI NO: 1354272 NR Description: aspartic proteinase [Arabidopsis thaliana]
  misc_feature (17)..(522): Homolog of NCBI NO: 15221141 NR Description: putative aspartic proteinase

SEQ ID NO: 31786 - protein, 506 aa, Arabidopsis thaliana; identical to SEQ ID NO: 28196
  peptide (1)..(506): Ceres Seq. ID no. 12680415
  misc_feature (30)..(356): Pfam Name: Eukaryotic aspartyl protease Pfam Description: Eukaryotic aspartyl protease
  misc_feature (30)..(356): Pfam Name: Eukaryotic aspartyl protease Pfam Description: Eukaryotic aspartyl protease
  misc_feature (8)..(506): Homolog of NCBI NO: 7435837 NR Description: aspartic proteinase (EC 3.4.23.-) - cowpea
  misc_feature (8)..(506): Homolog of NCBI NO: 20800441 NR Description: aspartic proteinase [Vigna unguiculata]
  misc_feature (12)..(506): Homolog of NCBI NO: 2811025 NR Description: Aspartic proteinase precursor
  misc_feature (6)..(506): Homolog of NCBI NO: 21616053 NR Description: aspartic proteinase [Theobroma cacao]
  misc_feature (8)..(506): Homolog of NCBI NO: 7435837 NR Description: aspartic proteinase (EC 3.4.23.-) - cowpea
  misc_feature (12)..(506): Homolog of NCBI NO: 2811025 NR Description: Aspartic proteinase precursor
  misc_feature (1)..(505): Homolog of NCBI NO: 22330379 NR Description: aspartic protease, putative
  misc_feature (23)..(506): Homolog of NCBI NO: 1354272 NR Description: aspartic proteinase [Arabidopsis thaliana]
  misc_feature (1)..(506): Homolog of NCBI NO: 15221141 NR Description: putative aspartic proteinase
  misc_feature (1)..(506): Homolog of NCBI NO: 7435838 NR Description: probable aspartic proteinase (EC 3.4.23.-) 1 -
  misc_feature (6)..(506): Homolog of NCBI NO: 21616053 NR Description: aspartic proteinase [Theobroma cacao]
  misc_feature (8)..(506): Homolog of NCBI NO: 20800441 NR Description: aspartic proteinase [Vigna unguiculata]
  misc_feature (1)..(505): Homolog of NCBI NO: 22330379 NR Description: aspartic protease, putative
  misc_feature (1)..(506): Homolog of NCBI NO: 7435838 NR Description: probable aspartic proteinase (EC 3.4.23.-) 1 -
  misc_feature (23)..(506): Homolog of NCBI NO: 1354272 NR Description: aspartic proteinase [Arabidopsis thaliana]
  misc_feature (1)..(506): Homolog of NCBI NO: 15221141 NR Description: putative aspartic proteinase

SEQ ID NO: 31787 - protein, 298 aa, Arabidopsis thaliana; identical to SEQ ID NO: 28197
  peptide (1)..(298): Ceres Seq. ID no. 12680416
  misc_feature (1)..(148): Pfam Name: Eukaryotic aspartyl protease Pfam Description: Eukaryotic aspartyl protease
  misc_feature (1)..(148): Pfam Name: Eukaryotic aspartyl protease Pfam Description: Eukaryotic aspartyl protease
  misc_feature (1)..(298): Homolog of NCBI NO: 7435837 NR Description: aspartic proteinase (EC 3.4.23.-) - cowpea
  misc_feature (1)..(298): Homolog of NCBI NO: 20800441 NR Description: aspartic proteinase [Vigna unguiculata]
  misc_feature (1)..(298): Homolog of NCBI NO: 2811025 NR Description: Aspartic proteinase precursor
  misc_feature (1)..(298): Homolog of NCBI NO: 21616053 NR Description: aspartic proteinase [Theobroma cacao]
  misc_feature (1)..(298): Homolog of NCBI NO: 7435837 NR Description: aspartic proteinase (EC 3.4.23.-) - cowpea
  misc_feature (1)..(298): Homolog of NCBI NO: 2811025 NR Description: Aspartic proteinase precursor
  misc_feature (1)..(297): Homolog of NCBI NO: 22330379 NR Description: aspartic protease, putative
  misc_feature (1)..(298): Homolog of NCBI NO: 1354272 NR Description: aspartic proteinase [Arabidopsis thaliana]
  misc_feature (1)..(298): Homolog of NCBI NO: 15221141 NR Description: putative aspartic proteinase
  misc_feature (1)..(298): Homolog of NCBI NO: 7435838 NR Description: probable aspartic proteinase (EC 3.4.23.-) 1 -
  misc_feature (1)..(298): Homolog of NCBI NO: 21616053 NR Description: aspartic proteinase [Theobroma cacao]
  misc_feature (1)..(298): Homolog of NCBI NO: 20800441 NR Description: aspartic proteinase [Vigna unguiculata]
  misc_feature (1)..(297): Homolog of NCBI NO: 22330379 NR Description: aspartic protease, putative
  misc_feature (1)..(298): Homolog of NCBI NO: 7435838 NR Description: probable aspartic proteinase (EC 3.4.23.-) 1 -
  misc_feature (1)..(298): Homolog of NCBI NO: 1354272 NR Description: aspartic proteinase [Arabidopsis thaliana]
  misc_feature (1)..(298): Homolog of NCBI NO: 15221141 NR Description: putative aspartic proteinase

SEQ ID NO: 31788 - DNA, 1114 bp, Arabidopsis thaliana; identical to SEQ ID NO: 28198
  misc_feature (1)..(1114): Ceres Seq. ID no. 12324072
  misc_feature: MA Experiment ID: 20000171 Result: Up-regulated in Transcription
  misc_feature: MA Experiment 20000171 PARAMETER Experiment Name: At_42deg_Heat_P Parameter: Age (day) Value: 14
  misc_feature: MA Experiment 20000171 PARAMETER Experiment Name: At_42deg_Heat_P Parameter: Organism Value: A. thaliana
  misc_feature: MA Experiment 20000171 PARAMETER Experiment Name: At_42deg_Heat_P Parameter: Plant Line Value: WS
  misc_feature: MA Experiment 20000171 PARAMETER Experiment Name: At_42deg_Heat_P Parameter: Temperature (deg C) Value: 42 vs. 22
  misc_feature: MA Experiment 20000171 PARAMETER Experiment Name: At_42deg_Heat_P Parameter: Timepoint (hr) Value: 1
  misc_feature: MA Experiment 20000171 PARAMETER Experiment Name: At_42deg_Heat_P Parameter: Tissue Value: Aerial
  misc_feature: MA Experiment ID: 20000180 Result: Up-regulated in Transcription
  misc_feature: MA Experiment 20000180 PARAMETER Experiment Name: At_Germinating_Seeds_P Parameter: Age (hr) Value: 24 vs. 0
  misc_feature: MA Experiment 20000180 PARAMETER Experiment Name: At_Germinating_Seeds_P Parameter: Tissue Value: Germinating Seeds
  misc_feature: MA Experiment ID: 20000227 Result: Up-regulated in Transcription
  misc_feature: MA Experiment 20000227 PARAMETER Experiment Name: At_Root-Tips-vs-Tops_P Parameter: Tissue Value: Root Tips vs. Root Tops
  misc_feature: MA Experiment ID: 20000234 Result: Up-regulated in Transcription
  misc_feature: MA Experiment 20000234 PARAMETER Experiment Name: At_Siliques_P Parameter: Age (day) Value: 21
  misc_feature: MA Experiment 20000234 PARAMETER Experiment Name: At_Siliques_P Parameter: Organism Value: A. thaliana
  misc_feature: MA Experiment 20000234 PARAMETER Experiment Name: At_Siliques_P Parameter: Plant Line Value: WS
  misc_feature: MA Experiment 20000234 PARAMETER Experiment Name: At_Siliques_P Parameter: Tissue Value: Less Than 5mm Siliques vs. Whole Plant
  misc_feature: MA Experiment ID: 20000235 Result: Up-regulated in Transcription
  misc_feature: MA Experiment 20000235 PARAMETER Experiment Name: At_Siliques_P Parameter: Age (day) Value: 21
  misc_feature: MA Experiment 20000235 PARAMETER Experiment Name: At_Siliques_P Parameter: Organism Value: A. thaliana
  misc_feature: MA Experiment 20000235 PARAMETER Experiment Name: At_Siliques_P Parameter: Plant Line Value: WS
  misc_feature: MA Experiment 20000235 PARAMETER Experiment Name: At_Siliques_P Parameter: Tissue Value: 5-10mm Siliques vs. Whole Plant
  misc_feature: MA Experiment ID: 20000265 Result: Up-regulated in Transcription
  misc_feature: MA Experiment 20000265 PARAMETER Experiment Name: At_Open_Flower_P Parameter: Age (day) Value: 21
  misc_feature: MA Experiment 20000265 PARAMETER Experiment Name: At_Open_Flower_P Parameter: Plant Line Value: WS
  misc_feature: MA Experiment 20000265 PARAMETER Experiment Name: At_Open_Flower_P Parameter: Tissue Value: Closed Flower vs. Whole Plant
  misc_feature: MA Experiment ID: 20000286 Result: Up-regulated in Transcription
  misc_feature: MA Experiment 20000286 PARAMETER Experiment Name: At_Open_Flower_P Parameter: Age (day) Value: 21
  misc_feature: MA Experiment 20000286 PARAMETER Experiment Name: At_Open_Flower_P Parameter: Plant Line Value: WS
  misc_feature: MA Experiment 20000286 PARAMETER Experiment Name: At_Open_Flower_P Parameter: Tissue Value: Half Open vs. Whole Plant
  misc_feature: MA Experiment ID: 20000441 Result: Down-regulated in Transcription
  misc_feature: MA Experiment 20000441 PARAMETER Experiment Name: At_1uM_BR-BRZ__P Parameter: Tissue Value: Shoot Apices
  misc_feature: MA Experiment 20000441 PARAMETER Experiment Name: At_1uM_BR-BRZ__P Parameter: Treatment Value: 1uM BR vs. No Treatment
  misc_feature: MA Experiment ID: 20000443 Result: Down-regulated in Transcription
  misc_feature: MA Experiment 20000443 PARAMETER Experiment Name: At_1uM_BR-BRZ__P Parameter: Tissue Value: Shoot Apices
  misc_feature: MA Experiment 20000443 PARAMETER Experiment Name: At_1uM_BR-BRZ__P Parameter: Treatment Value: 1uM BRZ vs. No Treatment
  misc_feature: MA Experiment ID: 20001247 Result: Down-regulated in Transcription
  misc_feature: MA Experiment 20001247 PARAMETER Experiment Name: At_Far-red-induction_P Parameter: Age (day) Value: 7
  misc_feature: MA Experiment 20001247 PARAMETER Experiment Name: At_Far-red-induction_P Parameter: Light Value: Far-red vs. White
  misc_feature: MA Experiment 20001247 PARAMETER Experiment Name: At_Far-red-induction_P Parameter: Organism Value: A. thaliana
  misc_feature: MA Experiment 20001247 PARAMETER Experiment Name: At_Far-red-induction_P Parameter: Plant Line Value: Columbia
  misc_feature: MA Experiment 20001247 PARAMETER Experiment Name: At_Far-red-induction_P Parameter: Timepoint (hr) Value: 1
  misc_feature: MA Experiment 20001247 PARAMETER Experiment Name: At_Far-red-induction_P Parameter: Tissue Value: Whole Plant

SEQ ID NO: 31789 - protein, 245 aa, Arabidopsis thaliana; identical to SEQ ID NO: 28199
  peptide (1)..(245): Ceres Seq. ID no. 12324073
  misc_feature (50)..(236): Homolog of NCBI NO: 27311593 NR Description: unknown protein [Arabidopsis thaliana]
  misc_feature (1)..(243): Homolog of NCBI NO: 30687257 NR Description: expressed protein [Arabidopsis thaliana]
  misc_feature (1)..(245): Homolog of NCBI NO: 18397426 NR Description: expressed protein

SEQ ID NO: 31790 - protein, 208 aa, Arabidopsis thaliana; identical to SEQ ID NO: 28200
  peptide (1)..(208): Ceres Seq. ID no. 12324074
  misc_feature (13)..(199): Homolog of NCBI NO: 27311593 NR Description: unknown protein [Arabidopsis thaliana]
  misc_feature (1)..(206): Homolog of NCBI NO: 30687257 NR Description: expressed protein [Arabidopsis thaliana]
  misc_feature (1)..(208): Homolog of NCBI NO: 18397426 NR Description: expressed protein

SEQ ID NO: 31791 - protein, 180 aa, Arabidopsis thaliana; identical to SEQ ID NO: 28201
  peptide (1)..(180): Ceres Seq. ID no. 12324075
  misc_feature (1)..(171): Homolog of NCBI NO: 27311593 NR Description: unknown protein [Arabidopsis thaliana]
  misc_feature (1)..(178): Homolog of NCBI NO: 30687257 NR Description: expressed protein [Arabidopsis thaliana]
  misc_feature (1)..(180): Homolog of NCBI NO: 18397426 NR Description: expressed protein

SEQ ID NO: 31792 - DNA, 1641 bp, Arabidopsis thaliana; identical to SEQ ID NO: 28202
  misc_feature (1)..(1641): Ceres Seq. ID no. 13490319
  misc_feature: MA Experiment ID: 20000166 Result: Up-regulated in Transcription
  misc_feature: MA Experiment 20000166 PARAMETER Experiment Name: At_100uM_ABA_P Parameter: Age (day) Value: 14
  misc_feature: MA Experiment 20000166 PARAMETER Experiment Name: At_100uM_ABA_P Parameter: Organism Value: A. thaliana
  misc_feature: MA Experiment 20000166 PARAMETER Experiment Name: At_100uM_ABA_P Parameter: Plant Line Value: WS
  misc_feature: MA Experiment 20000166 PARAMETER Experiment Name: At_100uM_ABA_P Parameter: Timepoint (hr) Value: 1
  misc_feature: MA Experiment 20000166 PARAMETER Experiment Name: At_100uM_ABA_P Parameter: Tissue Value: Aerial
  misc_feature: MA Experiment 20000166 PARAMETER Experiment Name: At_100uM_ABA_P Parameter: Treatment Value: 100uM ABA vs. No Treatment
  misc_feature: MA Experiment ID: 20000169 Result: Up-regulated in Transcription
  misc_feature: MA Experiment 20000169 PARAMETER Experiment Name: At_100uM_ABA_P Parameter: Age (day) Value: 14
  misc_feature: MA Experiment 20000169 PARAMETER Experiment Name: At_100uM_ABA_P Parameter: Organism Value: A. thaliana
  misc_feature: MA Experiment 20000169 PARAMETER Experiment Name: At_100uM_ABA_P Parameter: Plant Line Value: WS
  misc_feature: MA Experiment 20000169 PARAMETER Experiment Name: At_100uM_ABA_P Parameter: Timepoint (hr) Value: 6
  misc_feature: MA Experiment 20000169 PARAMETER Experiment Name: At_100uM_ABA_P Parameter: Tissue Value: Aerial
  misc_feature: MA Experiment 20000169 PARAMETER Experiment Name: At_100uM_ABA_P Parameter: Treatment Value: 100uM ABA vs. No Treatment
  misc_feature: MA Experiment ID: 20000171 Result: Down-regulated in Transcription
  misc_feature: MA Experiment 20000171 PARAMETER Experiment Name: At_42deg_Heat_P Parameter: Age (day) Value: 14
  misc_feature: MA Experiment 20000171 PARAMETER Experiment Name: At_42deg_Heat_P Parameter: Organism Value: A. thaliana
  misc_feature: MA Experiment 20000171 PARAMETER Experiment Name: At_42deg_Heat_P Parameter: Plant Line Value: WS
  misc_feature: MA Experiment 20000171 PARAMETER Experiment Name: At_42deg_Heat_P Parameter: Temperature (deg C) Value: 42 vs. 22
  misc_feature: MA Experiment 20000171 PARAMETER Experiment Name: At_42deg_Heat_P Parameter: Timepoint (hr) Value: 1
  misc_feature: MA Experiment 20000171 PARAMETER Experiment Name: At_42deg_Heat_P Parameter: Tissue Value: Aerial
  misc_feature: MA Experiment ID: 20000182 Result: Up-regulated in Transcription
  misc_feature: MA Experiment 20000182 PARAMETER Experiment Name: At_2mM_SA_P Parameter: Age (day) Value: 14
  misc_feature: MA Experiment 20000182 PARAMETER Experiment Name: At_2mM_SA_P Parameter: Organism Value: A. thaliana
  misc_feature: MA Experiment 20000182 PARAMETER Experiment Name: At_2mM_SA_P Parameter: Plant Line Value: WS
  misc_feature: MA Experiment 20000182 PARAMETER Experiment Name: At_2mM_SA_P Parameter: Timepoint (hr) Value: 6
  misc_feature: MA Experiment 20000182 PARAMETER Experiment Name: At_2mM_SA_P Parameter: Tissue Value: Aerial
  misc_feature: MA Experiment 20000182 PARAMETER Experiment Name: At_2mM_SA_P Parameter: Treatment Value: 2mM SA vs. No Treatment
  misc_feature: MA Experiment ID: 20000436 Result: Up-regulated in Transcription
  misc_feature: MA Experiment 20000436 PARAMETER Experiment Name: At_Drought_P Parameter: Age (day) Value: 7
  misc_feature: MA Experiment 20000436 PARAMETER Experiment Name: At_Drought_P Parameter: Organism Value: A. thaliana
  misc_feature: MA Experiment 20000436 PARAMETER Experiment Name: At_Drought_P Parameter: Plant Line Value: WS
  misc_feature: MA Experiment 20000436 PARAMETER Experiment Name: At_Drought_P Parameter: Timepoint (hr) Value: 12
  misc_feature: MA Experiment 20000436 PARAMETER Experiment Name: At_Drought_P Parameter: Tissue Value: Whole Plant
  misc_feature: MA Experiment 20000436 PARAMETER Experiment Name: At_Drought_P Parameter: Treatment Value: Drought vs. No Drought
  misc_feature: MA Experiment ID: 20000437 Result: Up-regulated in Transcription
  misc_feature: MA Experiment 20000437 PARAMETER Experiment Name: At_Drought_P Parameter: Age (day) Value: 8
  misc_feature: MA Experiment 20000437 PARAMETER Experiment Name: At_Drought_P Parameter: Organism Value: A. thaliana
  misc_feature: MA Experiment 20000437 PARAMETER Experiment Name: At_Drought_P Parameter: Plant Line Value: WS
  misc_feature: MA Experiment 20000437 PARAMETER Experiment Name: At_Drought_P Parameter: Timepoint (hr) Value: 24
  misc_feature: MA Experiment 20000437 PARAMETER Experiment Name: At_Drought_P Parameter: Tissue Value: Whole Plant
  misc_feature: MA Experiment 20000437 PARAMETER Experiment Name: At_Drought_P Parameter: Treatment Value: Drought vs. No Drought
  misc_feature: MA Experiment ID: 20000438 Result: Down-regulated in Transcription
  misc_feature: MA Experiment 20000438 PARAMETER Experiment Name: At_Shoots__P Parameter: Age (day) Value: 14
  misc_feature: MA Experiment 20000438 PARAMETER Experiment Name: At_Shoots__P Parameter: Tissue Value: Shoots vs. Whole Plant
  misc_feature: MA Experiment ID: 20000439 Result: Down-regulated in Transcription
  misc_feature: MA Experiment 20000439 PARAMETER Experiment Name: At_Roots__P Parameter: Age (day) Value: 14 vs. 21
  misc_feature: MA Experiment 20000439 PARAMETER Experiment Name: At_Roots__P Parameter: Organism Value: A. thaliana
  misc_feature: MA Experiment 20000439 PARAMETER Experiment Name: At_Roots__P Parameter: Tissue Value: Roots vs. Whole Plant
  misc_feature: MA Experiment ID: 20000453 Result: Up-regulated in Transcription
  misc_feature: MA Experiment 20000453 PARAMETER Experiment Name: At_100uM_ABA_P Parameter: Age (day) Value: 15
  misc_feature: MA Experiment 20000453 PARAMETER Experiment Name: At_100uM_ABA_P Parameter: Organism Value: A. thaliana
  misc_feature: MA Experiment 20000453 PARAMETER Experiment Name: At_100uM_ABA_P Parameter: Plant Line Value: WS
  misc_feature: MA Experiment 20000453 PARAMETER Experiment Name: At_100uM_ABA_P Parameter: Timepoint (hr) Value: 24
  misc_feature: MA Experiment 20000453 PARAMETER Experiment Name: At_100uM_ABA_P Parameter: Tissue Value: Aerial
  misc_feature: MA Experiment 20000453 PARAMETER Experiment Name: At_100uM_ABA_P Parameter: Treatment Value: 100uM ABA vs. No Treatment
  misc_feature: MA Experiment ID: 20000455 Result: Up-regulated in Transcription
  misc_feature: MA Experiment 20000455 PARAMETER Experiment Name: At_100uM_ABA_P Parameter: Age (day) Value: 16
  misc_feature: MA Experiment 20000455 PARAMETER Experiment Name: At_100uM_ABA_P Parameter: Organism Value: A. thaliana
  misc_feature: MA Experiment 20000455 PARAMETER Experiment Name: At_100uM_ABA_P Parameter: Plant Line Value: WS
  misc_feature: MA Experiment 20000455 PARAMETER Experiment Name: At_100uM_ABA_P Parameter: Timepoint (hr) Value: 48
  misc_feature: MA Experiment 20000455 PARAMETER Experiment Name: At_100uM_ABA_P Parameter: Tissue Value: Aerial
  misc_feature: MA Experiment 20000455 PARAMETER Experiment Name: At_100uM_ABA_P Parameter: Treatment Value: 100uM ABA vs. No Treatment
  misc_feature: MA Experiment ID: 20000709 Result: Up-regulated in Transcription
  misc_feature: MA Experiment 20000709 PARAMETER Experiment Name: At_15mM_NH4NO3_L-to-H_P Parameter: Age (hr) Value: 14
  misc_feature: MA Experiment 20000709 PARAMETER Experiment Name: At_15mM_NH4NO3_L-to-H_P Parameter: Organism Value: A. thaliana
  misc_feature: MA Experiment 20000709 PARAMETER Experiment Name: At_15mM_NH4NO3_L-to-H_P Parameter: Plant Line Value: WS
  misc_feature: MA Experiment 20000709 PARAMETER Experiment Name: At_15mM_NH4NO3_L-to-H_P Parameter: Timepoint (hr) Value: 4
  misc_feature: MA Experiment 20000709 PARAMETER Experiment Name: At_15mM_NH4NO3_L-to-H_P Parameter: Tissue Value: Aerial
  misc_feature: MA Experiment 20000709 PARAMETER Experiment Name: At_15mM_NH4NO3_L-to-H_P Parameter: Treatment Value: 15mM NH4NO3 vs. 30mM Mannitol
  misc_feature: MA Experiment ID: 20001247 Result: Up-regulated in Transcription
  misc_feature: MA Experiment 20001247 PARAMETER Experiment Name: At_Far-red-induction_P Parameter: Age (day) Value: 7
  misc_feature: MA Experiment 20001247 PARAMETER Experiment Name: At_Far-red-induction_P Parameter: Light Value: Far-red vs. White
  misc_feature: MA Experiment 20001247 PARAMETER Experiment Name: At_Far-red-induction_P Parameter: Organism Value: A. thaliana
  misc_feature: MA Experiment 20001247 PARAMETER Experiment Name: At_Far-red-induction_P Parameter: Plant Line Value: Columbia
  misc_feature: MA Experiment 20001247 PARAMETER Experiment Name: At_Far-red-induction_P Parameter: Timepoint (hr) Value: 1
  misc_feature: MA Experiment 20001247 PARAMETER Experiment Name: At_Far-red-induction_P Parameter: Tissue Value: Whole Plant
  misc_feature: MA Experiment ID: 20001557 Result: Up-regulated in Transcription
  misc_feature: MA Experiment 20001557 PARAMETER Experiment Name: At_Drought_Soil_Dry_P Parameter: Age (day) Value: 27
  misc_feature: MA Experiment 20001557 PARAMETER Experiment Name: At_Drought_Soil_Dry_P Parameter: Organism Value: A. thaliana
  misc_feature: MA Experiment 20001557 PARAMETER Experiment Name: At_Drought_Soil_Dry_P Parameter: Plant Line Value: WS
  misc_feature: MA Experiment 20001557 PARAMETER Experiment Name: At_Drought_Soil_Dry_P Parameter: Post Timepoint (hr) Value: 3
  misc_feature: MA Experiment 20001557 PARAMETER Experiment Name: At_Drought_Soil_Dry_P Parameter: Post-Treatment Value: Re-Water vs. No Drought
  misc_feature: MA Experiment 20001557 PARAMETER Experiment Name: At_Drought_Soil_Dry_P Parameter: Timepoint (day) Value: 13
  misc_feature: MA Experiment 20001557 PARAMETER Experiment Name: At_Drought_Soil_Dry_P Parameter: Treatment Value: Drought vs. No Drought
  misc_feature: MA Experiment ID: 20001905 Result: Up-regulated in Transcription
  misc_feature: MA Experiment 20001905 PARAMETER Experiment Name: At_Drought_Reproduction_P Parameter: Age (day) Value: 40
  misc_feature: MA Experiment 20001905 PARAMETER Experiment Name: At_Drought_Reproduction_P Parameter: Organism Value: A. thaliana
  misc_feature: MA Experiment 20001905 PARAMETER Experiment Name: At_Drought_Reproduction_P Parameter: Plant Line Value: WS
  misc_feature: MA Experiment 20001905 PARAMETER Experiment Name: At_Drought_Reproduction_P Parameter: Timepoint (day) Value: 10
  misc_feature: MA Experiment 20001905 PARAMETER Experiment Name: At_Drought_Reproduction_P Parameter: Tissue Value: Rosettes
  misc_feature: MA Experiment 20001905 PARAMETER Experiment Name: At_Drought_Reproduction_P Parameter: Treatment Value: Drought vs. No Drought
  misc_feature: MA Experiment ID: 20001910 Result: Up-regulated in Transcription
  misc_feature: MA Experiment 20001910 PARAMETER Experiment Name: At_Drought_Reproduction_P Parameter: Age (day) Value: 37
  misc_feature: MA Experiment 20001910 PARAMETER Experiment Name: At_Drought_Reproduction_P Parameter: Organism Value: A. thaliana
  misc_feature: MA Experiment 20001910 PARAMETER Experiment Name: At_Drought_Reproduction_P Parameter: Plant Line Value: WS
  misc_feature: MA Experiment 20001910 PARAMETER Experiment Name: At_Drought_Reproduction_P Parameter: Timepoint (day) Value: 7
  misc_feature: MA Experiment 20001910 PARAMETER Experiment Name: At_Drought_Reproduction_P Parameter: Tissue Value: Flowers
  misc_feature: MA Experiment 20001910 PARAMETER Experiment Name: At_Drought_Reproduction_P Parameter: Treatment Value: Drought vs. No Drought

SEQ ID NO: 31793 - protein, 449 aa, Arabidopsis thaliana; identical to SEQ ID NO: 28203
  peptide (1)..(449): Ceres Seq. ID no. 13490320
  misc_feature (29)..(343): Pfam Name: Glycosyl hydrolases family 17 Pfam Description: Glycosyl hydrolases family 17
  misc_feature (8)..(449): Homolog of NCBI NO: 31126737 NR Description: putative beta 1,3-glucanase
  misc_feature (7)..(443): Homolog of NCBI NO: 15226720 NR Description: glycosyl hydrolase family 17 [Arabidopsis
  misc_feature (1)..(449): Homolog of NCBI NO: 14279169 NR Description: beta-1,3-glucanase-like protein [Olea europaea]
  misc_feature (13)..(364): Homolog of NCBI NO: 13548679 NR Description: endo-1,3-beta-glucanase-like protein [Pyrus
  misc_feature (6)..(449): Homolog of NCBI NO: 1706551 NR Description: GLUCAN ENDO-1,3-BETA-GLUCOSIDASE PRECURSOR ((1-
  misc_feature (1)..(448): Homolog of NCBI NO: 11279328 NR Description: glucan endo-1,3-beta-D-glucosidase (EC 3.2.1.39)
  misc_feature (1)..(447): Homolog of NCBI NO: 15225516 NR Description: glycosyl hydrolase family 17 [Arabidopsis
  misc_feature (1)..(449): Homolog of NCBI NO: 15028379 NR Description: putative beta-1,3-glucanase [Arabidopsis thaliana]
  misc_feature (1)..(449): Homolog of NCBI NO: 21617932 NR Description: beta-1,3-glucanase-like protein [Arabidopsis
  misc_feature (1)..(449): Homolog of NCBI NO: 15233271 NR Description: glycosyl hydrolase family 17 (beta-1,3-glucanase)

SEQ ID NO: 31794 - protein, 320 aa, Arabidopsis thaliana; identical to SEQ ID NO: 28204
  peptide (1)..(320): Ceres Seq. ID no. 13490321
  misc_feature (1)..(214): Pfam Name: Glycosyl hydrolases family 17 Pfam Description: Glycosyl hydrolases family 17
  misc_feature (1)..(320): Homolog of NCBI NO: 31126737 NR Description: putative beta 1,3-glucanase
  misc_feature (1)..(314): Homolog of NCBI NO: 15226720 NR Description: glycosyl hydrolase family 17 [Arabidopsis
  misc_feature (1)..(320): Homolog of NCBI NO: 14279169 NR Description: beta-1,3-glucanase-like protein [Olea europaea]
  misc_feature (1)..(235): Homolog of NCBI NO: 13548679 NR Description: endo-1,3-beta-glucanase-like protein [Pyrus
  misc_feature (1)..(320): Homolog of NCBI NO: 1706551 NR Description: GLUCAN ENDO-1,3-BETA-GLUCOSIDASE PRECURSOR ((1-
  misc_feature (1)..(319): Homolog of NCBI NO: 11279328 NR Description: glucan endo-1,3-beta-D-glucosidase (EC 3.2.1.39)
  misc_feature (1)..(318): Homolog of NCBI NO: 15225516 NR Description: glycosyl hydrolase family 17 [Arabidopsis
  misc_feature (1)..(320): Homolog of NCBI NO: 15028379 NR Description: putative beta-1,3-glucanase [Arabidopsis thaliana]
  misc_feature (1)..(320): Homolog of NCBI NO: 21617932 NR Description: beta-1,3-glucanase-like protein [Arabidopsis
  misc_feature (1)..(320): Homolog of NCBI NO: 15233271 NR Description: glycosyl hydrolase family 17 (beta-1,3-glucanase)

SEQ ID NO: 31795 - protein, 312 aa, Arabidopsis thaliana; identical to SEQ ID NO: 28205
  peptide (1)..(312): Ceres Seq. ID no. 13490322
  misc_feature (1)..(206): Pfam Name: Glycosyl hydrolases family 17 Pfam Description: Glycosyl hydrolases family 17
  misc_feature (1)..(312): Homolog of NCBI NO: 31126737 NR Description: putative beta 1,3-glucanase
  misc_feature (1)..(306): Homolog of NCBI NO: 15226720 NR Description: glycosyl hydrolase family 17 [Arabidopsis
  misc_feature (1)..(312): Homolog of NCBI NO: 14279169 NR Description: beta-1,3-glucanase-like protein [Olea europaea]
  misc_feature (1)..(227): Homolog of NCBI NO: 13548679 NR Description: endo-1,3-beta-glucanase-like protein [Pyrus
  misc_feature (1)..(312): Homolog of NCBI NO: 1706551 NR Description: GLUCAN ENDO-1,3-BETA-GLUCOSIDASE PRECURSOR ((1-
  misc_feature (1)..(311): Homolog of NCBI NO: 11279328 NR Description: glucan endo-1,3-beta-D-glucosidase (EC 3.2.1.39)
  misc_feature (1)..(310): Homolog of NCBI NO: 15225516 NR Description: glycosyl hydrolase family 17 [Arabidopsis
  misc_feature (1)..(312): Homolog of NCBI NO: 15028379 NR Description: putative beta-1,3-glucanase [Arabidopsis thaliana]
  misc_feature (1)..(312): Homolog of NCBI NO: 21617932 NR Description: beta-1,3-glucanase-like protein [Arabidopsis
  misc_feature (1)..(312): Homolog of NCBI NO: 15233271 NR Description: glycosyl hydrolase family 17 (beta-1,3-glucanase)

SEQ ID NO: 31796 - DNA, 1786 bp, Arabidopsis thaliana; identical to SEQ ID NO: 28206
  misc_feature (1)..(1786): Ceres Seq. ID no. 13487784
  misc_feature: MA Experiment ID: 108462 Result: Down-regulated in Transcription
  misc_feature: MA Experiment 108462 PARAMETER Experiment Name: At_Germinating_Seeds_cDNA_P Parameter: Age (day) Value: 2 vs. 0
  misc_feature: MA Experiment 108462 PARAMETER Experiment Name: At_Germinating_Seeds_cDNA_P Parameter: Tissue Value: Germinating Seeds
  misc_feature: MA Experiment ID: 108463 Result: Down-regulated in Transcription
  misc_feature: MA Experiment 108463 PARAMETER Experiment Name: At_Germinating_Seeds_cDNA_P Parameter: Age (day) Value: 3 vs. 0
  misc_feature: MA Experiment 108463 PARAMETER Experiment Name: At_Germinating_Seeds_cDNA_P Parameter: Tissue Value: Germinating Seeds
  misc_feature: MA Experiment ID: 108464 Result: Down-regulated in Transcription
  misc_feature: MA Experiment 108464 PARAMETER Experiment Name: At_Germinating_Seeds_cDNA_P Parameter: Age (day) Value: 4 vs. 0
  misc_feature: MA Experiment 108464 PARAMETER Experiment Name: At_Germinating_Seeds_cDNA_P Parameter: Tissue Value: Germinating Seeds
  misc_feature: MA Experiment ID: 108585 Result: Up-regulated in Transcription
  misc_feature: MA Experiment 108585 PARAMETER Experiment Name: At_5mM_NaNP_cDNA_P Parameter: Timepoint (hr) Value: 6
  misc_feature: MA Experiment 108585 PARAMETER Experiment Name: At_5mM_NaNP_cDNA_P Parameter: Tissue Value: Aerial
  misc_feature: MA Experiment 108585 PARAMETER Experiment Name: At_5mM_NaNP_cDNA_P Parameter: Treatment Value: null
  misc_feature: MA Experiment ID: 108595 Result: Down-regulated in Transcription
  misc_feature: MA Experiment 108595 PARAMETER Experiment Name: At_Ler-pi_Ovule_cDNA_P Parameter: Plant Line Value: null
  misc_feature: MA Experiment ID: 20000794 Result: Up-regulated in Transcription
  misc_feature: MA Experiment 20000794 PARAMETER Experiment Name: At_Petals_P Parameter: Age (day) Value: 23-25 days
  misc_feature: MA Experiment 20000794 PARAMETER Experiment Name: At_Petals_P Parameter: Plant Line Value: WS
  misc_feature: MA Experiment 20000794 PARAMETER Experiment Name: At_Petals_P Parameter: Tissue Value: Petals vs. Whole plant
  misc_feature: MA Experiment ID: 20001451 Result: Down-regulated in Transcription
  misc_feature: MA Experiment 20001451 PARAMETER Experiment Name: At_Far-red-induction_P Parameter: Age (day) Value: 7
  misc_feature: MA Experiment 20001451 PARAMETER Experiment Name: At_Far-red-induction_P Parameter: Light Value: Far-red vs. White
  misc_feature: MA Experiment 20001451 PARAMETER Experiment Name: At_Far-red-induction_P Parameter: Organism Value: A. thaliana
  misc_feature: MA Experiment 20001451 PARAMETER Experiment Name: At_Far-red-induction_P Parameter: Plant Line Value: Columbia
  misc_feature: MA Experiment 20001451 PARAMETER Experiment Name: At_Far-red-induction_P Parameter: Timepoint (hr) Value: 24
  misc_feature: MA Experiment 20001451 PARAMETER Experiment Name: At_Far-red-induction_P Parameter: Tissue Value: Whole Plant

SEQ ID NO: 31797 - protein, 462 aa, Arabidopsis thaliana; identical to SEQ ID NO: 28207
  peptide (1)..(462): Ceres Seq. ID no. 15220490
  misc_feature (230)..(460): Pfam Name: 2-oxoacid dehydrogenases acyltransferase Pfam Description: 2-oxoacid dehydrogenases acyltransferase
  misc_feature (95)..(233): Homolog of NCBI NO: 22967670 NR Description: hypothetical protein [Rhodospirillum rubrum]
  misc_feature (211)..(461): Homolog of NCBI NO: 22967670 NR Description: hypothetical protein [Rhodospirillum rubrum]
  misc_feature (150)..(462): Homolog of NCBI NO: 7484908 NR Description: dihydrolipoamide S-succinyltransferase homolog
  misc_feature (27)..(462): Homolog of NCBI NO: 21740743 NR Description: OSJNBa0072K14.8 [Oryza sativa (japonica
  misc_feature (101)..(462): Homolog of NCBI NO: 30687411 NR Description: dihydrolipoamide succinyltransferase -related
  misc_feature (1)..(462): Homolog of NCBI NO: 18416889 NR Description: dihydrolipoamide succinyltransferase -related
  misc_feature (2)..(462): Homolog of NCBI NO: 21618217 NR Description: putative dihydrolipoamide succinyltransferase
  misc_feature (1)..(462): Homolog of NCBI NO: 30687405 NR Description: dihydrolipoamide succinyltransferase -related
  misc_feature (1)..(462): Homolog of NCBI NO: 15240454 NR Description: 2-oxoglutarate dehydrogenase E2 subunit
  misc_feature (1)..(462): Homolog of NCBI NO: 4210332 NR Description: 2-oxoglutarate dehydrogenase E2 subunit

SEQ ID NO: 31798 - protein, 461 aa, Arabidopsis thaliana; identical to SEQ ID NO: 28208
  peptide (1)..(461): Ceres Seq. ID no. 15220491
  misc_feature (229)..(459): Pfam Name: 2-oxoacid dehydrogenases acyltransferase Pfam Description: 2-oxoacid dehydrogenases acyltransferase
  misc_feature (94)..(232): Homolog of NCBI NO: 22967670 NR Description: hypothetical protein [Rhodospirillum rubrum]
  misc_feature (210)..(460): Homolog of NCBI NO: 22967670 NR Description: hypothetical protein [Rhodospirillum rubrum]
  misc_feature (149)..(461): Homolog of NCBI NO: 7484908 NR Description: dihydrolipoamide S-succinyltransferase homolog
  misc_feature (26)..(461): Homolog of NCBI NO: 21740743 NR Description: OSJNBa0072K14.8 [Oryza sativa (japonica
  misc_feature (100)..(461): Homolog of NCBI NO: 30687411 NR Description: dihydrolipoamide succinyltransferase -related
  misc_feature (1)..(461): Homolog of NCBI NO: 18416889 NR Description: dihydrolipoamide succinyltransferase -related
  misc_feature (1)..(461): Homolog of NCBI NO: 21618217 NR Description: putative dihydrolipoamide succinyltransferase
  misc_feature (1)..(461): Homolog of NCBI NO: 30687405 NR Description: dihydrolipoamide succinyltransferase -related
  misc_feature (1)..(461): Homolog of NCBI NO: 15240454 NR Description: 2-oxoglutarate dehydrogenase E2 subunit
  misc_feature (1)..(461): Homolog of NCBI NO: 4210332 NR Description: 2-oxoglutarate dehydrogenase E2 subunit

SEQ ID NO: 31799 - protein, 362 aa, Arabidopsis thaliana; identical to SEQ ID NO: 28209
  peptide (1)..(362): Ceres Seq. ID no. 15220492
  misc_feature (130)..(360): Pfam Name: 2-oxoacid dehydrogenases acyltransferase Pfam Description: 2-oxoacid dehydrogenases acyltransferase
  misc_feature (1)..(133): Homolog of NCBI NO: 22967670 NR Description: hypothetical protein [Rhodospirillum rubrum]
  misc_feature (111)..(361): Homolog of NCBI NO: 22967670 NR Description: hypothetical protein [Rhodospirillum rubrum]
  misc_feature (50)..(362): Homolog of NCBI NO: 7484908 NR Description: dihydrolipoamide S-succinyltransferase homolog
  misc_feature (1)..(362): Homolog of NCBI NO: 21740743 NR Description: OSJNBa0072K14.8 [Oryza sativa (japonica
  misc_feature (1)..(362): Homolog of NCBI NO: 30687411 NR Description: dihydrolipoamide succinyltransferase -related
  misc_feature (1)..(362): Homolog of NCBI NO: 18416889 NR Description: dihydrolipoamide succinyltransferase -related
  misc_feature (1)..(362): Homolog of NCBI NO: 21618217 NR Description: putative dihydrolipoamide succinyltransferase
  misc_feature (1)..(362): Homolog of NCBI NO: 30687405 NR Description: dihydrolipoamide succinyltransferase -related
  misc_feature (1)..(362): Homolog of NCBI NO: 15240454 NR Description: 2-oxoglutarate dehydrogenase E2 subunit
  misc_feature (1)..(362): Homolog of NCBI NO: 4210332 NR Description: 2-oxoglutarate dehydrogenase E2 subunit

SEQ ID NO: 31800 - DNA, 1470 bp, Arabidopsis thaliana; identical to SEQ ID NO: 28210
  misc_feature (1)..(1470): Ceres Seq. ID no. 12326409
  misc_feature: MA Experiment ID: 20000171 Result: Down-regulated in Transcription
  misc_feature: MA Experiment 20000171 PARAMETER Experiment Name: At_42deg_Heat_P Parameter: Age (day) Value: 14
  misc_feature: MA Experiment 20000171 PARAMETER Experiment Name: At_42deg_Heat_P Parameter: Organism Value: A. thaliana
  misc_feature: MA Experiment 20000171 PARAMETER Experiment Name: At_42deg_Heat_P Parameter: Plant Line Value: WS
  misc_feature: MA Experiment 20000171 PARAMETER Experiment Name: At_42deg_Heat_P Parameter: Temperature (deg C) Value: 42 vs. 22
  misc_feature: MA Experiment 20000171 PARAMETER Experiment Name: At_42deg_Heat_P Parameter: Timepoint (hr) Value: 1
  misc_feature: MA Experiment 20000171 PARAMETER Experiment Name: At_42deg_Heat_P Parameter: Tissue Value: Aerial
  misc_feature: MA Experiment ID: 20000173 Result: Down-regulated in Transcription
  misc_feature: MA Experiment 20000173 PARAMETER Experiment Name: At_42deg_Heat_P Parameter: Age (day) Value: 14
  misc_feature: MA Experiment 20000173 PARAMETER Experiment Name: At_42deg_Heat_P Parameter: Organism Value: A. thaliana
  misc_feature: MA Experiment 20000173 PARAMETER Experiment Name: At_42deg_Heat_P Parameter: Plant Line Value: WS
  misc_feature: MA Experiment 20000173 PARAMETER Experiment Name: At_42deg_Heat_P Parameter: Temperature (deg C) Value: 42 vs. 22
  misc_feature: MA Experiment 20000173 PARAMETER Experiment Name: At_42deg_Heat_P Parameter: Timepoint (hr) Value: 6
  misc_feature: MA Experiment 20000173 PARAMETER Experiment Name: At_42deg_Heat_P Parameter: Tissue Value: Aerial
  misc_feature: MA Experiment ID: 20000180 Result: Up-regulated in Transcription
  misc_feature: MA Experiment 20000180 PARAMETER Experiment Name: At_Germinating_Seeds_P Parameter: Age (hr) Value: 24 vs. 0
  misc_feature: MA Experiment 20000180 PARAMETER Experiment Name: At_Germinating_Seeds_P Parameter: Tissue Value: Germinating Seeds
  misc_feature: MA Experiment ID: 20000182 Result: Down-regulated in Transcription
  misc_feature: MA Experiment 20000182 PARAMETER Experiment Name: At_2mM_SA_P Parameter: Age (day) Value: 14
  misc_feature: MA Experiment 20000182 PARAMETER Experiment Name: At_2mM_SA_P Parameter: Organism Value: A. thaliana
  misc_feature: MA Experiment 20000182 PARAMETER Experiment Name: At_2mM_SA_P Parameter: Plant Line Value: WS
  misc_feature: MA Experiment 20000182 PARAMETER Experiment Name: At_2mM_SA_P Parameter: Timepoint (hr) Value: 6
  misc_feature: MA Experiment 20000182 PARAMETER Experiment Name: At_2mM_SA_P Parameter: Tissue Value: Aerial
  misc_feature: MA Experiment 20000182 PARAMETER Experiment Name: At_2mM_SA_P Parameter: Treatment Value: 2mM SA vs. No Treatment
  misc_feature: MA Experiment ID: 20000184 Result: Up-regulated in Transcription
  misc_feature: MA Experiment 20000184 PARAMETER Experiment Name: At_Shoots__P Parameter: Age (day) Value: 7
  misc_feature: MA Experiment 20000184 PARAMETER Experiment Name: At_Shoots__P Parameter: Tissue Value: Shoots vs. Whole Plant
  misc_feature: MA Experiment ID: 20000234 Result: Up-regulated in Transcription
  misc_feature: MA Experiment 20000234 PARAMETER Experiment Name: At_Siliques_P Parameter: Age (day) Value: 21
  misc_feature: MA Experiment 20000234 PARAMETER Experiment Name: At_Siliques_P Parameter: Organism Value: A. thaliana
  misc_feature: MA Experiment 20000234 PARAMETER Experiment Name: At_Siliques_P Parameter: Plant Line Value: WS
  misc_feature: MA Experiment 20000234 PARAMETER Experiment Name: At_Siliques_P Parameter: Tissue Value: Less Than 5mm Siliques vs. Whole Plant
  misc_feature: MA Experiment ID: 20000264 Result: Up-regulated in Transcription
  misc_feature: MA Experiment 20000264 PARAMETER Experiment Name: At_Open_Flower_P Parameter: Age (day) Value: 21
  misc_feature: MA Experiment 20000264 PARAMETER Experiment Name: At_Open_Flower_P Parameter: Plant Line Value: WS
  misc_feature: MA Experiment 20000264 PARAMETER Experiment Name: At_Open_Flower_P Parameter: Tissue Value: Open Flower vs. Whole Plant
  misc_feature: MA Experiment ID: 20000265 Result: Up-regulated in Transcription
  misc_feature: MA Experiment 20000265 PARAMETER Experiment Name: At_Open_Flower_P Parameter: Age (day) Value: 21
  misc_feature: MA Experiment 20000265 PARAMETER Experiment Name: At_Open_Flower_P Parameter: Plant Line Value: WS
  misc_feature: MA Experiment 20000265 PARAMETER Experiment Name: At_Open_Flower_P Parameter: Tissue Value: Closed Flower vs. Whole Plant
  misc_feature: MA Experiment ID: 20000286 Result: Up-regulated in Transcription
  misc_feature: MA Experiment 20000286 PARAMETER Experiment Name: At_Open_Flower_P Parameter: Age (day) Value: 21
  misc_feature: MA Experiment 20000286 PARAMETER Experiment Name: At_Open_Flower_P Parameter: Plant Line Value: WS
  misc_feature: MA Experiment 20000286 PARAMETER Experiment Name: At_Open_Flower_P Parameter: Tissue Value: Half Open vs. Whole Plant
  misc_feature: MA Experiment ID: 20000436 Result: Down-regulated in Transcription
  misc_feature: MA Experiment 20000436 PARAMETER Experiment Name: At_Drought_P Parameter: Age (day) Value: 7
  misc_feature: MA Experiment 20000436 PARAMETER Experiment Name: At_Drought_P Parameter: Organism Value: A. thaliana
  misc_feature: MA Experiment 20000436 PARAMETER Experiment Name: At_Drought_P Parameter: Plant Line Value: WS
  misc_feature: MA Experiment 20000436 PARAMETER Experiment Name: At_Drought_P Parameter: Timepoint (hr) Value: 12
  misc_feature: MA Experiment 20000436 PARAMETER Experiment Name: At_Drought_P Parameter: Tissue Value: Whole Plant
  misc_feature: MA Experiment 20000436 PARAMETER Experiment Name: At_Drought_P Parameter: Treatment Value: Drought vs. No Drought
  misc_feature: MA Experiment ID: 20000437 Result: Down-regulated in Transcription
  misc_feature: MA Experiment 20000437 PARAMETER Experiment Name: At_Drought_P Parameter: Age (day) Value: 8
  misc_feature: MA Experiment 20000437 PARAMETER Experiment Name: At_Drought_P Parameter: Organism Value: A. thaliana
  misc_feature: MA Experiment 20000437 PARAMETER Experiment Name: At_Drought_P Parameter: Plant Line Value: WS
  misc_feature: MA Experiment 20000437 PARAMETER Experiment Name: At_Drought_P Parameter: Timepoint (hr) Value: 24
  misc_feature: MA Experiment 20000437 PARAMETER Experiment Name: At_Drought_P Parameter: Tissue Value: Whole Plant
  misc_feature: MA Experiment 20000437 PARAMETER Experiment Name: At_Drought_P Parameter: Treatment Value: Drought vs. No Drought
  misc_feature: MA Experiment ID: 20000438 Result: Up-regulated in Transcription
  misc_feature: MA Experiment 20000438 PARAMETER Experiment Name: At_Shoots__P Parameter: Age (day) Value: 14
  misc_feature: MA Experiment 20000438 PARAMETER Experiment Name: At_Shoots__P Parameter: Tissue Value: Shoots vs. Whole Plant
  misc_feature: MA Experiment ID: 20000495 Result: Up-regulated in Transcription
  misc_feature: MA Experiment 20000495 PARAMETER Experiment Name: At_Guard_Cells_P Parameter: Harvest Date Value: 8/2/2002
  misc_feature: MA Experiment 20000495 PARAMETER Experiment Name: At_Guard_Cells_P Parameter: Organism Value: A. thaliana
  misc_feature: MA Experiment 20000495 PARAMETER Experiment Name: At_Guard_Cells_P Parameter: Tissue Value: Guard Cells vs. Leaves
  misc_feature: MA Experiment ID: 20001248 Result: Down-regulated in Transcription
  misc_feature: MA Experiment 20001248 PARAMETER Experiment Name: At_Far-red-induction_P Parameter: Age (day) Value: 7
  misc_feature: MA Experiment 20001248 PARAMETER Experiment Name: At_Far-red-induction_P Parameter: Light Value: Far-red vs. White
  misc_feature: MA Experiment 20001248 PARAMETER Experiment Name: At_Far-red-induction_P Parameter: Organism Value: A. thaliana
  misc_feature: MA Experiment 20001248 PARAMETER Experiment Name: At_Far-red-induction_P Parameter: Plant Line Value: Columbia
  misc_feature: MA Experiment 20001248 PARAMETER Experiment Name: At_Far-red-induction_P Parameter: Timepoint (hr) Value: 4
  misc_feature: MA Experiment 20001248 PARAMETER Experiment Name: At_Far-red-induction_P Parameter: Tissue Value: Whole Plant
  misc_feature: MA Experiment ID: 20001554 Result: Down-regulated in Transcription
  misc_feature: MA Experiment 20001554 PARAMETER Experiment Name: At_Drought_Soil_Dry_P Parameter: Age (day) Value: 21
  misc_feature: MA Experiment 20001554 PARAMETER Experiment Name: At_Drought_Soil_Dry_P Parameter: Organism Value: A. thaliana
  misc_feature: MA Experiment 20001554 PARAMETER Experiment Name: At_Drought_Soil_Dry_P Parameter: Plant Line Value: WS
  misc_feature: MA Experiment 20001554 PARAMETER Experiment Name: At_Drought_Soil_Dry_P Parameter: Post Timepoint (hr) Value: None
  misc_feature: MA Experiment 20001554 PARAMETER Experiment Name: At_Drought_Soil_Dry_P Parameter: Post-Treatment Value: None
  misc_feature: MA Experiment 20001554 PARAMETER Experiment Name: At_Drought_Soil_Dry_P Parameter: Timepoint (day) Value: 7
  misc_feature: MA Experiment 20001554 PARAMETER Experiment Name: At_Drought_Soil_Dry_P Parameter: Treatment Value: Drought vs. No Drought
  misc_feature: MA Experiment ID: 20001555 Result: Down-regulated in Transcription
  misc_feature: MA Experiment 20001555 PARAMETER Experiment Name: At_Drought_Soil_Dry_P Parameter: Age (day) Value: 24
  misc_feature: MA Experiment 20001555 PARAMETER Experiment Name: At_Drought_Soil_Dry_P Parameter: Organism Value: A. thaliana
  misc_feature: MA Experiment 20001555 PARAMETER Experiment Name: At_Drought_Soil_Dry_P Parameter: Plant Line Value: WS
  misc_feature: MA Experiment 20001555 PARAMETER Experiment Name: At_Drought_Soil_Dry_P Parameter: Post Timepoint (hr) Value: None
  misc_feature: MA Experiment 20001555 PARAMETER Experiment Name: At_Drought_Soil_Dry_P Parameter: Post-Treatment Value: None
  misc_feature: MA Experiment 20001555 PARAMETER Experiment Name: At_Drought_Soil_Dry_P Parameter: Timepoint (day) Value: 10
  misc_feature: MA Experiment 20001555 PARAMETER Experiment Name: At_Drought_Soil_Dry_P Parameter: Treatment Value: Drought vs. No Drought
  misc_feature: MA Experiment ID: 20001556 Result: Down-regulated in Transcription
  misc_feature: MA Experiment 20001556 PARAMETER Experiment Name: At_Drought_Soil_Dry_P Parameter: Age (day) Value: 26
  misc_feature: MA Experiment 20001556 PARAMETER Experiment Name: At_Drought_Soil_Dry_P Parameter: Organism Value: A. thaliana
  misc_feature: MA Experiment 20001556 PARAMETER Experiment Name: At_Drought_Soil_Dry_P Parameter: Plant Line Value: WS
  misc_feature: MA Experiment 20001556 PARAMETER Experiment Name: At_Drought_Soil_Dry_P Parameter: Post Timepoint (hr) Value: None
  misc_feature: MA Experiment 20001556 PARAMETER Experiment Name: At_Drought_Soil_Dry_P Parameter: Post-Treatment Value: None
  misc_feature: MA Experiment 20001556 PARAMETER Experiment Name: At_Drought_Soil_Dry_P Parameter: Timepoint (day) Value: 12
  misc_feature: MA Experiment 20001556 PARAMETER Experiment Name: At_Drought_Soil_Dry_P Parameter: Treatment Value: Drought vs. No Drought
  misc_feature: MA Experiment ID: 20001558 Result: Up-regulated in Transcription
  misc_feature: MA Experiment 20001558 PARAMETER Experiment Name: At_Drought_Soil_Dry_P Parameter: Age (day) Value: 27
  misc_feature: MA Experiment 20001558 PARAMETER Experiment Name: At_Drought_Soil_Dry_P Parameter: Organism Value: A. thaliana
  misc_feature: MA Experiment 20001558 PARAMETER Experiment Name: At_Drought_Soil_Dry_P Parameter: Plant Line Value: WS
  misc_feature: MA Experiment 20001558 PARAMETER Experiment Name: At_Drought_Soil_Dry_P Parameter: Post Timepoint (hr) Value: 6
  misc_feature: MA Experiment 20001558 PARAMETER Experiment Name: At_Drought_Soil_Dry_P Parameter: Post-Treatment Value: Re-Water vs. No Drought
  misc_feature: MA Experiment 20001558 PARAMETER Experiment Name: At_Drought_Soil_Dry_P Parameter: Timepoint (day) Value: 13
  misc_feature: MA Experiment 20001558 PARAMETER Experiment Name: At_Drought_Soil_Dry_P Parameter: Treatment Value: Drought vs. No Drought
  misc_feature: MA Experiment ID: 20001559 Result: Down-regulated in Transcription
  misc_feature: MA Experiment 20001559 PARAMETER Experiment Name: At_Drought_Soil_Dry_P Parameter: Age (day) Value: 28
  misc_feature: MA Experiment 20001559 PARAMETER Experiment Name: At_Drought_Soil_Dry_P Parameter: Organism Value: A. thaliana
  misc_feature: MA Experiment 20001559 PARAMETER Experiment Name: At_Drought_Soil_Dry_P Parameter: Plant Line Value: WS
  misc_feature: MA Experiment 20001559 PARAMETER Experiment Name: At_Drought_Soil_Dry_P Parameter: Post Timepoint (hr) Value: 29
  misc_feature: MA Experiment 20001559 PARAMETER Experiment Name: At_Drought_Soil_Dry_P Parameter: Post-Treatment Value: Re-Water vs. No Drought
  misc_feature: MA Experiment 20001559 PARAMETER Experiment Name: At_Drought_Soil_Dry_P Parameter: Timepoint (day) Value: 14
  misc_feature: MA Experiment 20001559 PARAMETER Experiment Name: At_Drought_Soil_Dry_P Parameter: Treatment Value: Drought vs. No Drought
  misc_feature: MA Experiment ID: 20001560 Result: Up-regulated in Transcription
  misc_feature: MA Experiment 20001560 PARAMETER Experiment Name: At_Drought_Soil_Dry_P Parameter: Age (day) Value: 28
  misc_feature: MA Experiment 20001560 PARAMETER Experiment Name: At_Drought_Soil_Dry_P Parameter: Organism Value: A. thaliana
  misc_feature: MA Experiment 20001560 PARAMETER Experiment Name: At_Drought_Soil_Dry_P Parameter: Plant Line Value: WS
  misc_feature: MA Experiment 20001560 PARAMETER Experiment Name: At_Drought_Soil_Dry_P Parameter: Post Timepoint (hr) Value: None
  misc_feature: MA Experiment 20001560 PARAMETER Experiment Name: At_Drought_Soil_Dry_P Parameter: Post-Treatment Value: None
  misc_feature: MA Experiment 20001560 PARAMETER Experiment Name: At_Drought_Soil_Dry_P Parameter: Timepoint (day) Value: 14
  misc_feature: MA Experiment 20001560 PARAMETER Experiment Name: At_Drought_Soil_Dry_P Parameter: Treatment Value: Drought vs. No Drought
  misc_feature: MA Experiment ID: 20001770 Result: Up-regulated in Transcription
  misc_feature: MA Experiment 20001770 PARAMETER Experiment Name: At_Far-red-enriched-adult_P Parameter: Age (day) Value: 28
  misc_feature: MA Experiment 20001770 PARAMETER Experiment Name: At_Far-red-enriched-adult_P Parameter: Light Value: Far-red enriched vs. White
  misc_feature: MA Experiment 20001770 PARAMETER Experiment Name: At_Far-red-enriched-adult_P Parameter: Organism Value: A. thaliana
  misc_feature: MA Experiment 20001770 PARAMETER Experiment Name: At_Far-red-enriched-adult_P Parameter: Plant Line Value: Columbia
  misc_feature: MA Experiment 20001770 PARAMETER Experiment Name: At_Far-red-enriched-adult_P Parameter: Timepoint (hr) Value: 8
  misc_feature: MA Experiment 20001770 PARAMETER Experiment Name: At_Far-red-enriched-adult_P Parameter: Tissue Value: Aerial
  misc_feature: MA Experiment ID: 20001904 Result: Down-regulated in Transcription
  misc_feature: MA Experiment 20001904 PARAMETER Experiment Name: At_Drought_Reproduction_P Parameter: Age (day) Value: 37
  misc_feature: MA Experiment 20001904 PARAMETER Experiment Name: At_Drought_Reproduction_P Parameter: Organism Value: A. thaliana
  misc_feature: MA Experiment 20001904 PARAMETER Experiment Name: At_Drought_Reproduction_P Parameter: Plant Line Value: WS
  misc_feature: MA Experiment 20001904 PARAMETER Experiment Name: At_Drought_Reproduction_P Parameter: Timepoint (day) Value: 7
  misc_feature: MA Experiment 20001904 PARAMETER Experiment Name: At_Drought_Reproduction_P Parameter: Tissue Value: Rosettes
  misc_feature: MA Experiment 20001904 PARAMETER Experiment Name: At_Drought_Reproduction_P Parameter: Treatment Value: Drought vs. No Drought
  misc_feature: MA Experiment ID: 20001911 Result: Down-regulated in Transcription
  misc_feature: MA Experiment 20001911 PARAMETER Experiment Name: At_Drought_Reproduction_P Parameter: Age (day) Value: 40
  misc_feature: MA Experiment 20001911 PARAMETER Experiment Name: At_Drought_Reproduction_P Parameter: Organism Value: A. thaliana
  misc_feature: MA Experiment 20001911 PARAMETER Experiment Name: At_Drought_Reproduction_P Parameter: Plant Line Value: WS
  misc_feature: MA Experiment 20001911 PARAMETER Experiment Name: At_Drought_Reproduction_P Parameter: Timepoint (day) Value: 10
  misc_feature: MA Experiment 20001911 PARAMETER Experiment Name: At_Drought_Reproduction_P Parameter: Tissue Value: Flowers
  misc_feature: MA Experiment 20001911 PARAMETER Experiment Name: At_Drought_Reproduction_P Parameter: Treatment Value: Drought vs. No Drought

SEQ ID NO: 31801 - protein, 425 aa, Arabidopsis thaliana; identical to SEQ ID NO: 28211
  peptide (1)..(425): Ceres Seq. ID no. 12326410
  misc_feature (46)..(422): Pfam Name: Eukaryotic aspartyl protease Pfam Description: Eukaryotic aspartyl protease
  misc_feature (11)..(424): Homolog of NCBI NO: 21594980 NR Description: chloroplast nucleoid DNA binding protein,
  misc_feature (75)..(424): Homolog of NCBI NO: 15290061 NR Description: nucleoid DNA-binding protein cnd41-like protein
  misc_feature (11)..(424): Homolog of NCBI NO: 15223368 NR Description: chloroplast nucleoid DNA binding protein, putative
  misc_feature (62)..(424): Homolog of NCBI NO: 21450872 NR Description: unknown protein [Arabidopsis thaliana]
  misc_feature (28)..(424): Homolog of NCBI NO: 18391062 NR Description: expressed protein
  misc_feature (74)..(425): Homolog of NCBI NO: 20161865 NR Description: putative nucleoid DNA-binding-like protein
  misc_feature (31)..(425): Homolog of NCBI NO: 34899068 NR Description: similar to nucleoid DNA-binding-like protein
  misc_feature (5)..(425): Homolog of NCBI NO: 15240680 NR Description: nucleoid DNA-binding-like protein
  misc_feature (1)..(425): Homolog of NCBI NO: 21617933 NR Description: nucleoid DNA-binding-like protein [Arabidopsis
  misc_feature (1)..(425): Homolog of NCBI NO: 15232503 NR Description: nucleoid DNA-binding - like protein

SEQ ID NO: 31802 - protein, 325 aa, Arabidopsis thaliana; identical to SEQ ID NO: 28212
  peptide (1)..(325): Ceres Seq. ID no. 12326411
  misc_feature (1)..(322): Pfam Name: Eukaryotic aspartyl protease Pfam Description: Eukaryotic aspartyl protease
  misc_feature (1)..(324): Homolog of NCBI NO: 21594980 NR Description: chloroplast nucleoid DNA binding protein,
  misc_feature (1)..(324): Homolog of NCBI NO: 15290061 NR Description: nucleoid DNA-binding protein cnd41-like protein
  misc_feature (1)..(324): Homolog of NCBI NO: 15223368 NR Description: chloroplast nucleoid DNA binding protein, putative
  misc_feature (1)..(324): Homolog of NCBI NO: 21450872 NR Description: unknown protein [Arabidopsis thaliana]
  misc_feature (1)..(324): Homolog of NCBI NO: 18391062 NR Description: expressed protein
  misc_feature (1)..(325): Homolog of NCBI NO: 20161865 NR Description: putative nucleoid DNA-binding-like protein
  misc_feature (1)..(325): Homolog of NCBI NO: 34899068 NR Description: similar to nucleoid DNA-binding-like protein
  misc_feature (1)..(325): Homolog of NCBI NO: 15240680 NR Description: nucleoid DNA-binding-like protein
  misc_feature (1)..(325): Homolog of NCBI NO: 21617933 NR Description: nucleoid DNA-binding-like protein [Arabidopsis
  misc_feature (1)..(325): Homolog of NCBI NO: 15232503 NR Description: nucleoid DNA-binding - like protein

SEQ ID NO: 31803 - protein, 262 aa, Arabidopsis thaliana; identical to SEQ ID NO: 28213
  peptide (1)..(262): Ceres Seq. ID no. 12326412
  misc_feature (1)..(259): Pfam Name: Eukaryotic aspartyl protease Pfam Description: Eukaryotic aspartyl protease
  misc_feature (1)..(261): Homolog of NCBI NO: 21594980 NR Description: chloroplast nucleoid DNA binding protein,
  misc_feature (1)..(261): Homolog of NCBI NO: 15290061 NR Description: nucleoid DNA-binding protein cnd41-like protein
  misc_feature (1)..(261): Homolog of NCBI NO: 15223368 NR Description: chloroplast nucleoid DNA binding protein, putative
  misc_feature (1)..(261): Homolog of NCBI NO: 21450872 NR Description: unknown protein [Arabidopsis thaliana]
  misc_feature (1)..(261): Homolog of NCBI NO: 18391062 NR Description: expressed protein
  misc_feature (1)..(262): Homolog of NCBI NO: 20161865 NR Description: putative nucleoid DNA-binding-like protein
  misc_feature (1)..(262): Homolog of NCBI NO: 34899068 NR Description: similar to nucleoid DNA-binding-like protein
  misc_feature (1)..(262): Homolog of NCBI NO: 15240680 NR Description: nucleoid DNA-binding-like protein
  misc_feature (1)..(262): Homolog of NCBI NO: 21617933 NR Description: nucleoid DNA-binding-like protein [Arabidopsis
  misc_feature (1)..(262): Homolog of NCBI NO: 15232503 NR Description: nucleoid DNA-binding - like protein

SEQ ID NO: 31804 - DNA, 1358 bp, Arabidopsis thaliana; identical to SEQ ID NO: 28214
  misc_feature (1)..(1358): Ceres Seq. ID no. 12482532
  misc_feature: MA Experiment ID: 20000169 Result: Up-regulated in Transcription
  misc_feature: MA Experiment 20000169 PARAMETER Experiment Name: At_100uM_ABA_P Parameter: Age (day) Value: 14
  misc_feature: MA Experiment 20000169 PARAMETER Experiment Name: At_100uM_ABA_P Parameter: Organism Value: A. thaliana
  misc_feature: MA Experiment 20000169 PARAMETER Experiment Name: At_100uM_ABA_P Parameter: Plant Line Value: WS
  misc_feature: MA Experiment 20000169 PARAMETER Experiment Name: At_100uM_ABA_P Parameter: Timepoint (hr) Value: 6
  misc_feature: MA Experiment 20000169 PARAMETER Experiment Name: At_100uM_ABA_P Parameter: Tissue Value: Aerial
  misc_feature: MA Experiment 20000169 PARAMETER Experiment Name: At_100uM_ABA_P Parameter: Treatment Value: 100uM ABA vs. No Treatment
  misc_feature: MA Experiment ID: 20000179 Result: Up-regulated in Transcription
  misc_feature: MA Experiment 20000179 PARAMETER Experiment Name: At_Germinating_Seeds_P Parameter: Age (hr) Value: 6 vs. 0
  misc_feature: MA Experiment 20000179 PARAMETER Experiment Name: At_Germinating_Seeds_P Parameter: Tissue Value: Germinating Seeds
  misc_feature: MA Experiment ID: 20000180 Result: Up-regulated in Transcription
  misc_feature: MA Experiment 20000180 PARAMETER Experiment Name: At_Germinating_Seeds_P Parameter: Age (hr) Value: 24 vs. 0
  misc_feature: MA Experiment 20000180 PARAMETER Experiment Name: At_Germinating_Seeds_P Parameter: Tissue Value: Germinating Seeds
  misc_feature: MA Experiment ID: 20000182 Result: Up-regulated in Transcription
  misc_feature: MA Experiment 20000182 PARAMETER Experiment Name: At_2mM_SA_P Parameter: Age (day) Value: 14
  misc_feature: MA Experiment 20000182 PARAMETER Experiment Name: At_2mM_SA_P Parameter: Organism Value: A. thaliana
  misc_feature: MA Experiment 20000182 PARAMETER Experiment Name: At_2mM_SA_P Parameter: Plant Line Value: WS
  misc_feature: MA Experiment 20000182 PARAMETER Experiment Name: At_2mM_SA_P Parameter: Timepoint (hr) Value: 6
  misc_feature: MA Experiment 20000182 PARAMETER Experiment Name: At_2mM_SA_P Parameter: Tissue Value: Aerial
  misc_feature: MA Experiment 20000182 PARAMETER Experiment Name: At_2mM_SA_P Parameter: Treatment Value: 2mM SA vs. No Treatment
  misc_feature: MA Experiment ID: 20000234 Result: Down-regulated in Transcription
  misc_feature: MA Experiment 20000234 PARAMETER Experiment Name: At_Siliques_P Parameter: Age (day) Value: 21
  misc_feature: MA Experiment 20000234 PARAMETER Experiment Name: At_Siliques_P Parameter: Organism Value: A. thaliana
  misc_feature: MA Experiment 20000234 PARAMETER Experiment Name: At_Siliques_P Parameter: Plant Line Value: WS
  misc_feature: MA Experiment 20000234 PARAMETER Experiment Name: At_Siliques_P Parameter: Tissue Value: Less Than 5mm Siliques vs. Whole Plant
  misc_feature: MA Experiment ID: 20000286 Result: Down-regulated in Transcription
  misc_feature: MA Experiment 20000286 PARAMETER Experiment Name: At_Open_Flower_P Parameter: Age (day) Value: 21
  misc_feature: MA Experiment 20000286 PARAMETER Experiment Name: At_Open_Flower_P Parameter: Plant Line Value: WS
  misc_feature: MA Experiment 20000286 PARAMETER Experiment Name: At_Open_Flower_P Parameter: Tissue Value: Half Open vs. Whole Plant
  misc_feature: MA Experiment ID: 20000453 Result: Up-regulated in Transcription
  misc_feature: MA Experiment 20000453 PARAMETER Experiment Name: At_100uM_ABA_P Parameter: Age (day) Value: 15
  misc_feature: MA Experiment 20000453 PARAMETER Experiment Name: At_100uM_ABA_P Parameter: Organism Value: A. thaliana
  misc_feature: MA Experiment 20000453 PARAMETER Experiment Name: At_100uM_ABA_P Parameter: Plant Line Value: WS
  misc_feature: MA Experiment 20000453 PARAMETER Experiment Name: At_100uM_ABA_P Parameter: Timepoint (hr) Value: 24
  misc_feature: MA Experiment 20000453 PARAMETER Experiment Name: At_100uM_ABA_P Parameter: Tissue Value: Aerial
  misc_feature: MA Experiment 20000453 PARAMETER Experiment Name: At_100uM_ABA_P Parameter: Treatment Value: 100uM ABA vs. No Treatment
  misc_feature: MA Experiment ID: 20000709 Result: Down-regulated in Transcription
  misc_feature: MA Experiment 20000709 PARAMETER Experiment Name: At_15mM_NH4NO3_L-to-H_P Parameter: Age (hr) Value: 14
  misc_feature: MA Experiment 20000709 PARAMETER Experiment Name: At_15mM_NH4NO3_L-to-H_P Parameter: Organism Value: A. thaliana
  misc_feature: MA Experiment 20000709 PARAMETER Experiment Name: At_15mM_NH4NO3_L-to-H_P Parameter: Plant Line Value: WS
  misc_feature: MA Experiment 20000709 PARAMETER Experiment Name: At_15mM_NH4NO3_L-to-H_P Parameter: Timepoint (hr) Value: 4
  misc_feature: MA Experiment 20000709 PARAMETER Experiment Name: At_15mM_NH4NO3_L-to-H_P Parameter: Tissue Value: Aerial
  misc_feature: MA Experiment 20000709 PARAMETER Experiment Name: At_15mM_NH4NO3_L-to-H_P Parameter: Treatment Value: 15mM NH4NO3 vs. 30mM Mannitol
  misc_feature: MA Experiment ID: 20000794 Result: Up-regulated in Transcription
  misc_feature: MA Experiment 20000794 PARAMETER Experiment Name: At_Petals_P Parameter: Age (day) Value: 23-25 days
  misc_feature: MA Experiment 20000794 PARAMETER Experiment Name: At_Petals_P Parameter: Plant Line Value: WS
  misc_feature: MA Experiment 20000794 PARAMETER Experiment Name: At_Petals_P Parameter: Tissue Value: Petals vs. Whole plant
  misc_feature: MA Experiment ID: 20001554 Result: Up-regulated in Transcription
  misc_feature: MA Experiment 20001554 PARAMETER Experiment Name: At_Drought_Soil_Dry_P Parameter: Age (day) Value: 21
  misc_feature: MA Experiment 20001554 PARAMETER Experiment Name: At_Drought_Soil_Dry_P Parameter: Organism Value: A. thaliana
  misc_feature: MA Experiment 20001554 PARAMETER Experiment Name: At_Drought_Soil_Dry_P Parameter: Plant Line Value: WS
  misc_feature: MA Experiment 20001554 PARAMETER Experiment Name: At_Drought_Soil_Dry_P Parameter: Post Timepoint (hr) Value: None
  misc_feature: MA Experiment 20001554 PARAMETER Experiment Name: At_Drought_Soil_Dry_P Parameter: Post-Treatment Value: None
  misc_feature: MA Experiment 20001554 PARAMETER Experiment Name: At_Drought_Soil_Dry_P Parameter: Timepoint (day) Value: 7
  misc_feature: MA Experiment 20001554 PARAMETER Experiment Name: At_Drought_Soil_Dry_P Parameter: Treatment Value: Drought vs. No Drought
  misc_feature: MA Experiment ID: 20001557 Result: Down-regulated in Transcription
  misc_feature: MA Experiment 20001557 PARAMETER Experiment Name: At_Drought_Soil_Dry_P Parameter: Age (day) Value: 27
  misc_feature: MA Experiment 20001557 PARAMETER Experiment Name: At_Drought_Soil_Dry_P Parameter: Organism Value: A. thaliana
  misc_feature: MA Experiment 20001557 PARAMETER Experiment Name: At_Drought_Soil_Dry_P Parameter: Plant Line Value: WS
  misc_feature: MA Experiment 20001557 PARAMETER Experiment Name: At_Drought_Soil_Dry_P Parameter: Post Timepoint (hr) Value: 3
  misc_feature: MA Experiment 20001557 PARAMETER Experiment Name: At_Drought_Soil_Dry_P Parameter: Post-Treatment Value: Re-Water vs. No Drought
  misc_feature: MA Experiment 20001557 PARAMETER Experiment Name: At_Drought_Soil_Dry_P Parameter: Timepoint (day) Value: 13
  misc_feature: MA Experiment 20001557 PARAMETER Experiment Name: At_Drought_Soil_Dry_P Parameter: Treatment Value: Drought vs. No Drought
  misc_feature: MA Experiment ID: 20001558 Result: Down-regulated in Transcription
  misc_feature: MA Experiment 20001558 PARAMETER Experiment Name: At_Drought_Soil_Dry_P Parameter: Age (day) Value: 27
  misc_feature: MA Experiment 20001558 PARAMETER Experiment Name: At_Drought_Soil_Dry_P Parameter: Organism Value: A. thaliana
  misc_feature: MA Experiment 20001558 PARAMETER Experiment Name: At_Drought_Soil_Dry_P Parameter: Plant Line Value: WS
  misc_feature: MA Experiment 20001558 PARAMETER Experiment Name: At_Drought_Soil_Dry_P Parameter: Post Timepoint (hr) Value: 6
  misc_feature: MA Experiment 20001558 PARAMETER Experiment Name: At_Drought_Soil_Dry_P Parameter: Post-Treatment Value: Re-Water vs. No Drought
  misc_feature: MA Experiment 20001558 PARAMETER Experiment Name: At_Drought_Soil_Dry_P Parameter: Timepoint (day) Value: 13
  misc_feature: MA Experiment 20001558 PARAMETER Experiment Name: At_Drought_Soil_Dry_P Parameter: Treatment Value: Drought vs. No Drought
  misc_feature: MA Experiment ID: 20001560 Result: Down-regulated in Transcription
  misc_feature: MA Experiment 20001560 PARAMETER Experiment Name: At_Drought_Soil_Dry_P Parameter: Age (day) Value: 28
  misc_feature: MA Experiment 20001560 PARAMETER Experiment Name: At_Drought_Soil_Dry_P Parameter: Organism Value: A. thaliana
  misc_feature: MA Experiment 20001560 PARAMETER Experiment Name: At_Drought_Soil_Dry_P Parameter: Plant Line Value: WS
  misc_feature: MA Experiment 20001560 PARAMETER Experiment Name: At_Drought_Soil_Dry_P Parameter: Post Timepoint (hr) Value: None
  misc_feature: MA Experiment 20001560 PARAMETER Experiment Name: At_Drought_Soil_Dry_P Parameter: Post-Treatment Value: None
  misc_feature: MA Experiment 20001560 PARAMETER Experiment Name: At_Drought_Soil_Dry_P Parameter: Timepoint (day) Value: 14
  misc_feature: MA Experiment 20001560 PARAMETER Experiment Name: At_Drought_Soil_Dry_P Parameter: Treatment Value: Drought vs. No Drought

SEQ ID NO: 31805 - protein, 358 aa, Arabidopsis thaliana; identical to SEQ ID NO: 21554
  peptide (1)..(358): Ceres Seq. ID no. 12482533
  misc_feature (141)..(356): Pfam Name: Papain family cysteine protease Pfam Description: Papain family cysteine protease
  misc_feature (9)..(358): Homolog of NCBI NO: 14422331 NR Description: early leaf senescence abundant cysteine protease
  misc_feature (9)..(358): Homolog of NCBI NO: 7435779 NR Description: cysteine proteinase (EC 3.4.22.-) - garden pea
  misc_feature (6)..(358): Homolog of NCBI NO: 2677828 NR Description: cysteine protease [Prunus armeniaca]
  misc_feature (6)..(358): Homolog of NCBI NO: 28192371 NR Description: NTCP23-like cysteine proteinase [Nicotiana
  misc_feature (6)..(358): Homolog of NCBI NO: 8347420 NR Description: cysteine protease [Nicotiana tabacum]
  misc_feature (1)..(346): Homolog of NCBI NO: 11265612 NR Description: cysteine proteinase (EC 3.4.22.-) F18N11.70
  misc_feature (1)..(358): Homolog of NCBI NO: 18407961 NR Description: cysteine proteinase AALP, putative
  misc_feature (1)..(358): Homolog of NCBI NO: 18141289 NR Description: senescence-associated cysteine protease [Brassica
  misc_feature (1)..(358): Homolog of NCBI NO: 23397070 NR Description: putative cysteine proteinase AALP [Arabidopsis
  misc_feature (1)..(358): Homolog of NCBI NO: 18424347 NR Description: cysteine proteinase AALP

SEQ ID NO: 31806 - protein, 325 aa, Arabidopsis thaliana; identical to SEQ ID NO: 21555
  peptide (1)..(325): Ceres Seq. ID no. 12482534
  misc_feature (108)..(323): Pfam Name: Papain family cysteine protease Pfam Description: Papain family cysteine protease
  misc_feature (1)..(325): Homolog of NCBI NO: 14422331 NR Description: early leaf senescence abundant cysteine protease
  misc_feature (1)..(325): Homolog of NCBI NO: 7435779 NR Description: cysteine proteinase (EC 3.4.22.-) - garden pea
  misc_feature (1)..(325): Homolog of NCBI NO: 2677828 NR Description: cysteine protease [Prunus armeniaca]
  misc_feature (1)..(325): Homolog of NCBI NO: 28192371 NR Description: NTCP23-like cysteine proteinase [Nicotiana
  misc_feature (1)..(325): Homolog of NCBI NO: 8347420 NR Description: cysteine protease [Nicotiana tabacum]
  misc_feature (1)..(313): Homolog of NCBI NO: 11265612 NR Description: cysteine proteinase (EC 3.4.22.-) F18N11.70
  misc_feature (1)..(325): Homolog of NCBI NO: 18407961 NR Description: cysteine proteinase AALP, putative
  misc_feature (1)..(325): Homolog of NCBI NO: 18141289 NR Description: senescence-associated cysteine protease [Brassica
  misc_feature (1)..(325): Homolog of NCBI NO: 23397070 NR Description: putative cysteine proteinase AALP [Arabidopsis
  misc_feature (1)..(325): Homolog of NCBI NO: 18424347 NR Description: cysteine proteinase AALP

SEQ ID NO: 31807 - protein, 283 aa, Arabidopsis thaliana; identical to SEQ ID NO: 21556
  peptide (1)..(283): Ceres Seq. ID no. 12482535
  misc_feature (66)..(281): Pfam Name: Papain family cysteine protease Pfam Description: Papain family cysteine protease
  misc_feature (1)..(283): Homolog of NCBI NO: 14422331 NR Description: early leaf senescence abundant cysteine protease
  misc_feature (1)..(283): Homolog of NCBI NO: 7435779 NR Description: cysteine proteinase (EC 3.4.22.-) - garden pea
  misc_feature (1)..(283): Homolog of NCBI NO: 2677828 NR Description: cysteine protease [Prunus armeniaca]
  misc_feature (1)..(283): Homolog of NCBI NO: 28192371 NR Description: NTCP23-like cysteine proteinase [Nicotiana
  misc_feature (1)..(283): Homolog of NCBI NO: 8347420 NR Description: cysteine protease [Nicotiana tabacum]
  misc_feature (1)..(271): Homolog of NCBI NO: 11265612 NR Description: cysteine proteinase (EC 3.4.22.-) F18N11.70
  misc_feature (1)..(283): Homolog of NCBI NO: 18407961 NR Description: cysteine proteinase AALP, putative
  misc_feature (1)..(283): Homolog of NCBI NO: 18141289 NR Description: senescence-associated cysteine protease [Brassica
  misc_feature (1)..(283): Homolog of NCBI NO: 23397070 NR Description: putative cysteine proteinase AALP [Arabidopsis
  misc_feature (1)..(283): Homolog of NCBI NO: 18424347 NR Description: cysteine proteinase AALP

SEQ ID NO: 31808 - DNA, 1371 bp, Arabidopsis thaliana; identical to SEQ ID NO: 28218
  misc_feature (1)..(1371): Ceres Seq. ID no. 12333807
  misc_feature: MA Experiment ID: 20000171 Result: Down-regulated in Transcription
  misc_feature: MA Experiment 20000171 PARAMETER Experiment Name: At_42deg_Heat_P Parameter: Age (day) Value: 14
  misc_feature: MA Experiment 20000171 PARAMETER Experiment Name: At_42deg_Heat_P Parameter: Organism Value: A. thaliana
  misc_feature: MA Experiment 20000171 PARAMETER Experiment Name: At_42deg_Heat_P Parameter: Plant Line Value: WS
  misc_feature: MA Experiment 20000171 PARAMETER Experiment Name: At_42deg_Heat_P Parameter: Temperature (deg C) Value: 42 vs. 22
  misc_feature: MA Experiment 20000171 PARAMETER Experiment Name: At_42deg_Heat_P Parameter: Timepoint (hr) Value: 1
  misc_feature: MA Experiment 20000171 PARAMETER Experiment Name: At_42deg_Heat_P Parameter: Tissue Value: Aerial
  misc_feature: MA Experiment ID: 20000173 Result: Down-regulated in Transcription
  misc_feature: MA Experiment 20000173 PARAMETER Experiment Name: At_42deg_Heat_P Parameter: Age (day) Value: 14
  misc_feature: MA Experiment 20000173 PARAMETER Experiment Name: At_42deg_Heat_P Parameter: Organism Value: A. thaliana
  misc_feature: MA Experiment 20000173 PARAMETER Experiment Name: At_42deg_Heat_P Parameter: Plant Line Value: WS
  misc_feature: MA Experiment 20000173 PARAMETER Experiment Name: At_42deg_Heat_P Parameter: Temperature (deg C) Value: 42 vs. 22
  misc_feature: MA Experiment 20000173 PARAMETER Experiment Name: At_42deg_Heat_P Parameter: Timepoint (hr) Value: 6
  misc_feature: MA Experiment 20000173 PARAMETER Experiment Name: At_42deg_Heat_P Parameter: Tissue Value: Aerial
  misc_feature: MA Experiment ID: 20000234 Result: Up-regulated in Transcription
  misc_feature: MA Experiment 20000234 PARAMETER Experiment Name: At_Siliques_P Parameter: Age (day) Value: 21
  misc_feature: MA Experiment 20000234 PARAMETER Experiment Name: At_Siliques_P Parameter: Organism Value: A. thaliana
  misc_feature: MA Experiment 20000234 PARAMETER Experiment Name: At_Siliques_P Parameter: Plant Line Value: WS
  misc_feature: MA Experiment 20000234 PARAMETER Experiment Name: At_Siliques_P Parameter: Tissue Value: Less Than 5mm Siliques vs. Whole Plant
  misc_feature: MA Experiment ID: 20000264 Result: Up-regulated in Transcription
  misc_feature: MA Experiment 20000264 PARAMETER Experiment Name: At_Open_Flower_P Parameter: Age (day) Value: 21
  misc_feature: MA Experiment 20000264 PARAMETER Experiment Name: At_Open_Flower_P Parameter: Plant Line Value: WS
  misc_feature: MA Experiment 20000264 PARAMETER Experiment Name: At_Open_Flower_P Parameter: Tissue Value: Open Flower vs. Whole Plant
  misc_feature: MA Experiment ID: 20000286 Result: Up-regulated in Transcription
  misc_feature: MA Experiment 20000286 PARAMETER Experiment Name: At_Open_Flower_P Parameter: Age (day) Value: 21
  misc_feature: MA Experiment 20000286 PARAMETER Experiment Name: At_Open_Flower_P Parameter: Plant Line Value: WS
  misc_feature: MA Experiment 20000286 PARAMETER Experiment Name: At_Open_Flower_P Parameter: Tissue Value: Half Open vs. Whole Plant
  misc_feature: MA Experiment ID: 20000437 Result: Down-regulated in Transcription
  misc_feature: MA Experiment 20000437 PARAMETER Experiment Name: At_Drought_P Parameter: Age (day) Value: 8
  misc_feature: MA Experiment 20000437 PARAMETER Experiment Name: At_Drought_P Parameter: Organism Value: A. thaliana
  misc_feature: MA Experiment 20000437 PARAMETER Experiment Name: At_Drought_P Parameter: Plant Line Value: WS
  misc_feature: MA Experiment 20000437 PARAMETER Experiment Name: At_Drought_P Parameter: Timepoint (hr) Value: 24
  misc_feature: MA Experiment 20000437 PARAMETER Experiment Name: At_Drought_P Parameter: Tissue Value: Whole Plant
  misc_feature: MA Experiment 20000437 PARAMETER Experiment Name: At_Drought_P Parameter: Treatment Value: Drought vs. No Drought
  misc_feature: MA Experiment ID: 20001451 Result: Down-regulated in Transcription
  misc_feature: MA Experiment 20001451 PARAMETER Experiment Name: At_Far-red-induction_P Parameter: Age (day) Value: 7
  misc_feature: MA Experiment 20001451 PARAMETER Experiment Name: At_Far-red-induction_P Parameter: Light Value: Far-red vs. White
  misc_feature: MA Experiment 20001451 PARAMETER Experiment Name: At_Far-red-induction_P Parameter: Organism Value: A. thaliana
  misc_feature: MA Experiment 20001451 PARAMETER Experiment Name: At_Far-red-induction_P Parameter: Plant Line Value: Columbia
  misc_feature: MA Experiment 20001451 PARAMETER Experiment Name: At_Far-red-induction_P Parameter: Timepoint (hr) Value: 24
  misc_feature: MA Experiment 20001451 PARAMETER Experiment Name: At_Far-red-induction_P Parameter: Tissue Value: Whole Plant
  misc_feature: MA Experiment ID: 20001911 Result: Down-regulated in Transcription
  misc_feature: MA Experiment 20001911 PARAMETER Experiment Name: At_Drought_Reproduction_P Parameter: Age (day) Value: 40
  misc_feature: MA Experiment 20001911 PARAMETER Experiment Name: At_Drought_Reproduction_P Parameter: Organism Value: A. thaliana
  misc_feature: MA Experiment 20001911 PARAMETER Experiment Name: At_Drought_Reproduction_P Parameter: Plant Line Value: WS
  misc_feature: MA Experiment 20001911 PARAMETER Experiment Name: At_Drought_Reproduction_P Parameter: Timepoint (day) Value: 10
  misc_feature: MA Experiment 20001911 PARAMETER Experiment Name: At_Drought_Reproduction_P Parameter: Tissue Value: Flowers
  misc_feature: MA Experiment 20001911 PARAMETER Experiment Name: At_Drought_Reproduction_P Parameter: Treatment Value: Drought vs. No Drought

SEQ ID NO: 31809 - protein, 326 aa, Arabidopsis thaliana; identical to SEQ ID NO: 28219
  peptide (1)..(326): Ceres Seq. ID no. 12333808
  misc_feature (269)..(292): Pfam Name: Leucine Rich Repeat Pfam Description: Leucine Rich Repeat
  misc_feature (70)..(308): Homolog of NCBI NO: 7488988 NR Description: disease resistance protein Hcr2-5D - tomato
  misc_feature (70)..(308): Homolog of NCBI NO: 7488988 NR Description: disease resistance protein Hcr2-5D - tomato
  misc_feature (70)..(308): Homolog of NCBI NO: 3894383 NR Description: disease resistance protein [Lycopersicon
  misc_feature (70)..(302): Homolog of NCBI NO: 3894387 NR Description: Hcr2-0B [Lycopersicon esculentum]
  misc_feature (1)..(304): Homolog of NCBI NO: 15240186 NR Description: Cf-5 disease resistance protein - like; protein
  misc_feature (127)..(326): Homolog of NCBI NO: 15240186 NR Description: Cf-5 disease resistance protein - like; protein
  misc_feature (8)..(326): Homolog of NCBI NO: 15222979 NR Description: disease resistance protein, putative; protein id:
  misc_feature (1)..(326): Homolog of NCBI NO: 25402771 NR Description: protein F16A14.12 [imported] - Arabidopsis
  misc_feature (7)..(326): Homolog of NCBI NO: 14626935 NR Description: leucine-rich repeat resistance protein-like
  misc_feature (1)..(326): Homolog of NCBI NO: 9757845 NR Description: leucine-rich repeat disease resistance

SEQ ID NO: 31810 - DNA, 498 bp, Arabidopsis thaliana; identical to SEQ ID NO: 28220
  misc_feature (1)..(498): Ceres Seq. ID no. 12333353
  misc_feature: MA Experiment ID: 108434 Result: Up-regulated in Transcription
  misc_feature: MA Experiment 108434 PARAMETER Experiment Name: At_Root_Tips_cDNA_P Parameter: Tissue Value: Root Tips
  misc_feature: MA Experiment ID: 108462 Result: Down-regulated in Transcription
  misc_feature: MA Experiment 108462 PARAMETER Experiment Name: At_Germinating_Seeds_cDNA_P Parameter: Age (day) Value: 2 vs. 0
  misc_feature: MA Experiment 108462 PARAMETER Experiment Name: At_Germinating_Seeds_cDNA_P Parameter: Tissue Value: Germinating Seeds
  misc_feature: MA Experiment ID: 108463 Result: Down-regulated in Transcription
  misc_feature: MA Experiment 108463 PARAMETER Experiment Name: At_Germinating_Seeds_cDNA_P Parameter: Age (day) Value: 3 vs. 0
  misc_feature: MA Experiment 108463 PARAMETER Experiment Name: At_Germinating_Seeds_cDNA_P Parameter: Tissue Value: Germinating Seeds
  misc_feature: MA Experiment ID: 108464 Result: Down-regulated in Transcription
  misc_feature: MA Experiment 108464 PARAMETER Experiment Name: At_Germinating_Seeds_cDNA_P Parameter: Age (day) Value: 4 vs. 0
  misc_feature: MA Experiment 108464 PARAMETER Experiment Name: At_Germinating_Seeds_cDNA_P Parameter: Tissue Value: Germinating Seeds
  misc_feature: MA Experiment ID: 108573 Result: Down-regulated in Transcription
  misc_feature: MA Experiment 108573 PARAMETER Experiment Name: At_Drought_cDNA_P Parameter: Timepoint (hr) Value: 6
  misc_feature: MA Experiment 108573 PARAMETER Experiment Name: At_Drought_cDNA_P Parameter: Tissue Value: Aerial
  misc_feature: MA Experiment 108573 PARAMETER Experiment Name: At_Drought_cDNA_P Parameter: Treatment Value: Drought vs. No Drought
  misc_feature: MA Experiment ID: 20000111 Result: Down-regulated in Transcription
  misc_feature: MA Experiment 20000111 PARAMETER Experiment Name: At_42deg_Heat_cDNA_P Parameter: Temperature (deg C) Value: 42 vs. 22
  misc_feature: MA Experiment 20000111 PARAMETER Experiment Name: At_42deg_Heat_cDNA_P Parameter: Timepoint (hr) Value: 6
  misc_feature: MA Experiment 20000111 PARAMETER Experiment Name: At_42deg_Heat_cDNA_P Parameter: Tissue Value: Aerial
  misc_feature: MA Experiment ID: 20000224 Result: Down-regulated in Transcription
  misc_feature: MA Experiment ID: 20000234 Result: Up-regulated in Transcription
  misc_feature: MA Experiment 20000234 PARAMETER Experiment Name: At_Siliques_P Parameter: Age (day) Value: 21
  misc_feature: MA Experiment 20000234 PARAMETER Experiment Name: At_Siliques_P Parameter: Organism Value: A. thaliana
  misc_feature: MA Experiment 20000234 PARAMETER Experiment Name: At_Siliques_P Parameter: Plant Line Value: WS
  misc_feature: MA Experiment 20000234 PARAMETER Experiment Name: At_Siliques_P Parameter: Tissue Value: Less Than 5mm Siliques vs. Whole Plant
  misc_feature: MA Experiment ID: 20000264 Result: Up-regulated in Transcription
  misc_feature: MA Experiment 20000264 PARAMETER Experiment Name: At_Open_Flower_P Parameter: Age (day) Value: 21
  misc_feature: MA Experiment 20000264 PARAMETER Experiment Name: At_Open_Flower_P Parameter: Plant Line Value: WS
  misc_feature: MA Experiment 20000264 PARAMETER Experiment Name: At_Open_Flower_P Parameter: Tissue Value: Open Flower vs. Whole Plant
  misc_feature: MA Experiment ID: 20000265 Result: Up-regulated in Transcription
  misc_feature: MA Experiment 20000265 PARAMETER Experiment Name: At_Open_Flower_P Parameter: Age (day) Value: 21
  misc_feature: MA Experiment 20000265 PARAMETER Experiment Name: At_Open_Flower_P Parameter: Plant Line Value: WS
  misc_feature: MA Experiment 20000265 PARAMETER Experiment Name: At_Open_Flower_P Parameter: Tissue Value: Closed Flower vs. Whole Plant
  misc_feature: MA Experiment ID: 20001247 Result: Down-regulated in Transcription
  misc_feature: MA Experiment 20001247 PARAMETER Experiment Name: At_Far-red-induction_P Parameter: Age (day) Value: 7
  misc_feature: MA Experiment 20001247 PARAMETER Experiment Name: At_Far-red-induction_P Parameter: Light Value: Far-red vs. White
  misc_feature: MA Experiment 20001247 PARAMETER Experiment Name: At_Far-red-induction_P Parameter: Organism Value: A. thaliana
  misc_feature: MA Experiment 20001247 PARAMETER Experiment Name: At_Far-red-induction_P Parameter: Plant Line Value: Columbia
  misc_feature: MA Experiment 20001247 PARAMETER Experiment Name: At_Far-red-induction_P Parameter: Timepoint (hr) Value: 1
  misc_feature: MA Experiment 20001247 PARAMETER Experiment Name: At_Far-red-induction_P Parameter: Tissue Value: Whole Plant
  misc_feature: MA Experiment ID: 20001560 Result: Up-regulated in Transcription
  misc_feature: MA Experiment 20001560 PARAMETER Experiment Name: At_Drought_Soil_Dry_P Parameter: Age (day) Value: 28
  misc_feature: MA Experiment 20001560 PARAMETER Experiment Name: At_Drought_Soil_Dry_P Parameter: Organism Value: A. thaliana
  misc_feature: MA Experiment 20001560 PARAMETER Experiment Name: At_Drought_Soil_Dry_P Parameter: Plant Line Value: WS
  misc_feature: MA Experiment 20001560 PARAMETER Experiment Name: At_Drought_Soil_Dry_P Parameter: Post Timepoint (hr) Value: None
  misc_feature: MA Experiment 20001560 PARAMETER Experiment Name: At_Drought_Soil_Dry_P Parameter: Post-Treatment Value: None
  misc_feature: MA Experiment 20001560 PARAMETER Experiment Name: At_Drought_Soil_Dry_P Parameter: Timepoint (day) Value: 14
  misc_feature: MA Experiment 20001560 PARAMETER Experiment Name: At_Drought_Soil_Dry_P Parameter: Treatment Value: Drought vs. No Drought
  misc_feature: MA Experiment ID: 20001911 Result: Down-regulated in Transcription
  misc_feature: MA Experiment 20001911 PARAMETER Experiment Name: At_Drought_Reproduction_P Parameter: Age (day) Value: 40
  misc_feature: MA Experiment 20001911 PARAMETER Experiment Name: At_Drought_Reproduction_P Parameter: Organism Value: A. thaliana
  misc_feature: MA Experiment 20001911 PARAMETER Experiment Name: At_Drought_Reproduction_P Parameter: Plant Line Value: WS
  misc_feature: MA Experiment 20001911 PARAMETER Experiment Name: At_Drought_Reproduction_P Parameter: Timepoint (day) Value: 10
  misc_feature: MA Experiment 20001911 PARAMETER Experiment Name: At_Drought_Reproduction_P Parameter: Tissue Value: Flowers
  misc_feature: MA Experiment 20001911 PARAMETER Experiment Name: At_Drought_Reproduction_P Parameter: Treatment Value: Drought vs. No Drought

SEQ ID NO: 31811 - protein, 93 aa, Arabidopsis thaliana; identical to SEQ ID NO: 28221
  peptide (1)..(93): Ceres Seq. ID no. 12333354
  misc_feature (20)..(85): Pfam Name: Tim10/DDP family zinc finger Pfam Description: Tim10/DDP family zinc finger
  misc_feature (9)..(86): Homolog of NCBI NO: 19075508 NR Description: similar to yeast Tim9p essential component of the
  misc_feature (9)..(86): Homolog of NCBI NO: 12230194 NR Description: Mitochondrial import inner membrane translocase
  misc_feature (9)..(86): Homolog of NCBI NO: 12230144 NR Description: Mitochondrial import inner membrane translocase
  misc_feature (9)..(86): Homolog of NCBI NO: 6320815 NR Description: Translocase in inner membrane of mitochondria
  misc_feature (1)..(93): Homolog of NCBI NO: 12230182 NR Description: Mitochondrial import inner membrane translocase
  misc_feature (1)..(93): Homolog of NCBI NO: 12230181 NR Description: Mitochondrial import inner membrane translocase
  misc_feature (1)..(92): Homolog of NCBI NO: 11358850 NR Description: small zinc finger-like protein [imported] -
  misc_feature (1)..(92): Homolog of NCBI NO: 5107210 NR Description: small zinc finger-like protein [Arabidopsis
  misc_feature (1)..(93): Homolog of NCBI NO: 21617942 NR Description: mitochondrial import inner membrane translocase
  misc_feature (1)..(93): Homolog of NCBI NO: 15231455 NR Description: small zinc finger-like protein TIM9

SEQ ID NO: 31812 - protein, 89 aa, Arabidopsis thaliana; identical to SEQ ID NO: 28222
  peptide (1)..(89): Ceres Seq. ID no. 12333355
  misc_feature (16)..(81): Pfam Name: Tim10/DDP family zinc finger Pfam Description: Tim10/DDP family zinc finger
  misc_feature (5)..(82): Homolog of NCBI NO: 19075508 NR Description: similar to yeast Tim9p essential component of the
  misc_feature (5)..(82): Homolog of NCBI NO: 12230194 NR Description: Mitochondrial import inner membrane translocase
  misc_feature (5)..(82): Homolog of NCBI NO: 12230144 NR Description: Mitochondrial import inner membrane translocase
  misc_feature (5)..(82): Homolog of NCBI NO: 6320815 NR Description: Translocase in inner membrane of mitochondria
  misc_feature (1)..(89): Homolog of NCBI NO: 12230182 NR Description: Mitochondrial import inner membrane translocase
  misc_feature (1)..(89): Homolog of NCBI NO: 12230181 NR Description: Mitochondrial import inner membrane translocase
  misc_feature (1)..(88): Homolog of NCBI NO: 11358850 NR Description: small zinc finger-like protein [imported] -
  misc_feature (1)..(88): Homolog of NCBI NO: 5107210 NR Description: small zinc finger-like protein [Arabidopsis
  misc_feature (1)..(89): Homolog of NCBI NO: 21617942 NR Description: mitochondrial import inner membrane translocase
  misc_feature (1)..(89): Homolog of NCBI NO: 15231455 NR Description: small zinc finger-like protein TIM9

SEQ ID NO: 31813 - protein, 88 aa, Arabidopsis thaliana; identical to SEQ ID NO: 28223
  peptide (1)..(88): Ceres Seq. ID no. 12333356
  misc_feature (15)..(80): Pfam Name: Tim10/DDP family zinc finger Pfam Description: Tim10/DDP family zinc finger
  misc_feature (4)..(81): Homolog of NCBI NO: 19075508 NR Description: similar to yeast Tim9p essential component of the
  misc_feature (4)..(81): Homolog of NCBI NO: 12230194 NR Description: Mitochondrial import inner membrane translocase
  misc_feature (4)..(81): Homolog of NCBI NO: 12230144 NR Description: Mitochondrial import inner membrane translocase
  misc_feature (4)..(81): Homolog of NCBI NO: 6320815 NR Description: Translocase in inner membrane of mitochondria
  misc_feature (1)..(88): Homolog of NCBI NO: 12230182 NR Description: Mitochondrial import inner membrane translocase
  misc_feature (1)..(88): Homolog of NCBI NO: 12230181 NR Description: Mitochondrial import inner membrane translocase
  misc_feature (1)..(87): Homolog of NCBI NO: 11358850 NR Description: small zinc finger-like protein [imported] -
  misc_feature (1)..(87): Homolog of NCBI NO: 5107210 NR Description: small zinc finger-like protein [Arabidopsis
  misc_feature (1)..(88): Homolog of NCBI NO: 21617942 NR Description: mitochondrial import inner membrane translocase
  misc_feature (1)..(88): Homolog of NCBI NO: 15231455 NR Description: small zinc finger-like protein TIM9

SEQ ID NO: 31814 - DNA, 636 bp, Arabidopsis thaliana; identical to SEQ ID NO: 28224
  misc_feature (1)..(636): Ceres Seq. ID no. 12560114
  misc_feature: MA Experiment ID: 20000355 Result: Up-regulated in Transcription
  misc_feature: MA Experiment 20000355 PARAMETER Experiment Name: At_Siliques_Sub_P Parameter: Age (day) Value: 21
  misc_feature: MA Experiment 20000355 PARAMETER Experiment Name: At_Siliques_Sub_P Parameter: Organism Value: A. thaliana
  misc_feature: MA Experiment 20000355 PARAMETER Experiment Name: At_Siliques_Sub_P Parameter: Plant Line Value: WS
  misc_feature: MA Experiment 20000355 PARAMETER Experiment Name: At_Siliques_Sub_P Parameter: Tissue Value: Less Than 5mm Siliques vs. Whole Plant

SEQ ID NO: 31815 - protein, 163 aa, Arabidopsis thaliana; identical to SEQ ID NO: 28225
  peptide (1)..(163): Ceres Seq. ID no. 12560115
  misc_feature (25)..(156): Pfam Name: Ribosomal L28e protein family Pfam Description: Ribosomal L28e protein family
  misc_feature (28)..(161): Homolog of NCBI NO: 1362931 NR Description: ribosomal protein L28 - human
  misc_feature (28)..(161): Homolog of NCBI NO: 38112699 NR Description: 60S ribosomal protein L28 [Hippocampus comes]
  misc_feature (21)..(158): Homolog of NCBI NO: 38047791 NR Description: similar to Drosophila melanogaster CG12740
  misc_feature (23)..(156): Homolog of NCBI NO: 19114036 NR Description: 60s ribosomal protein L28/L44
  misc_feature (21)..(158): Homolog of NCBI NO: 24656625 NR Description: CG12740-PA [Drosophila melanogaster]
  misc_feature (13)..(158): Homolog of NCBI NO: 20976820 NR Description: GH04183p [Drosophila melanogaster]
  misc_feature (28)..(154): Homolog of NCBI NO: 24418650 NR Description: 60S ribosomal protein L28
  misc_feature (21)..(163): Homolog of NCBI NO: 34910390 NR Description: ribosomal protein L28-like
  misc_feature (21)..(163): Homolog of NCBI NO: 15233567 NR Description: putative protein
  misc_feature (21)..(163): Homolog of NCBI NO: 15224835 NR Description: putative ribosomal protein L28

SEQ ID NO: 31816 - protein, 143 aa, Arabidopsis thaliana [sequence omitted]

SEQ ID NO: 31817 - DNA, 874 bp, Arabidopsis thaliana; identical to SEQ ID NO: 28227
  misc_feature (1)..(874): Ceres Seq. ID no. 12329801
  misc_feature: MA Experiment ID: 108577 Result: Up-regulated in Transcription
  misc_feature: MA Experiment 108577 PARAMETER Experiment Name: At_42deg_Heat_cDNA_P Parameter: Temperature (deg C) Value: 42 vs. 22
  misc_feature: MA Experiment 108577 PARAMETER Experiment Name: At_42deg_Heat_cDNA_P Parameter: Timepoint (hr) Value: 6
  misc_feature: MA Experiment 108577 PARAMETER Experiment Name: At_42deg_Heat_cDNA_P Parameter: Tissue Value: Aerial
  misc_feature: MA Experiment ID: 108585 Result: Up-regulated in Transcription
  misc_feature: MA Experiment 108585 PARAMETER Experiment Name: At_5mM_NaNP_cDNA_P Parameter: Timepoint (hr) Value: 6
  misc_feature: MA Experiment 108585 PARAMETER Experiment Name: At_5mM_NaNP_cDNA_P Parameter: Tissue Value: Aerial
  misc_feature: MA Experiment 108585 PARAMETER Experiment Name: At_5mM_NaNP_cDNA_P Parameter: Treatment Value: null
  misc_feature: MA Experiment ID: 20000111 Result: Up-regulated in Transcription
  misc_feature: MA Experiment 20000111 PARAMETER Experiment Name: At_42deg_Heat_cDNA_P Parameter: Temperature (deg C) Value: 42 vs. 22
  misc_feature: MA Experiment 20000111 PARAMETER Experiment Name: At_42deg_Heat_cDNA_P Parameter: Timepoint (hr) Value: 6
  misc_feature: MA Experiment 20000111 PARAMETER Experiment Name: At_42deg_Heat_cDNA_P Parameter: Tissue Value: Aerial
  misc_feature: MA Experiment ID: 20000112 Result: Up-regulated in Transcription
  misc_feature: MA Experiment 20000112 PARAMETER Experiment Name: At_42deg_Heat_cDNA_P Parameter: Temperature (deg C) Value: 42 vs. 22
  misc_feature: MA Experiment 20000112 PARAMETER Experiment Name: At_42deg_Heat_cDNA_P Parameter: Timepoint (hr) Value: 2
  misc_feature: MA Experiment 20000112 PARAMETER Experiment Name: At_42deg_Heat_cDNA_P Parameter: Tissue Value: Aerial
  misc_feature: MA Experiment ID: 20000113 Result: Up-regulated in Transcription
  misc_feature: MA Experiment 20000113 PARAMETER Experiment Name: At_42deg_Heat_cDNA_P Parameter: Temperature (deg C) Value: 42 vs. 22
  misc_feature: MA Experiment 20000113 PARAMETER Experiment Name: At_42deg_Heat_cDNA_P Parameter: Timepoint (hr) Value: 8
  misc_feature: MA Experiment 20000113 PARAMETER Experiment Name: At_42deg_Heat_cDNA_P Parameter: Tissue Value: Aerial
  misc_feature: MA Experiment ID: 20000144 Result: Up-regulated in Transcription
  misc_feature: MA Experiment 20000144 PARAMETER Experiment Name: At_42deg_Heat_cDNA_P Parameter: Temperature (deg C) Value: 42 vs. 22
  misc_feature: MA Experiment 20000144 PARAMETER Experiment Name: At_42deg_Heat_cDNA_P Parameter: Timepoint (hr) Value: 1
  misc_feature: MA Experiment 20000144 PARAMETER Experiment Name: At_42deg_Heat_cDNA_P Parameter: Tissue Value: Aerial
  misc_feature: MA Experiment ID: 20000171 Result: Up-regulated in Transcription
  misc_feature: MA Experiment 20000171 PARAMETER Experiment Name: At_42deg_Heat_P Parameter: Age (day) Value: 14
  misc_feature: MA Experiment 20000171 PARAMETER Experiment Name: At_42deg_Heat_P Parameter: Organism Value: A. thaliana
  misc_feature: MA Experiment 20000171 PARAMETER Experiment Name: At_42deg_Heat_P Parameter: Plant Line Value: WS
  misc_feature: MA Experiment 20000171 PARAMETER Experiment Name: At_42deg_Heat_P Parameter: Temperature (deg C) Value: 42 vs. 22
  misc_feature: MA Experiment 20000171 PARAMETER Experiment Name: At_42deg_Heat_P Parameter: Timepoint (hr) Value: 1
  misc_feature: MA Experiment 20000171 PARAMETER Experiment Name: At_42deg_Heat_P Parameter: Tissue Value: Aerial
  misc_feature: MA Experiment ID: 20000173 Result: Up-regulated in Transcription
  misc_feature: MA Experiment 20000173 PARAMETER Experiment Name: At_42deg_Heat_P Parameter: Age (day) Value: 14
  misc_feature: MA Experiment 20000173 PARAMETER Experiment Name: At_42deg_Heat_P Parameter: Organism Value: A. thaliana
  misc_feature: MA Experiment 20000173 PARAMETER Experiment Name: At_42deg_Heat_P Parameter: Plant Line Value: WS
  misc_feature: MA Experiment 20000173 PARAMETER Experiment Name: At_42deg_Heat_P Parameter: Temperature (deg C) Value: 42 vs. 22
  misc_feature: MA Experiment 20000173 PARAMETER Experiment Name: At_42deg_Heat_P Parameter: Timepoint (hr) Value: 6
  misc_feature: MA Experiment 20000173 PARAMETER Experiment Name: At_42deg_Heat_P Parameter: Tissue Value: Aerial

SEQ ID NO: 31818 - protein, 222 aa, Arabidopsis thaliana; identical to SEQ ID NO: 28228
  peptide (1)..(222): Ceres Seq. ID no. 12329802
  misc_feature (59)..(219): Pfam Name: MSF1-like conserved region Pfam Description: MSF1-like conserved region
  misc_feature (41)..(217): Homolog of NCBI NO: 38678528 NR Description: erythroid differentiation and denucleation factor
  misc_feature (41)..(218): Homolog of NCBI NO: 12850407 NR Description: unnamed protein product [Mus musculus]
  misc_feature (41)..(218): Homolog of NCBI NO: 13384954 NR Description: RIKEN cDNA 2310042G06 [Mus musculus]
  misc_feature (41)..(211): Homolog of NCBI NO: 19112130 NR Description: conserved hypothetical protein
  misc_feature (41)..(218): Homolog of NCBI NO: 28279126 NR Description: Similar to chromosome 20 open reading frame 45
  misc_feature (41)..(218): Homolog of NCBI NO: 37577049 NR Description: BCR/ABL-regulated protein [Cricetulus griseus]
  misc_feature (41)..(218): Homolog of NCBI NO: 28422177 NR Description: Similar to chromosome 20 open reading frame 45
  misc_feature (41)..(218): Homolog of NCBI NO: 26392626 NR Description: Protein C20orf45 (CGI-107)
  misc_feature (41)..(218): Homolog of NCBI NO: 7705610 NR Description: CGI-107 protein [Homo sapiens]
  misc_feature (40)..(222): Homolog of NCBI NO: 15240002 NR Description: putative protein; protein id: At5g13070.1

SEQ ID NO: 31819 - protein, 183 aa, Arabidopsis thaliana; identical to SEQ ID NO: 28229
  peptide (1)..(183): Ceres Seq. ID no. 12329803
  misc_feature (20)..(180): Pfam Name: MSF1-like conserved region Pfam Description: MSF1-like conserved region
  misc_feature (2)..(178): Homolog of NCBI NO: 38678528 NR Description: erythroid differentiation and denucleation factor
  misc_feature (2)..(179): Homolog of NCBI NO: 12850407 NR Description: unnamed protein product [Mus musculus]
  misc_feature (2)..(179): Homolog of NCBI NO: 13384954 NR Description: RIKEN cDNA 2310042G06 [Mus musculus]
  misc_feature (2)..(172): Homolog of NCBI NO: 19112130 NR Description: conserved hypothetical protein
  misc_feature (2)..(179): Homolog of NCBI NO: 28279126 NR Description: Similar to chromosome 20 open reading frame 45
  misc_feature (2)..(179): Homolog of NCBI NO: 37577049 NR Description: BCR/ABL-regulated protein [Cricetulus griseus]
  misc_feature (2)..(179): Homolog of NCBI NO: 28422177 NR Description: Similar to chromosome 20 open reading frame 45
  misc_feature (2)..(179): Homolog of NCBI NO: 26392626 NR Description: Protein C20orf45 (CGI-107)
  misc_feature (2)..(179): Homolog of NCBI NO: 7705610 NR Description: CGI-107 protein [Homo sapiens]
  misc_feature (1)..(183): Homolog of NCBI NO: 15240002 NR Description: putative protein; protein id: At5g13070.1

SEQ ID NO: 31820 - DNA, 935 bp, Arabidopsis thaliana; identical to SEQ ID NO: 28230
  misc_feature (1)..(935): Ceres Seq. ID no. 13489309
  misc_feature: MA Experiment ID: 20000235 Result: Down-regulated in Transcription
  misc_feature: MA Experiment 20000235 PARAMETER Experiment Name: At_Siliques_P Parameter: Age (day) Value: 21
  misc_feature: MA Experiment 20000235 PARAMETER Experiment Name: At_Siliques_P Parameter: Organism Value: A. thaliana
  misc_feature: MA Experiment 20000235 PARAMETER Experiment Name: At_Siliques_P Parameter: Plant Line Value: WS
  misc_feature: MA Experiment 20000235 PARAMETER Experiment Name: At_Siliques_P Parameter: Tissue Value: 5-10mm Siliques vs. Whole Plant
  misc_feature: MA Experiment ID: 20000264 Result: Up-regulated in Transcription
  misc_feature: MA Experiment 20000264 PARAMETER Experiment Name: At_Open_Flower_P Parameter: Age (day) Value: 21
  misc_feature: MA Experiment 20000264 PARAMETER Experiment Name: At_Open_Flower_P Parameter: Plant Line Value: WS
  misc_feature: MA Experiment 20000264 PARAMETER Experiment Name: At_Open_Flower_P Parameter: Tissue Value: Open Flower vs. Whole Plant
  misc_feature: MA Experiment ID: 20000265 Result: Up-regulated in Transcription
  misc_feature: MA Experiment 20000265 PARAMETER Experiment Name: At_Open_Flower_P Parameter: Age (day) Value: 21
  misc_feature: MA Experiment 20000265 PARAMETER Experiment Name: At_Open_Flower_P Parameter: Plant Line Value: WS
  misc_feature: MA Experiment 20000265 PARAMETER Experiment Name: At_Open_Flower_P Parameter: Tissue Value: Closed Flower vs. Whole Plant
  misc_feature: MA Experiment ID: 20000286 Result: Up-regulated in Transcription
  misc_feature: MA Experiment 20000286 PARAMETER Experiment Name: At_Open_Flower_P Parameter: Age (day) Value: 21
  misc_feature: MA Experiment 20000286 PARAMETER Experiment Name: At_Open_Flower_P Parameter: Plant Line Value: WS
  misc_feature: MA Experiment 20000286 PARAMETER Experiment Name: At_Open_Flower_P Parameter: Tissue Value: Half Open vs. Whole Plant
  misc_feature: MA Experiment ID: 20000438 Result: Down-regulated in Transcription
  misc_feature: MA Experiment 20000438 PARAMETER Experiment Name: At_Shoots__P Parameter: Age (day) Value: 14
  misc_feature: MA Experiment 20000438 PARAMETER Experiment Name: At_Shoots__P Parameter: Tissue Value: Shoots vs. Whole Plant
  misc_feature: MA Experiment ID: 20000794 Result: Up-regulated in Transcription
  misc_feature: MA Experiment 20000794 PARAMETER Experiment Name: At_Petals_P Parameter: Age (day) Value: 23-25 days
  misc_feature: MA Experiment 20000794 PARAMETER Experiment Name: At_Petals_P Parameter: Plant Line Value: WS
  misc_feature: MA Experiment 20000794 PARAMETER Experiment Name: At_Petals_P Parameter: Tissue Value: Petals vs. Whole plant
  misc_feature: MA Experiment ID: 20001911 Result: Down-regulated in Transcription
  misc_feature: MA Experiment 20001911 PARAMETER Experiment Name: At_Drought_Reproduction_P Parameter: Age (day) Value: 40
  misc_feature: MA Experiment 20001911 PARAMETER Experiment Name: At_Drought_Reproduction_P Parameter: Organism Value: A. thaliana
  misc_feature: MA Experiment 20001911 PARAMETER Experiment Name: At_Drought_Reproduction_P Parameter: Plant Line Value: WS
  misc_feature: MA Experiment 20001911 PARAMETER Experiment Name: At_Drought_Reproduction_P Parameter: Timepoint (day) Value: 10
  misc_feature: MA Experiment 20001911 PARAMETER Experiment Name: At_Drought_Reproduction_P Parameter: Tissue Value: Flowers
  misc_feature: MA Experiment 20001911 PARAMETER Experiment Name: At_Drought_Reproduction_P Parameter: Treatment Value: Drought vs. No Drought
  misc_feature: Phenotype: WHOLE PLANT Other
  misc_feature: Phenotype: CAULINE LEAVES Curled-Corkscrew
  misc_feature: Phenotype: FLOWERS Other
  misc_feature: Phenotype: INFLORESCENCE Branching-Reduced Apical Dominance
  misc_feature: Phenotype: INFLORESCENCE Flowering Time-Late Flowering
  misc_feature: Phenotype: INFLORESCENCE Height-Short
  misc_feature: Phenotype: INFLORESCENCE Height-Short
  misc_feature: Phenotype: INFLORESCENCE Internode Length-Short Internode
  misc_feature: Phenotype: INFLORESCENCE Other
  misc_feature: Phenotype: INFLORESCENCE Other
  misc_feature: Phenotype: FERTILITY Fertility-Reduced
  misc_feature: Phenotype: FERTILITY Fertility-Sterile
  misc_feature: Phenotype: WHOLE PLANT Other
  misc_feature: Phenotype: CAULINE LEAVES Curled-Corkscrew
  misc_feature: Phenotype: FLOWERS Other
  misc_feature: Phenotype: INFLORESCENCE Branching-Reduced Apical Dominance
  misc_feature: Phenotype: INFLORESCENCE Flowering Time-Late Flowering
  misc_feature: Phenotype: INFLORESCENCE Height-Short
  misc_feature: Phenotype: INFLORESCENCE Height-Short
  misc_feature: Phenotype: INFLORESCENCE Internode Length-Short Internode
  misc_feature: Phenotype: INFLORESCENCE Other
  misc_feature: Phenotype: INFLORESCENCE Other
  misc_feature: Phenotype: FERTILITY Fertility-Reduced
  misc_feature: Phenotype: FERTILITY Fertility-Sterile
  misc_feature: Phenotype: WHOLE PLANT Other
  misc_feature: Phenotype: CAULINE LEAVES Curled-Corkscrew
  misc_feature: Phenotype: FLOWERS Other
  misc_feature: Phenotype: INFLORESCENCE Branching-Reduced Apical Dominance
  misc_feature: Phenotype: INFLORESCENCE Flowering Time-Late Flowering
  misc_feature: Phenotype: INFLORESCENCE Height-Short
  misc_feature: Phenotype: INFLORESCENCE Height-Short
  misc_feature: Phenotype: INFLORESCENCE Internode Length-Short Internode
  misc_feature: Phenotype: INFLORESCENCE Other
  misc_feature: Phenotype: INFLORESCENCE Other
  misc_feature: Phenotype: FERTILITY Fertility-Reduced
  misc_feature: Phenotype: FERTILITY Fertility-Sterile

SEQ ID NO: 31821 - protein, 181 aa, Arabidopsis thaliana; identical to SEQ ID NO: 28231
  peptide (1)..(181): Ceres Seq. ID no. 13489310
  misc_feature (12)..(164): Pfam Name: YABBY protein Pfam Description: YABBY protein
  misc_feature (87)..(156): Homolog of NCBI NO: 38605890 NR Description: OSJNBb0020O11.2 [Oryza sativa (japonica
  misc_feature (1)..(102): Homolog of NCBI NO: 38605890 NR Description: OSJNBb0020O11.2 [Oryza sativa (japonica
  misc_feature (1)..(75): Homolog of NCBI NO: 6730647 NR Description: F4N2.14 [Arabidopsis thaliana]
  misc_feature (15)..(56): Homolog of NCBI NO: 32330677 NR Description: yabby15 protein [Zea mays]
  misc_feature (65)..(156): Homolog of NCBI NO: 32330677 NR Description: yabby15 protein [Zea mays]
  misc_feature (15)..(166): Homolog of NCBI NO: 33333529 NR Description: CRC-related protein [Triticum aestivum]
  misc_feature (15)..(170): Homolog of NCBI NO: 40362873 NR Description: drooping leaf [Oryza sativa (japonica
  misc_feature (1)..(170): Homolog of NCBI NO: 37542843 NR Description: crabs claw [Nicotiana langsdorffii x Nicotiana
  misc_feature (9)..(181): Homolog of NCBI NO: 21617944 NR Description: transcription factor CRC [Arabidopsis thaliana]
  misc_feature (1)..(181): Homolog of NCBI NO: 15222228 NR Description: transcription factor CRC [Arabidopsis thaliana]

SEQ ID NO: 31822 - protein, 173 aa, Arabidopsis thaliana; identical to SEQ ID NO: 28232
  peptide (1)..(173): Ceres Seq. ID no. 13489311
  misc_feature (4)..(156): Pfam Name: YABBY protein Pfam Description: YABBY protein
  misc_feature (79)..(148): Homolog of NCBI NO: 38605890 NR Description: OSJNBb0020O11.2 [Oryza sativa (japonica
  misc_feature (1)..(94): Homolog of NCBI NO: 38605890 NR Description: OSJNBb0020O11.2 [Oryza sativa (japonica
  misc_feature (1)..(67): Homolog of NCBI NO: 6730647 NR Description: F4N2.14 [Arabidopsis thaliana]
  misc_feature (7)..(48): Homolog of NCBI NO: 32330677 NR Description: yabby15 protein [Zea mays]
  misc_feature (57)..(148): Homolog of NCBI NO: 32330677 NR Description: yabby15 protein [Zea mays]
  misc_feature (7)..(158): Homolog of NCBI NO: 33333529 NR Description: CRC-related protein [Triticum aestivum]
  misc_feature (7)..(162): Homolog of NCBI NO: 40362873 NR Description: drooping leaf [Oryza sativa (japonica
  misc_feature (1)..(162): Homolog of NCBI NO: 37542843 NR Description: crabs claw [Nicotiana langsdorffii x Nicotiana
  misc_feature (1)..(173): Homolog of NCBI NO: 21617944 NR Description: transcription factor CRC [Arabidopsis thaliana]
  misc_feature (1)..(173): Homolog of NCBI NO: 15222228 NR Description: transcription factor CRC [Arabidopsis thaliana]

SEQ ID NO: 31823 - protein, 140 aa, Arabidopsis thaliana; identical to SEQ ID NO: 28233
  peptide (1)..(140): Ceres Seq. ID no. 13489312
  misc_feature (1)..(123): Pfam Name: YABBY protein Pfam Description: YABBY protein
  misc_feature (46)..(115): Homolog of NCBI NO: 38605890 NR Description: OSJNBb0020O11.2 [Oryza sativa (japonica
  misc_feature (1)..(61): Homolog of NCBI NO: 38605890 NR Description: OSJNBb0020O11.2 [Oryza sativa (japonica
  misc_feature (1)..(34): Homolog of NCBI NO: 6730647 NR Description: F4N2.14 [Arabidopsis thaliana]
  misc_feature (1)..(15): Homolog of NCBI NO: 32330677 NR Description: yabby15 protein [Zea mays]
  misc_feature (24)..(115): Homolog of NCBI NO: 32330677 NR Description: yabby15 protein [Zea mays]
  misc_feature (1)..(125): Homolog of NCBI NO: 33333529 NR Description: CRC-related protein [Triticum aestivum]
  misc_feature (1)..(129): Homolog of NCBI NO: 40362873 NR Description: drooping leaf [Oryza sativa (japonica
  misc_feature (1)..(129): Homolog of NCBI NO: 37542843 NR Description: crabs claw [Nicotiana langsdorffii x Nicotiana
  misc_feature (1)..(140): Homolog of NCBI NO: 21617944 NR Description: transcription factor CRC [Arabidopsis thaliana]
  misc_feature (1)..(140): Homolog of NCBI NO: 15222228 NR Description: transcription factor CRC [Arabidopsis thaliana]

SEQ ID NO: 31824 - DNA, 593 bp, Arabidopsis thaliana; identical to SEQ ID NO: 28234
  misc_feature (1)..(593): Ceres Seq. ID no. 12337607
  misc_feature: MA Experiment ID: 20000173 Result: Down-regulated in Transcription
  misc_feature: MA Experiment 20000173 PARAMETER Experiment Name: At_42deg_Heat_P Parameter: Age (day) Value: 14
  misc_feature: MA Experiment 20000173 PARAMETER Experiment Name: At_42deg_Heat_P Parameter: Organism Value: A. thaliana
  misc_feature: MA Experiment 20000173 PARAMETER Experiment Name: At_42deg_Heat_P Parameter: Plant Line Value: WS
  misc_feature: MA Experiment 20000173 PARAMETER Experiment Name: At_42deg_Heat_P Parameter: Temperature (deg C) Value: 42 vs. 22
  misc_feature: MA Experiment 20000173 PARAMETER Experiment Name: At_42deg_Heat_P Parameter: Timepoint (hr) Value: 6
  misc_feature: MA Experiment 20000173 PARAMETER Experiment Name: At_42deg_Heat_P Parameter: Tissue Value: Aerial
  misc_feature: MA Experiment ID: 20000179 Result: Up-regulated in Transcription
  misc_feature: MA Experiment 20000179 PARAMETER Experiment Name: At_Germinating_Seeds_P Parameter: Age (hr) Value: 6 vs. 0
  misc_feature: MA Experiment 20000179 PARAMETER Experiment Name: At_Germinating_Seeds_P Parameter: Tissue Value: Germinating Seeds
  misc_feature: MA Experiment ID: 20000180 Result: Up-regulated in Transcription
  misc_feature: MA Experiment 20000180 PARAMETER Experiment Name: At_Germinating_Seeds_P Parameter: Age (hr) Value: 24 vs. 0
  misc_feature: MA Experiment 20000180 PARAMETER Experiment Name: At_Germinating_Seeds_P Parameter: Tissue Value: Germinating Seeds
  misc_feature: MA Experiment ID: 20000184 Result: Down-regulated in Transcription
  misc_feature: MA Experiment 20000184 PARAMETER Experiment Name: At_Shoots__P Parameter: Age (day) Value: 7
  misc_feature: MA Experiment 20000184 PARAMETER Experiment Name: At_Shoots__P Parameter: Tissue Value: Shoots vs. Whole Plant
  misc_feature: MA Experiment ID: 20000437 Result: Up-regulated in Transcription
  misc_feature: MA Experiment 20000437 PARAMETER Experiment Name: At_Drought_P Parameter: Age (day) Value: 8
  misc_feature: MA Experiment 20000437 PARAMETER Experiment Name: At_Drought_P Parameter: Organism Value: A. thaliana
  misc_feature: MA Experiment 20000437 PARAMETER Experiment Name: At_Drought_P Parameter: Plant Line Value: WS
  misc_feature: MA Experiment 20000437 PARAMETER Experiment Name: At_Drought_P Parameter: Timepoint (hr) Value: 24
  misc_feature: MA Experiment 20000437 PARAMETER Experiment Name: At_Drought_P Parameter: Tissue Value: Whole Plant
  misc_feature: MA Experiment 20000437 PARAMETER Experiment Name: At_Drought_P Parameter: Treatment Value: Drought vs. No Drought
  misc_feature: MA Experiment ID: 20000438 Result: Down-regulated in Transcription
  misc_feature: MA Experiment 20000438 PARAMETER Experiment Name: At_Shoots__P Parameter: Age (day) Value: 14
  misc_feature: MA Experiment 20000438 PARAMETER Experiment Name: At_Shoots__P Parameter: Tissue Value: Shoots vs. Whole Plant
  misc_feature: MA Experiment ID: 20001558 Result: Down-regulated in Transcription
  misc_feature: MA Experiment 20001558 PARAMETER Experiment Name: At_Drought_Soil_Dry_P Parameter: Age (day) Value: 27
  misc_feature: MA Experiment 20001558 PARAMETER Experiment Name: At_Drought_Soil_Dry_P Parameter: Organism Value: A. thaliana
  misc_feature: MA Experiment 20001558 PARAMETER Experiment Name: At_Drought_Soil_Dry_P Parameter: Plant Line Value: WS
  misc_feature: MA Experiment 20001558 PARAMETER Experiment Name: At_Drought_Soil_Dry_P Parameter: Post Timepoint (hr) Value: 6
  misc_feature: MA Experiment 20001558 PARAMETER Experiment Name: At_Drought_Soil_Dry_P Parameter: Post-Treatment Value: Re-Water vs. No Drought
  misc_feature: MA Experiment 20001558 PARAMETER Experiment Name: At_Drought_Soil_Dry_P Parameter: Timepoint (day) Value: 13
  misc_feature: MA Experiment 20001558 PARAMETER Experiment Name: At_Drought_Soil_Dry_P Parameter: Treatment Value: Drought vs. No Drought

SEQ ID NO: 31825 - protein, 129 aa, Arabidopsis thaliana; identical to SEQ ID NO: 28235
  peptide (1)..(129): Ceres Seq. ID no. 12337608
  misc_feature (11)..(118): Pfam Name: Yippee putative zinc-binding protein Pfam Description: Yippee putative zinc-binding protein
  misc_feature (22)..(111): Homolog of NCBI NO: 20840809 NR Description: similar to hypothetical protein FLJ30213
  misc_feature (11)..(113): Homolog of NCBI NO: 34393694 NR Description: Yippee-like protein [Oryza sativa (japonica
  misc_feature (11)..(115): Homolog of NCBI NO: 15238881 NR Description: zinc-binding protein-like
  misc_feature (11)..(113): Homolog of NCBI NO: 15232001 NR Description: Yippee-like protein; protein id: At3g08990.1
  misc_feature (11)..(122): Homolog of NCBI NO: 15228759 NR Description: Yippee-like protein
  misc_feature (11)..(129): Homolog of NCBI NO: 28273361 NR Description: putative zinc binding protein
  misc_feature (11)..(128): Homolog of NCBI NO: 27923880 NR Description: Yippee-like protein
  misc_feature (11)..(126): Homolog of NCBI NO: 15225631 NR Description: unknown protein
  misc_feature (11)..(128): Homolog of NCBI NO: 18399156 NR Description: expressed protein
  misc_feature (11)..(128): Homolog of NCBI NO: 21617953 NR Description: yippee-like protein [Arabidopsis thaliana]

SEQ ID NO: 31826 - protein, 119 aa, Arabidopsis thaliana; identical to SEQ ID NO: 28236
  peptide (1)..(119): Ceres Seq. ID no. 12337609
  misc_feature (1)..(108): Pfam Name: Yippee putative zinc-binding protein Pfam Description: Yippee putative zinc-binding protein
  misc_feature (12)..(101): Homolog of NCBI NO: 20840809 NR Description: similar to hypothetical protein FLJ30213
  misc_feature (1)..(103): Homolog of NCBI NO: 34393694 NR Description: Yippee-like protein [Oryza sativa (japonica
  misc_feature (1)..(105): Homolog of NCBI NO: 15238881 NR Description: zinc-binding protein-like
  misc_feature (1)..(103): Homolog of NCBI NO: 15232001 NR Description: Yippee-like protein; protein id: At3g08990.1
  misc_feature (1)..(112): Homolog of NCBI NO: 15228759 NR Description: Yippee-like protein
  misc_feature (1)..(119): Homolog of NCBI NO: 28273361 NR Description: putative zinc binding protein
  misc_feature (1)..(118): Homolog of NCBI NO: 27923880 NR Description: Yippee-like protein
  misc_feature (1)..(116): Homolog of NCBI NO: 15225631 NR Description: unknown protein
  misc_feature (1)..(118): Homolog of NCBI NO: 18399156 NR Description: expressed protein
  misc_feature (1)..(118): Homolog of NCBI NO: 21617953 NR Description: yippee-like protein [Arabidopsis thaliana]

SEQ ID NO: 31827 - DNA, 943 bp, Arabidopsis thaliana; identical to SEQ ID NO: 28237
  misc_feature (1)..(943): Ceres Seq. ID no. 13489778
  misc_feature: MA Experiment ID: 108434 Result: Up-regulated in Transcription
  misc_feature: MA Experiment 108434 PARAMETER Experiment Name: At_Root_Tips_cDNA_P Parameter: Tissue Value: Root Tips

SEQ ID NO: 31828 - protein, 230 aa, Arabidopsis thaliana; identical to SEQ ID NO: 28238
  peptide (1)..(230): Ceres Seq. ID no. 13489779
  misc_feature (42)..(230): Homolog of NCBI NO: 11280696 NR Description: hypothetical protein F26O13.250 - Arabidopsis
  misc_feature (4)..(230): Homolog of NCBI NO: 21617957 NR Description: unknown [Arabidopsis thaliana]
  misc_feature (1)..(230): Homolog of NCBI NO: 18409385 NR Description: expressed protein [Arabidopsis thaliana]

SEQ ID NO: 31829 - protein, 227 aa, Arabidopsis thaliana; identical to SEQ ID NO: 28239
  peptide (1)..(227): Ceres Seq. ID no. 13489780
  misc_feature (39)..(227): Homolog of NCBI NO: 11280696 NR Description: hypothetical protein F26O13.250 - Arabidopsis
  misc_feature (1)..(227): Homolog of NCBI NO: 21617957 NR Description: unknown [Arabidopsis thaliana]
  misc_feature (1)..(227): Homolog of NCBI NO: 18409385 NR Description: expressed protein [Arabidopsis thaliana]

SEQ ID NO: 31830 - protein, 189 aa, Arabidopsis thaliana; identical to SEQ ID NO: 28240
  peptide (1)..(189): Ceres Seq. ID no. 13489781
  misc_feature (1)..(189): Homolog of NCBI NO: 11280696 NR Description: hypothetical protein F26O13.250 - Arabidopsis
  misc_feature (1)..(189): Homolog of NCBI NO: 21617957 NR Description: unknown [Arabidopsis thaliana]
  misc_feature (1)..(189): Homolog of NCBI NO: 18409385 NR Description: expressed protein [Arabidopsis thaliana]

SEQ ID NO: 31831 - DNA, 563 bp, Arabidopsis thaliana; identical to SEQ ID NO: 21572
  misc_feature (1)..(563): Ceres Seq. ID no. 12333265
  misc_feature: MA Experiment ID: 20000234 Result: Up-regulated in Transcription
  misc_feature: MA Experiment 20000234 PARAMETER Experiment Name: At_Siliques_P Parameter: Age (day) Value: 21
  misc_feature: MA Experiment 20000234 PARAMETER Experiment Name: At_Siliques_P Parameter: Organism Value: A. thaliana
  misc_feature: MA Experiment 20000234 PARAMETER Experiment Name: At_Siliques_P Parameter: Plant Line Value: WS
  misc_feature: MA Experiment 20000234 PARAMETER Experiment Name: At_Siliques_P Parameter: Tissue Value: Less Than 5mm Siliques vs. Whole Plant
  misc_feature: MA Experiment ID: 20000235 Result: Up-regulated in Transcription
  misc_feature: MA Experiment 20000235 PARAMETER Experiment Name: At_Siliques_P Parameter: Age (day) Value: 21
  misc_feature: MA Experiment 20000235 PARAMETER Experiment Name: At_Siliques_P Parameter: Organism Value: A. thaliana
  misc_feature: MA Experiment 20000235 PARAMETER Experiment Name: At_Siliques_P Parameter: Plant Line Value: WS
  misc_feature: MA Experiment 20000235 PARAMETER Experiment Name: At_Siliques_P Parameter: Tissue Value: 5-10mm Siliques vs. Whole Plant
  misc_feature: MA Experiment ID: 20001556 Result: Down-regulated in Transcription
  misc_feature: MA Experiment 20001556 PARAMETER Experiment Name: At_Drought_Soil_Dry_P Parameter: Age (day) Value: 26
  misc_feature: MA Experiment 20001556 PARAMETER Experiment Name: At_Drought_Soil_Dry_P Parameter: Organism Value: A. thaliana
  misc_feature: MA Experiment 20001556 PARAMETER Experiment Name: At_Drought_Soil_Dry_P Parameter: Plant Line Value: WS
  misc_feature: MA Experiment 20001556 PARAMETER Experiment Name: At_Drought_Soil_Dry_P Parameter: Post Timepoint (hr) Value: None
  misc_feature: MA Experiment 20001556 PARAMETER Experiment Name: At_Drought_Soil_Dry_P Parameter: Post-Treatment Value: None
  misc_feature: MA Experiment 20001556 PARAMETER Experiment Name: At_Drought_Soil_Dry_P Parameter: Timepoint (day) Value: 12
  misc_feature: MA Experiment 20001556 PARAMETER Experiment Name: At_Drought_Soil_Dry_P Parameter: Treatment Value: Drought vs. No Drought

SEQ ID NO: 31832 - protein, 114 aa, Arabidopsis thaliana; identical to SEQ ID NO: 21573
  peptide (1)..(114): Ceres Seq. ID no. 12333266
  misc_feature (2)..(113): Homolog of NCBI NO: 40287476 NR Description: thioredoxin [Capsicum annuum]
  misc_feature (3)..(112): Homolog of NCBI NO: 19851972 NR Description: thioredoxin H [Populus tremula x Populus
  misc_feature (3)..(112): Homolog of NCBI NO: 30575686 NR Description: thioredoxin H [Citrus x paradisi]
  misc_feature (3)..(114): Homolog of NCBI NO: 27466894 NR Description: thioredoxin h [Pisum sativum]
  misc_feature (2)..(114): Homolog of NCBI NO: 267124 NR Description: Thioredoxin H-type 1 (TRX-H1)
  misc_feature (3)..(114): Homolog of NCBI NO: 16588843 NR Description: thioredoxin H [Prunus persica]
  misc_feature (2)..(114): Homolog of NCBI NO: 13624884 NR Description: thioredoxin h [Pisum sativum]
  misc_feature (3)..(114): Homolog of NCBI NO: 586099 NR Description: Thioredoxin H-type 2 (TRX-H2)
  misc_feature (1)..(114): Homolog of NCBI NO: 11135282 NR Description: Thioredoxin H-type (TRX-H)
  misc_feature (1)..(114): Homolog of NCBI NO: 15230385 NR Description: thioredoxin h; protein id: At3g51030.1, supported
  misc_feature (2)..(113): Homolog of NCBI NO: 40287476 NR Description: thioredoxin [Capsicum annuum]
  misc_feature (3)..(112): Homolog of NCBI NO: 19851972 NR Description: thioredoxin H [Populus tremula x Populus
  misc_feature (3)..(112): Homolog of NCBI NO: 30575686 NR Description: thioredoxin H [Citrus x paradisi]
  misc_feature (3)..(114): Homolog of NCBI NO: 27466894 NR Description: thioredoxin h [Pisum sativum]
  misc_feature (2)..(114): Homolog of NCBI NO: 267124 NR Description: Thioredoxin H-type 1 (TRX-H1)
  misc_feature (3)..(114): Homolog of NCBI NO: 16588843 NR Description: thioredoxin H [Prunus persica]
  misc_feature (2)..(114): Homolog of NCBI NO: 13624884 NR Description: thioredoxin h [Pisum sativum]
  misc_feature (3)..(114): Homolog of NCBI NO: 586099 NR Description: Thioredoxin H-type 2 (TRX-H2)
  misc_feature (1)..(114): Homolog of NCBI NO: 11135282 NR Description: Thioredoxin H-type (TRX-H)
  misc_feature (1)..(114): Homolog of NCBI NO: 15230385 NR Description: thioredoxin h; protein id: At3g51030.1, supported

SEQ ID NO: 31833 - DNA, 759 bp, Arabidopsis thaliana; identical to SEQ ID NO: 28243
  misc_feature (1)..(759): Ceres Seq. ID no. 12331788
  misc_feature: MA Experiment ID: 108595 Result: Up-regulated in Transcription
  misc_feature: MA Experiment 108595 PARAMETER Experiment Name: At_Ler-pi_Ovule_cDNA_P Parameter: Plant Line Value: null
  misc_feature: MA Experiment ID: 20000111 Result: Down-regulated in Transcription
  misc_feature: MA Experiment 20000111 PARAMETER Experiment Name: At_42deg_Heat_cDNA_P Parameter: Temperature (deg C) Value: 42 vs. 22
  misc_feature: MA Experiment 20000111 PARAMETER Experiment Name: At_42deg_Heat_cDNA_P Parameter: Timepoint (hr) Value: 6
  misc_feature: MA Experiment 20000111 PARAMETER Experiment Name: At_42deg_Heat_cDNA_P Parameter: Tissue Value: Aerial
  misc_feature: MA Experiment ID: 20000113 Result: Down-regulated in Transcription
  misc_feature: MA Experiment 20000113 PARAMETER Experiment Name: At_42deg_Heat_cDNA_P Parameter: Temperature (deg C) Value: 42 vs. 22
  misc_feature: MA Experiment 20000113 PARAMETER Experiment Name: At_42deg_Heat_cDNA_P Parameter: Timepoint (hr) Value: 8
  misc_feature: MA Experiment 20000113 PARAMETER Experiment Name: At_42deg_Heat_cDNA_P Parameter: Tissue Value: Aerial
  misc_feature: MA Experiment ID: 20000144 Result: Down-regulated in Transcription
  misc_feature: MA Experiment 20000144 PARAMETER Experiment Name: At_42deg_Heat_cDNA_P Parameter: Temperature (deg C) Value: 42 vs. 22
  misc_feature: MA Experiment 20000144 PARAMETER Experiment Name: At_42deg_Heat_cDNA_P Parameter: Timepoint (hr) Value: 1
  misc_feature: MA Experiment 20000144 PARAMETER Experiment Name: At_42deg_Heat_cDNA_P Parameter: Tissue Value: Aerial
  misc_feature: MA Experiment ID: 20000180 Result: Up-regulated in Transcription
  misc_feature: MA Experiment 20000180 PARAMETER Experiment Name: At_Germinating_Seeds_P Parameter: Age (hr) Value: 24 vs. 0
  misc_feature: MA Experiment 20000180 PARAMETER Experiment Name: At_Germinating_Seeds_P Parameter: Tissue Value: Germinating Seeds
  misc_feature: MA Experiment ID: 20000184 Result: Up-regulated in Transcription
  misc_feature: MA Experiment 20000184 PARAMETER Experiment Name: At_Shoots__P Parameter: Age (day) Value: 7
  misc_feature: MA Experiment 20000184 PARAMETER Experiment Name: At_Shoots__P Parameter: Tissue Value: Shoots vs. Whole Plant
  misc_feature: MA Experiment ID: 20000227 Result: Down-regulated in Transcription
  misc_feature: MA Experiment 20000227 PARAMETER Experiment Name: At_Root-Tips-vs-Tops_P Parameter: Tissue Value: Root Tips vs. Root Tops
  misc_feature: MA Experiment ID: 20000439 Result: Up-regulated in Transcription
  misc_feature: MA Experiment 20000439 PARAMETER Experiment Name: At_Roots__P Parameter: Age (day) Value: 14 vs. 21
  misc_feature: MA Experiment 20000439 PARAMETER Experiment Name: At_Roots__P Parameter: Organism Value: A. thaliana
  misc_feature: MA Experiment 20000439 PARAMETER Experiment Name: At_Roots__P Parameter: Tissue Value: Roots vs. Whole Plant

SEQ ID NO: 31834 - protein, 198 aa, Arabidopsis thaliana; identical to SEQ ID NO: 28244
  peptide (1)..(198): Ceres Seq. ID no. 12331789
  misc_feature (104)..(160): Pfam Name: Zinc finger, C3HC4 type (RING finger) Pfam Description: Zinc finger, C3HC4 type (RING finger)
  misc_feature (32)..(175): Homolog of NCBI NO: 15233352 NR Description: RING-H2 finger protein RHA1a -like protein
  misc_feature (26)..(176): Homolog of NCBI NO: 15223041 NR Description: putative RING zinc finger protein
  misc_feature (64)..(179): Homolog of NCBI NO: 15233350 NR Description: RING-H2 finger protein RHA1b
  misc_feature (58)..(166): Homolog of NCBI NO: 21554155 NR Description: RING zinc finger protein-like [Arabidopsis
  misc_feature (63)..(165): Homolog of NCBI NO: 18411282 NR Description: similar to RING finger protein; protein id:
  misc_feature (58)..(166): Homolog of NCBI NO: 15238072 NR Description: RING zinc finger protein-like
  misc_feature (76)..(165): Homolog of NCBI NO: 15233117 NR Description: RING finger protein
  misc_feature (32)..(169): Homolog of NCBI NO: 23451086 NR Description: RING-H2 protein [Medicago sativa]
  misc_feature (23)..(196): Homolog of NCBI NO: 15229284 NR Description: putative protein
  misc_feature (23)..(198): Homolog of NCBI NO: 18420336 NR Description: putative protein

SEQ ID NO: 31835 - protein, 176 aa, Arabidopsis thaliana; identical to SEQ ID NO: 28245
  peptide (1)..(176): Ceres Seq. ID no. 12331790
  misc_feature (82)..(138): Pfam Name: Zinc finger, C3HC4 type (RING finger) Pfam Description: Zinc finger, C3HC4 type (RING finger)
  misc_feature (10)..(153): Homolog of NCBI NO: 15233352 NR Description: RING-H2 finger protein RHA1a -like protein
  misc_feature (4)..(154): Homolog of NCBI NO: 15223041 NR Description: putative RING zinc finger protein
  misc_feature (42)..(157): Homolog of NCBI NO: 15233350 NR Description: RING-H2 finger protein RHA1b
  misc_feature (36)..(144): Homolog of NCBI NO: 21554155 NR Description: RING zinc finger protein-like [Arabidopsis
  misc_feature (41)..(143): Homolog of NCBI NO: 18411282 NR Description: similar to RING finger protein; protein id:
  misc_feature (36)..(144): Homolog of NCBI NO: 15238072 NR Description: RING zinc finger protein-like
  misc_feature (54)..(143): Homolog of NCBI NO: 15233117 NR Description: RING finger protein
  misc_feature (10)..(147): Homolog of NCBI NO: 23451086 NR Description: RING-H2 protein [Medicago sativa]
  misc_feature (1)..(174): Homolog of NCBI NO: 15229284 NR Description: putative protein
  misc_feature (1)..(176): Homolog of NCBI NO: 18420336 NR Description: putative protein

SEQ ID NO: 31836 - protein, 158 aa, Arabidopsis thaliana; identical to SEQ ID NO: 28246
  peptide (1)..(158): Ceres Seq. ID no. 12331791
  misc_feature (64)..(120): Pfam Name: Zinc finger, C3HC4 type (RING finger) Pfam Description: Zinc finger, C3HC4 type (RING finger)
  misc_feature (1)..(135): Homolog of NCBI NO: 15233352 NR Description: RING-H2 finger protein RHA1a -like protein
  misc_feature (1)..(136): Homolog of NCBI NO: 15223041 NR Description: putative RING zinc finger protein
  misc_feature (24)..(139): Homolog of NCBI NO: 15233350 NR Description: RING-H2 finger protein RHA1b
  misc_feature (18)..(126): Homolog of NCBI NO: 21554155 NR Description: RING zinc finger protein-like [Arabidopsis
  misc_feature (23)..(125): Homolog of NCBI NO: 18411282 NR Description: similar to RING finger protein; protein id:
  misc_feature (18)..(126): Homolog of NCBI NO: 15238072 NR Description: RING zinc finger protein-like
  misc_feature (36)..(125): Homolog of NCBI NO: 15233117 NR Description: RING finger protein
  misc_feature (1)..(129): Homolog of NCBI NO: 23451086 NR Description: RING-H2 protein [Medicago sativa]
  misc_feature (1)..(156): Homolog of NCBI NO: 15229284 NR Description: putative protein
  misc_feature (1)..(158): Homolog of NCBI NO: 18420336 NR Description: putative protein

SEQ ID NO: 31837 - DNA, 476 bp, Arabidopsis thaliana; identical to SEQ ID NO: 28247
  misc_feature (1)..(476): Ceres Seq. ID no. 12393749
  misc_feature: MA Experiment ID: 20000437 Result: Down-regulated in Transcription
  misc_feature: MA Experiment 20000437 PARAMETER Experiment Name: At_Drought_P Parameter: Age (day) Value: 8
  misc_feature: MA Experiment 20000437 PARAMETER Experiment Name: At_Drought_P Parameter: Organism Value: A. thaliana
  misc_feature: MA Experiment 20000437 PARAMETER Experiment Name: At_Drought_P Parameter: Plant Line Value: WS
  misc_feature: MA Experiment 20000437 PARAMETER Experiment Name: At_Drought_P Parameter: Timepoint (hr) Value: 24
  misc_feature: MA Experiment 20000437 PARAMETER Experiment Name: At_Drought_P Parameter: Tissue Value: Whole Plant
  misc_feature: MA Experiment 20000437 PARAMETER Experiment Name: At_Drought_P Parameter: Treatment Value: Drought vs. No Drought
  misc_feature: MA Experiment ID: 20001557 Result: Up-regulated in Transcription
  misc_feature: MA Experiment 20001557 PARAMETER Experiment Name: At_Drought_Soil_Dry_P Parameter: Age (day) Value: 27
  misc_feature: MA Experiment 20001557 PARAMETER Experiment Name: At_Drought_Soil_Dry_P Parameter: Organism Value: A. thaliana
  misc_feature: MA Experiment 20001557 PARAMETER Experiment Name: At_Drought_Soil_Dry_P Parameter: Plant Line Value: WS
  misc_feature: MA Experiment 20001557 PARAMETER Experiment Name: At_Drought_Soil_Dry_P Parameter: Post Timepoint (hr) Value: 3
  misc_feature: MA Experiment 20001557 PARAMETER Experiment Name: At_Drought_Soil_Dry_P Parameter: Post-Treatment Value: Re-Water vs. No Drought
  misc_feature: MA Experiment 20001557 PARAMETER Experiment Name: At_Drought_Soil_Dry_P Parameter: Timepoint (day) Value: 13
  misc_feature: MA Experiment 20001557 PARAMETER Experiment Name: At_Drought_Soil_Dry_P Parameter: Treatment Value: Drought vs. No Drought

SEQ ID NO: 31838 - protein, 78 aa, Arabidopsis thaliana; identical to SEQ ID NO: 28248
  peptide (1)..(78): Ceres Seq. ID no. 12393750
  misc_feature (1)..(75): Pfam Name: Enolase, C-terminal TIM barrel domain Pfam Description: Enolase, C-terminal TIM barrel domain
  misc_feature (1)..(78): Homolog of NCBI NO: 3023714 NR Description: Enolase (2-phosphoglycerate dehydratase)
  misc_feature (1)..(78): Homolog of NCBI NO: 14423688 NR Description: Enolase 1 (2-phosphoglycerate dehydratase 1)
  misc_feature (1)..(78): Homolog of NCBI NO: 34597332 NR Description: enolase [Brassica napus]
  misc_feature (1)..(78): Homolog of NCBI NO: 34597330 NR Description: enolase [Brassica rapa]
  misc_feature (1)..(78): Homolog of NCBI NO: 6996529 NR Description: enolase [Lupinus luteus]
  misc_feature (1)..(78): Homolog of NCBI NO: 119354 NR Description: Enolase (2-phosphoglycerate dehydratase)
  misc_feature (1)..(78): Homolog of NCBI NO: 15809970 NR Description: At2g36530/F1O11.16 [Arabidopsis thaliana]
  misc_feature (1)..(78): Homolog of NCBI NO: 20260174 NR Description: enolase (2-phospho-D-glycerate hydroylase)
  misc_feature (1)..(78): Homolog of NCBI NO: 18175728 NR Description: putative enolase (2-phospho-D-glycerate
  misc_feature (1)..(78): Homolog of NCBI NO: 15227987 NR Description: enolase (2-phospho-D-glycerate hydroylase)

SEQ ID NO: 31839 - protein, 77 aa, Arabidopsis thaliana; identical to SEQ ID NO: 28249
  peptide (1)..(77): Ceres Seq. ID no. 12393751
  misc_feature (1)..(74): Pfam Name: Enolase, C-terminal TIM barrel domain Pfam Description: Enolase, C-terminal TIM barrel domain
  misc_feature (1)..(77): Homolog of NCBI NO: 3023714 NR Description: Enolase (2-phosphoglycerate dehydratase)
  misc_feature (1)..(77): Homolog of NCBI NO: 14423688 NR Description: Enolase 1 (2-phosphoglycerate dehydratase 1)
  misc_feature (1)..(77): Homolog of NCBI NO: 34597332 NR Description: enolase [Brassica napus]
  misc_feature (1)..(77): Homolog of NCBI NO: 34597330 NR Description: enolase [Brassica rapa]
  misc_feature (1)..(77): Homolog of NCBI NO: 6996529 NR Description: enolase [Lupinus luteus]
  misc_feature (1)..(77): Homolog of NCBI NO: 119354 NR Description: Enolase (2-phosphoglycerate dehydratase)
  misc_feature (1)..(77): Homolog of NCBI NO: 15809970 NR Description: At2g36530/F1O11.16 [Arabidopsis thaliana]
  misc_feature (1)..(77): Homolog of NCBI NO: 18175728 NR Description: putative enolase (2-phospho-D-glycerate
  misc_feature (1)..(77): Homolog of NCBI NO: 20260174 NR Description: enolase (2-phospho-D-glycerate hydroylase)
  misc_feature (1)..(77): Homolog of NCBI NO: 15227987 NR Description: enolase (2-phospho-D-glycerate hydroylase)

SEQ ID NO: 31840 - protein, 68 aa, Arabidopsis thaliana; identical to SEQ ID NO: 28250
  peptide (1)..(68): Ceres Seq. ID no. 12393752
  misc_feature (1)..(65): Pfam Name: Enolase, C-terminal TIM barrel domain Pfam Description: Enolase, C-terminal TIM barrel domain
  misc_feature (1)..(68): Homolog of NCBI NO: 3023714 NR Description: Enolase (2-phosphoglycerate dehydratase)
  misc_feature (1)..(68): Homolog of NCBI NO: 14423688 NR Description: Enolase 1 (2-phosphoglycerate dehydratase 1)
  misc_feature (1)..(68): Homolog of NCBI NO: 34597332 NR Description: enolase [Brassica napus]
  misc_feature (1)..(68): Homolog of NCBI NO: 34597330 NR Description: enolase [Brassica rapa]
  misc_feature (1)..(68): Homolog of NCBI NO: 6996529 NR Description: enolase [Lupinus luteus]
  misc_feature (1)..(68): Homolog of NCBI NO: 119354 NR Description: Enolase (2-phosphoglycerate dehydratase)
  misc_feature (1)..(68): Homolog of NCBI NO: 15809970 NR Description: At2g36530/F1O11.16 [Arabidopsis thaliana]
  misc_feature (1)..(68): Homolog of NCBI NO: 20260174 NR Description: enolase (2-phospho-D-glycerate hydroylase)
  misc_feature (1)..(68): Homolog of NCBI NO: 18175728 NR Description: putative enolase (2-phospho-D-glycerate
  misc_feature (1)..(68): Homolog of NCBI NO: 15227987 NR Description: enolase (2-phospho-D-glycerate hydroylase)

SEQ ID NO: 31841 - DNA, 898 bp, Arabidopsis thaliana; identical to SEQ ID NO: 28251
  misc_feature (1)..(898): Ceres Seq. ID no. 12338786
  misc_feature: MA Experiment ID: 20000184 Result: Down-regulated in Transcription
  misc_feature: MA Experiment 20000184 PARAMETER Experiment Name: At_Shoots__P Parameter: Age (day) Value: 7
  misc_feature: MA Experiment 20000184 PARAMETER Experiment Name: At_Shoots__P Parameter: Tissue Value: Shoots vs. Whole Plant
  misc_feature: MA Experiment ID: 20000185 Result: Down-regulated in Transcription
  misc_feature: MA Experiment 20000185 PARAMETER Experiment Name: At_Roots__P Parameter: Age (day) Value: 7 vs. 21
  misc_feature: MA Experiment 20000185 PARAMETER Experiment Name: At_Roots__P Parameter: Organism Value: A. thaliana
  misc_feature: MA Experiment 20000185 PARAMETER Experiment Name: At_Roots__P Parameter: Tissue Value: Roots vs. Whole Plant
  misc_feature: MA Experiment ID: 20000264 Result: Up-regulated in Transcription
  misc_feature: MA Experiment 20000264 PARAMETER Experiment Name: At_Open_Flower_P Parameter: Age (day) Value: 21
  misc_feature: MA Experiment 20000264 PARAMETER Experiment Name: At_Open_Flower_P Parameter: Plant Line Value: WS
  misc_feature: MA Experiment 20000264 PARAMETER Experiment Name: At_Open_Flower_P Parameter: Tissue Value: Open Flower vs. Whole Plant
  misc_feature: MA Experiment ID: 20000265 Result: Down-regulated in Transcription
  misc_feature: MA Experiment 20000265 PARAMETER Experiment Name: At_Open_Flower_P Parameter: Age (day) Value: 21
  misc_feature: MA Experiment 20000265 PARAMETER Experiment Name: At_Open_Flower_P Parameter: Plant Line Value: WS
  misc_feature: MA Experiment 20000265 PARAMETER Experiment Name: At_Open_Flower_P Parameter: Tissue Value: Closed Flower vs. Whole Plant
  misc_feature: MA Experiment ID: 20000438 Result: Down-regulated in Transcription
  misc_feature: MA Experiment 20000438 PARAMETER Experiment Name: At_Shoots__P Parameter: Age (day) Value: 14
  misc_feature: MA Experiment 20000438 PARAMETER Experiment Name: At_Shoots__P Parameter: Tissue Value: Shoots vs. Whole Plant
  misc_feature: MA Experiment ID: 20000439 Result: Down-regulated in Transcription
  misc_feature: MA Experiment 20000439 PARAMETER Experiment Name: At_Roots__P Parameter: Age (day) Value: 14 vs. 21
  misc_feature: MA Experiment 20000439 PARAMETER Experiment Name: At_Roots__P Parameter: Organism Value: A. thaliana
  misc_feature: MA Experiment 20000439 PARAMETER Experiment Name: At_Roots__P Parameter: Tissue Value: Roots vs. Whole Plant
  misc_feature: MA Experiment ID: 20000794 Result: Up-regulated in Transcription
  misc_feature: MA Experiment 20000794 PARAMETER Experiment Name: At_Petals_P Parameter: Age (day) Value: 23-25 days
  misc_feature: MA Experiment 20000794 PARAMETER Experiment Name: At_Petals_P Parameter: Plant Line Value: WS
  misc_feature: MA Experiment 20000794 PARAMETER Experiment Name: At_Petals_P Parameter: Tissue Value: Petals vs. Whole plant
  misc_feature: MA Experiment ID: 20001555 Result: Up-regulated in Transcription
  misc_feature: MA Experiment 20001555 PARAMETER Experiment Name: At_Drought_Soil_Dry_P Parameter: Age (day) Value: 24
  misc_feature: MA Experiment 20001555 PARAMETER Experiment Name: At_Drought_Soil_Dry_P Parameter: Organism Value: A. thaliana
  misc_feature: MA Experiment 20001555 PARAMETER Experiment Name: At_Drought_Soil_Dry_P Parameter: Plant Line Value: WS
  misc_feature: MA Experiment 20001555 PARAMETER Experiment Name: At_Drought_Soil_Dry_P Parameter: Post Timepoint (hr) Value: None
  misc_feature: MA Experiment 20001555 PARAMETER Experiment Name: At_Drought_Soil_Dry_P Parameter: Post-Treatment Value: None
  misc_feature: MA Experiment 20001555 PARAMETER Experiment Name: At_Drought_Soil_Dry_P Parameter: Timepoint (day) Value: 10
  misc_feature: MA Experiment 20001555 PARAMETER Experiment Name: At_Drought_Soil_Dry_P Parameter: Treatment Value: Drought vs. No Drought
  misc_feature: MA Experiment ID: 20001556 Result: Up-regulated in Transcription
  misc_feature: MA Experiment 20001556 PARAMETER Experiment Name: At_Drought_Soil_Dry_P Parameter: Age (day) Value: 26
  misc_feature: MA Experiment 20001556 PARAMETER Experiment Name: At_Drought_Soil_Dry_P Parameter: Organism Value: A. thaliana
  misc_feature: MA Experiment 20001556 PARAMETER Experiment Name: At_Drought_Soil_Dry_P Parameter: Plant Line Value: WS
  misc_feature: MA Experiment 20001556 PARAMETER Experiment Name: At_Drought_Soil_Dry_P Parameter: Post Timepoint (hr) Value: None
  misc_feature: MA Experiment 20001556 PARAMETER Experiment Name: At_Drought_Soil_Dry_P Parameter: Post-Treatment Value: None
  misc_feature: MA Experiment 20001556 PARAMETER Experiment Name: At_Drought_Soil_Dry_P Parameter: Timepoint (day) Value: 12
  misc_feature: MA Experiment 20001556 PARAMETER Experiment Name: At_Drought_Soil_Dry_P Parameter: Treatment Value: Drought vs. No Drought
  misc_feature: MA Experiment ID: 20001904 Result: Up-regulated in Transcription
  misc_feature: MA Experiment 20001904 PARAMETER Experiment Name: At_Drought_Reproduction_P Parameter: Age (day) Value: 37
  misc_feature: MA Experiment 20001904 PARAMETER Experiment Name: At_Drought_Reproduction_P Parameter: Organism Value: A. thaliana
  misc_feature: MA Experiment 20001904 PARAMETER Experiment Name: At_Drought_Reproduction_P Parameter: Plant Line Value: WS
  misc_feature: MA Experiment 20001904 PARAMETER Experiment Name: At_Drought_Reproduction_P Parameter: Timepoint (day) Value: 7
  misc_feature: MA Experiment 20001904 PARAMETER Experiment Name: At_Drought_Reproduction_P Parameter: Tissue Value: Rosettes
  misc_feature: MA Experiment 20001904 PARAMETER Experiment Name: At_Drought_Reproduction_P Parameter: Treatment Value: Drought vs. No Drought
  misc_feature: MA Experiment ID: 20001905 Result: Up-regulated in Transcription
  misc_feature: MA Experiment 20001905 PARAMETER Experiment Name: At_Drought_Reproduction_P Parameter: Age (day) Value: 40
  misc_feature: MA Experiment 20001905 PARAMETER Experiment Name: At_Drought_Reproduction_P Parameter: Organism Value: A. thaliana
  misc_feature: MA Experiment 20001905 PARAMETER Experiment Name: At_Drought_Reproduction_P Parameter: Plant Line Value: WS
  misc_feature: MA Experiment 20001905 PARAMETER Experiment Name: At_Drought_Reproduction_P Parameter: Timepoint (day) Value: 10
  misc_feature: MA Experiment 20001905 PARAMETER Experiment Name: At_Drought_Reproduction_P Parameter: Tissue Value: Rosettes
  misc_feature: MA Experiment 20001905 PARAMETER Experiment Name: At_Drought_Reproduction_P Parameter: Treatment Value: Drought vs. No Drought
  misc_feature: MA Experiment ID: 20001911 Result: Down-regulated in Transcription
  misc_feature: MA Experiment 20001911 PARAMETER Experiment Name: At_Drought_Reproduction_P Parameter: Age (day) Value: 40
  misc_feature: MA Experiment 20001911 PARAMETER Experiment Name: At_Drought_Reproduction_P Parameter: Organism Value: A. thaliana
  misc_feature: MA Experiment 20001911 PARAMETER Experiment Name: At_Drought_Reproduction_P Parameter: Plant Line Value: WS
  misc_feature: MA Experiment 20001911 PARAMETER Experiment Name: At_Drought_Reproduction_P Parameter: Timepoint (day) Value: 10
  misc_feature: MA Experiment 20001911 PARAMETER Experiment Name: At_Drought_Reproduction_P Parameter: Tissue Value: Flowers
  misc_feature: MA Experiment 20001911 PARAMETER Experiment Name: At_Drought_Reproduction_P Parameter: Treatment Value: Drought vs. No Drought

SEQ ID NO: 31842 - protein, 192 aa, Arabidopsis thaliana; identical to SEQ ID NO: 28252
  peptide (1)..(192): Ceres Seq. ID no. 12338787
  misc_feature (12)..(185): Pfam Name: Caleosin related protein Pfam Description: Caleosin related protein
  misc_feature (20)..(187): Homolog of NCBI NO: 32488447 NR Description: OSJNBa0004N05.4 [Oryza sativa (japonica
  misc_feature (42)..(191): Homolog of NCBI NO: 15220688 NR Description: Ca2+-binding EF-hand common family protein,
  misc_feature (20)..(189): Homolog of NCBI NO: 34902470 NR Description: Putative abscisic acid-induced protein - rice
  misc_feature (12)..(189): Homolog of NCBI NO: 37652831 NR Description: calcium binding protein [Fagus sylvatica]
  misc_feature (1)..(191): Homolog of NCBI NO: 9295714 NR Description: F26F24.9 [Arabidopsis thaliana]
  misc_feature (20)..(191): Homolog of NCBI NO: 15220687 NR Description: pollen coat EF-hand protein
  misc_feature (1)..(191): Homolog of NCBI NO: 21593851 NR Description: unknown [Arabidopsis thaliana]
  misc_feature (1)..(191): Homolog of NCBI NO: 18409649 NR Description: Ca2+-binding EF-hand common family protein,
  misc_feature (1)..(192): Homolog of NCBI NO: 21617961 NR Description: unknown [Arabidopsis thaliana]
  misc_feature (1)..(192): Homolog of NCBI NO: 18409651 NR Description: Ca2+-binding EF-hand common family protein,

SEQ ID NO: 31843 - DNA, 710 bp, Arabidopsis thaliana; identical to SEQ ID NO: 28253
  misc_feature (1)..(710): Ceres Seq. ID no. 12439581
  misc_feature: MA Experiment ID: 108595 Result: Down-regulated in Transcription
  misc_feature: MA Experiment 108595 PARAMETER Experiment Name: At_Ler-pi_Ovule_cDNA_P Parameter: Plant Line Value: null
  misc_feature: MA Experiment ID: 20000224 Result: Down-regulated in Transcription

SEQ ID NO: 31844 - protein, 150 aa, Arabidopsis thaliana; identical to SEQ ID NO: 28254
  peptide (1)..(150): Ceres Seq. ID no. 12439582
  misc_feature (23)..(150): Pfam Name: Cofilin/tropomyosin-type actin-binding protein Pfam Description: Cofilin/tropomyosin-type actin-binding protein
  misc_feature (19)..(150): Homolog of NCBI NO: 11276987 NR Description: actin depolymerizing factor 2 - Arabidopsis
  misc_feature (13)..(150): Homolog of NCBI NO: 38564721 NR Description: putative actin-depolymerizing factor 2
  misc_feature (13)..(150): Homolog of NCBI NO: 18408116 NR Description: actin depolymerizing factor 2 (ADF2)
  misc_feature (13)..(150): Homolog of NCBI NO: 30697295 NR Description: actin depolymerizing factor 3 - like protein
  misc_feature (13)..(149): Homolog of NCBI NO: 17366765 NR Description: Actin-depolymerizing factor 2 (ADF 2)
  misc_feature (13)..(150): Homolog of NCBI NO: 17366768 NR Description: Actin-depolymerizing factor 1 (ADF 1)
  misc_feature (19)..(150): Homolog of NCBI NO: 30697303 NR Description: actin depolymerizing factor 4 - like protein
  misc_feature (13)..(150): Homolog of NCBI NO: 4185511 NR Description: actin depolymerizing factor 4 [Arabidopsis
  misc_feature (13)..(150): Homolog of NCBI NO: 30697300 NR Description: actin depolymerizing factor 4 - like protein
  misc_feature (13)..(150): Homolog of NCBI NO: 15231309 NR Description: actin depolymerizing factor 1 (ADF1)

SEQ ID NO: 31845 - protein, 132 aa, Arabidopsis thaliana; identical to SEQ ID NO: 26127
  peptide (1)..(132): Ceres Seq. ID no. 12439583
  misc_feature (5)..(132): Pfam Name: Cofilin/tropomyosin-type actin-binding protein Pfam Description: Cofilin/tropomyosin-type actin-binding protein
  misc_feature (1)..(132): Homolog of NCBI NO: 11276987 NR Description: actin depolymerizing factor 2 - Arabidopsis
  misc_feature (1)..(132): Homolog of NCBI NO: 38564721 NR Description: putative actin-depolymerizing factor 2
  misc_feature (1)..(132): Homolog of NCBI NO: 18408116 NR Description: actin depolymerizing factor 2 (ADF2)
  misc_feature (1)..(132): Homolog of NCBI NO: 30697295 NR Description: actin depolymerizing factor 3 - like protein
  misc_feature (1)..(131): Homolog of NCBI NO: 17366765 NR Description: Actin-depolymerizing factor 2 (ADF 2)
  misc_feature (1)..(132): Homolog of NCBI NO: 17366768 NR Description: Actin-depolymerizing factor 1 (ADF 1)
  misc_feature (1)..(132): Homolog of NCBI NO: 30697303 NR Description: actin depolymerizing factor 4 - like protein
  misc_feature (1)..(132): Homolog of NCBI NO: 4185511 NR Description: actin depolymerizing factor 4 [Arabidopsis
  misc_feature (1)..(132): Homolog of NCBI NO: 30697300 NR Description: actin depolymerizing factor 4 - like protein
  misc_feature (1)..(132): Homolog of NCBI NO: 15231309 NR Description: actin depolymerizing factor 1 (ADF1)

SEQ ID NO: 31846 - DNA, 938 bp, Arabidopsis thaliana; identical to SEQ ID NO: 28256
  misc_feature (1)..(938): Ceres Seq. ID no. 13490234
  misc_feature: MA Experiment ID: 108488 Result: Down-regulated in Transcription
  misc_feature: MA Experiment ID: 108595 Result: Up-regulated in Transcription
  misc_feature: MA Experiment 108595 PARAMETER Experiment Name: At_Ler-pi_Ovule_cDNA_P Parameter: Plant Line Value: null
  misc_feature: MA Experiment ID: 20000184 Result: Down-regulated in Transcription
  misc_feature: MA Experiment 20000184 PARAMETER Experiment Name: At_Shoots__P Parameter: Age (day) Value: 7
  misc_feature: MA Experiment 20000184 PARAMETER Experiment Name: At_Shoots__P Parameter: Tissue Value: Shoots vs. Whole Plant
  misc_feature: MA Experiment ID: 20000185 Result: Down-regulated in Transcription
  misc_feature: MA Experiment 20000185 PARAMETER Experiment Name: At_Roots__P Parameter: Age (day) Value: 7 vs. 21
  misc_feature: MA Experiment 20000185 PARAMETER Experiment Name: At_Roots__P Parameter: Organism Value: A. thaliana
  misc_feature: MA Experiment 20000185 PARAMETER Experiment Name: At_Roots__P Parameter: Tissue Value: Roots vs. Whole Plant
  misc_feature: MA Experiment ID: 20000264 Result: Up-regulated in Transcription
  misc_feature: MA Experiment 20000264 PARAMETER Experiment Name: At_Open_Flower_P Parameter: Age (day) Value: 21
  misc_feature: MA Experiment 20000264 PARAMETER Experiment Name: At_Open_Flower_P Parameter: Plant Line Value: WS
  misc_feature: MA Experiment 20000264 PARAMETER Experiment Name: At_Open_Flower_P Parameter: Tissue Value: Open Flower vs. Whole Plant
  misc_feature: MA Experiment ID: 20000265 Result: Up-regulated in Transcription
  misc_feature: MA Experiment 20000265 PARAMETER Experiment Name: At_Open_Flower_P Parameter: Age (day) Value: 21
  misc_feature: MA Experiment 20000265 PARAMETER Experiment Name: At_Open_Flower_P Parameter: Plant Line Value: WS
  misc_feature: MA Experiment 20000265 PARAMETER Experiment Name: At_Open_Flower_P Parameter: Tissue Value: Closed Flower vs. Whole Plant
  misc_feature: MA Experiment ID: 20000286 Result: Up-regulated in Transcription
  misc_feature: MA Experiment 20000286 PARAMETER Experiment Name: At_Open_Flower_P Parameter: Age (day) Value: 21
  misc_feature: MA Experiment 20000286 PARAMETER Experiment Name: At_Open_Flower_P Parameter: Plant Line Value: WS
  misc_feature: MA Experiment 20000286 PARAMETER Experiment Name: At_Open_Flower_P Parameter: Tissue Value: Half Open vs. Whole Plant
  misc_feature: MA Experiment ID: 20000438 Result: Down-regulated in Transcription
  misc_feature: MA Experiment 20000438 PARAMETER Experiment Name: At_Shoots__P Parameter: Age (day) Value: 14
  misc_feature: MA Experiment 20000438 PARAMETER Experiment Name: At_Shoots__P Parameter: Tissue Value: Shoots vs. Whole Plant
  misc_feature: MA Experiment ID: 20000439 Result: Down-regulated in Transcription
  misc_feature: MA Experiment 20000439 PARAMETER Experiment Name: At_Roots__P Parameter: Age (day) Value: 14 vs. 21
  misc_feature: MA Experiment 20000439 PARAMETER Experiment Name: At_Roots__P Parameter: Organism Value: A. thaliana
  misc_feature: MA Experiment 20000439 PARAMETER Experiment Name: At_Roots__P Parameter: Tissue Value: Roots vs. Whole Plant
  misc_feature: MA Experiment ID: 20000794 Result: Up-regulated in Transcription
  misc_feature: MA Experiment 20000794 PARAMETER Experiment Name: At_Petals_P Parameter: Age (day) Value: 23-25 days
  misc_feature: MA Experiment 20000794 PARAMETER Experiment Name: At_Petals_P Parameter: Plant Line Value: WS
  misc_feature: MA Experiment 20000794 PARAMETER Experiment Name: At_Petals_P Parameter: Tissue Value: Petals vs. Whole plant
  misc_feature: MA Experiment ID: 20001560 Result: Down-regulated in Transcription
  misc_feature: MA Experiment 20001560 PARAMETER Experiment Name: At_Drought_Soil_Dry_P Parameter: Age (day) Value: 28
  misc_feature: MA Experiment 20001560 PARAMETER Experiment Name: At_Drought_Soil_Dry_P Parameter: Organism Value: A. thaliana
  misc_feature: MA Experiment 20001560 PARAMETER Experiment Name: At_Drought_Soil_Dry_P Parameter: Plant Line Value: WS
  misc_feature: MA Experiment 20001560 PARAMETER Experiment Name: At_Drought_Soil_Dry_P Parameter: Post Timepoint (hr) Value: None
  misc_feature: MA Experiment 20001560 PARAMETER Experiment Name: At_Drought_Soil_Dry_P Parameter: Post-Treatment Value: None
  misc_feature: MA Experiment 20001560 PARAMETER Experiment Name: At_Drought_Soil_Dry_P Parameter: Timepoint (day) Value: 14
  misc_feature: MA Experiment 20001560 PARAMETER Experiment Name: At_Drought_Soil_Dry_P Parameter: Treatment Value: Drought vs. No Drought
  misc_feature: MA Experiment ID: 20001757 Result: Down-regulated in Transcription
  misc_feature: MA Experiment 20001757 PARAMETER Experiment Name: At_50mM_NH4NO3_L-to-H_P Parameter: Timepoint (hr) Value: 6
  misc_feature: MA Experiment 20001757 PARAMETER Experiment Name: At_50mM_NH4NO3_L-to-H_P Parameter: Tissue Value: Leaf
  misc_feature: MA Experiment 20001757 PARAMETER Experiment Name: At_50mM_NH4NO3_L-to-H_P Parameter: Treatment Value: 50mM NH4NO3 vs 100mM Mannitol
  misc_feature: MA Experiment ID: 20001905 Result: Up-regulated in Transcription
  misc_feature: MA Experiment 20001905 PARAMETER Experiment Name: At_Drought_Reproduction_P Parameter: Age (day) Value: 40
  misc_feature: MA Experiment 20001905 PARAMETER Experiment Name: At_Drought_Reproduction_P Parameter: Organism Value: A. thaliana
  misc_feature: MA Experiment 20001905 PARAMETER Experiment Name: At_Drought_Reproduction_P Parameter: Plant Line Value: WS
  misc_feature: MA Experiment 20001905 PARAMETER Experiment Name: At_Drought_Reproduction_P Parameter: Timepoint (day) Value: 10
  misc_feature: MA Experiment 20001905 PARAMETER Experiment Name: At_Drought_Reproduction_P Parameter: Tissue Value: Rosettes
  misc_feature: MA Experiment 20001905 PARAMETER Experiment Name: At_Drought_Reproduction_P Parameter: Treatment Value: Drought vs. No Drought
  misc_feature: MA Experiment ID: 20001910 Result: Up-regulated in Transcription
  misc_feature: MA Experiment 20001910 PARAMETER Experiment Name: At_Drought_Reproduction_P Parameter: Age (day) Value: 37
  misc_feature: MA Experiment 20001910 PARAMETER Experiment Name: At_Drought_Reproduction_P Parameter: Organism Value: A. thaliana
  misc_feature: MA Experiment 20001910 PARAMETER Experiment Name: At_Drought_Reproduction_P Parameter: Plant Line Value: WS
  misc_feature: MA Experiment 20001910 PARAMETER Experiment Name: At_Drought_Reproduction_P Parameter: Timepoint (day) Value: 7
  misc_feature: MA Experiment 20001910 PARAMETER Experiment Name: At_Drought_Reproduction_P Parameter: Tissue Value: Flowers
  misc_feature: MA Experiment 20001910 PARAMETER Experiment Name: At_Drought_Reproduction_P Parameter: Treatment Value: Drought vs. No Drought
  misc_feature: MA Experiment ID: 20001911 Result: Up-regulated in Transcription
  misc_feature: MA Experiment 20001911 PARAMETER Experiment Name: At_Drought_Reproduction_P Parameter: Age (day) Value: 40
  misc_feature: MA Experiment 20001911 PARAMETER Experiment Name: At_Drought_Reproduction_P Parameter: Organism Value: A. thaliana
  misc_feature: MA Experiment 20001911 PARAMETER Experiment Name: At_Drought_Reproduction_P Parameter: Plant Line Value: WS
  misc_feature: MA Experiment 20001911 PARAMETER Experiment Name: At_Drought_Reproduction_P Parameter: Timepoint (day) Value: 10
  misc_feature: MA Experiment 20001911 PARAMETER Experiment Name: At_Drought_Reproduction_P Parameter: Tissue Value: Flowers
  misc_feature: MA Experiment 20001911 PARAMETER Experiment Name: At_Drought_Reproduction_P Parameter: Treatment Value: Drought vs. No Drought

SEQ ID NO: 31847 - protein, 165 aa, Arabidopsis thaliana; identical to SEQ ID NO: 28257
  peptide (1)..(165): Ceres Seq. ID no. 13490235
  misc_feature (38)..(164): Homolog of NCBI NO: 40539005 NR Description: expressed protein [Oryza sativa (japonica
  misc_feature (14)..(151): Homolog of NCBI NO: 18399317 NR Description: expressed protein [Arabidopsis thaliana]
  misc_feature (21)..(161): Homolog of NCBI NO: 322884 NR Description: pollen-preferential protein - trumpet lily
  misc_feature (15)..(162): Homolog of NCBI NO: 15240027 NR Description: hypothetical protein [Arabidopsis thaliana]
  misc_feature (77)..(165): Homolog of NCBI NO: 25370727 NR Description: hypothetical protein At2g27180 [imported] -
  misc_feature (20)..(165): Homolog of NCBI NO: 21617979 NR Description: unknown [Arabidopsis thaliana]
  misc_feature (1)..(165): Homolog of NCBI NO: 18401348 NR Description: expressed protein [Arabidopsis thaliana]

SEQ ID NO: 31848 - protein, 146 aa, Arabidopsis thaliana; identical to SEQ ID NO: 28258
  peptide (1)..(146): Ceres Seq. ID no. 13490236
  misc_feature (19)..(145): Homolog of NCBI NO: 40539005 NR Description: expressed protein [Oryza sativa (japonica
  misc_feature (1)..(132): Homolog of NCBI NO: 18399317 NR Description: expressed protein [Arabidopsis thaliana]
  misc_feature (2)..(142): Homolog of NCBI NO: 322884 NR Description: pollen-preferential protein - trumpet lily
  misc_feature (1)..(143): Homolog of NCBI NO: 15240027 NR Description: hypothetical protein [Arabidopsis thaliana]
  misc_feature (58)..(146): Homolog of NCBI NO: 25370727 NR Description: hypothetical protein At2g27180 [imported] -
  misc_feature (1)..(146): Homolog of NCBI NO: 21617979 NR Description: unknown [Arabidopsis thaliana]
  misc_feature (1)..(146): Homolog of NCBI NO: 18401348 NR Description: expressed protein [Arabidopsis thaliana]

SEQ ID NO: 31849 - protein, 103 aa, Arabidopsis thaliana; identical to SEQ ID NO: 28259
  peptide (1)..(103): Ceres Seq. ID no. 13490237
  misc_feature (1)..(102): Homolog of NCBI NO: 40539005 NR Description: expressed protein [Oryza sativa (japonica
  misc_feature (1)..(89): Homolog of NCBI NO: 18399317 NR Description: expressed protein [Arabidopsis thaliana]
  misc_feature (1)..(99): Homolog of NCBI NO: 322884 NR Description: pollen-preferential protein - trumpet lily
  misc_feature (1)..(100): Homolog of NCBI NO: 15240027 NR Description: hypothetical protein [Arabidopsis thaliana]
  misc_feature (15)..(103): Homolog of NCBI NO: 25370727 NR Description: hypothetical protein At2g27180 [imported] -
  misc_feature (1)..(103): Homolog of NCBI NO: 21617979 NR Description: unknown [Arabidopsis thaliana]
  misc_feature (1)..(103): Homolog of NCBI NO: 18401348 NR Description: expressed protein [Arabidopsis thaliana]

SEQ ID NO: 31850 - DNA, 1741 bp, Arabidopsis thaliana; identical to SEQ ID NO: 22872
  misc_feature (1)..(1741): Ceres Seq. ID no. 12377573
  misc_feature: MA Experiment ID: 20000112 Result: Up-regulated in Transcription
  misc_feature: MA Experiment 20000112 PARAMETER Experiment Name: At_42deg_Heat_cDNA_P Parameter: Temperature (deg C) Value: 42 vs. 22
  misc_feature: MA Experiment 20000112 PARAMETER Experiment Name: At_42deg_Heat_cDNA_P Parameter: Timepoint (hr) Value: 2
  misc_feature: MA Experiment 20000112 PARAMETER Experiment Name: At_42deg_Heat_cDNA_P Parameter: Tissue Value: Aerial
  misc_feature: MA Experiment ID: 20000180 Result: Up-regulated in Transcription
  misc_feature: MA Experiment 20000180 PARAMETER Experiment Name: At_Germinating_Seeds_P Parameter: Age (hr) Value: 24 vs. 0
  misc_feature: MA Experiment 20000180 PARAMETER Experiment Name: At_Germinating_Seeds_P Parameter: Tissue Value: Germinating Seeds
  misc_feature: MA Experiment ID: 20000182 Result: Down-regulated in Transcription
  misc_feature: MA Experiment 20000182 PARAMETER Experiment Name: At_2mM_SA_P Parameter: Age (day) Value: 14
  misc_feature: MA Experiment 20000182 PARAMETER Experiment Name: At_2mM_SA_P Parameter: Organism Value: A. thaliana
  misc_feature: MA Experiment 20000182 PARAMETER Experiment Name: At_2mM_SA_P Parameter: Plant Line Value: WS
  misc_feature: MA Experiment 20000182 PARAMETER Experiment Name: At_2mM_SA_P Parameter: Timepoint (hr) Value: 6
  misc_feature: MA Experiment 20000182 PARAMETER Experiment Name: At_2mM_SA_P Parameter: Tissue Value: Aerial
  misc_feature: MA Experiment 20000182 PARAMETER Experiment Name: At_2mM_SA_P Parameter: Treatment Value: 2mM SA vs. No Treatment
  misc_feature: MA Experiment ID: 20000184 Result: Up-regulated in Transcription
  misc_feature: MA Experiment 20000184 PARAMETER Experiment Name: At_Shoots__P Parameter: Age (day) Value: 7
  misc_feature: MA Experiment 20000184 PARAMETER Experiment Name: At_Shoots__P Parameter: Tissue Value: Shoots vs. Whole Plant
  misc_feature: MA Experiment ID: 20000185 Result: Down-regulated in Transcription
  misc_feature: MA Experiment 20000185 PARAMETER Experiment Name: At_Roots__P Parameter: Age (day) Value: 7 vs. 21
  misc_feature: MA Experiment 20000185 PARAMETER Experiment Name: At_Roots__P Parameter: Organism Value: A. thaliana
  misc_feature: MA Experiment 20000185 PARAMETER Experiment Name: At_Roots__P Parameter: Tissue Value: Roots vs. Whole Plant
  misc_feature: MA Experiment ID: 20000234 Result: Up-regulated in Transcription
  misc_feature: MA Experiment 20000234 PARAMETER Experiment Name: At_Siliques_P Parameter: Age (day) Value: 21
  misc_feature: MA Experiment 20000234 PARAMETER Experiment Name: At_Siliques_P Parameter: Organism Value: A. thaliana
  misc_feature: MA Experiment 20000234 PARAMETER Experiment Name: At_Siliques_P Parameter: Plant Line Value: WS
  misc_feature: MA Experiment 20000234 PARAMETER Experiment Name: At_Siliques_P Parameter: Tissue Value: Less Than 5mm Siliques vs. Whole Plant
  misc_feature: MA Experiment ID: 20000437 Result: Down-regulated in Transcription
  misc_feature: MA Experiment 20000437 PARAMETER Experiment Name: At_Drought_P Parameter: Age (day) Value: 8
  misc_feature: MA Experiment 20000437 PARAMETER Experiment Name: At_Drought_P Parameter: Organism Value: A. thaliana
  misc_feature: MA Experiment 20000437 PARAMETER Experiment Name: At_Drought_P Parameter: Plant Line Value: WS
  misc_feature: MA Experiment 20000437 PARAMETER Experiment Name: At_Drought_P Parameter: Timepoint (hr) Value: 24
  misc_feature: MA Experiment 20000437 PARAMETER Experiment Name: At_Drought_P Parameter: Tissue Value: Whole Plant
  misc_feature: MA Experiment 20000437 PARAMETER Experiment Name: At_Drought_P Parameter: Treatment Value: Drought vs. No Drought
  misc_feature: MA Experiment ID: 20000438 Result: Up-regulated in Transcription
  misc_feature: MA Experiment 20000438 PARAMETER Experiment Name: At_Shoots__P Parameter: Age (day) Value: 14
  misc_feature: MA Experiment 20000438 PARAMETER Experiment Name: At_Shoots__P Parameter: Tissue Value: Shoots vs. Whole Plant
  misc_feature: MA Experiment ID: 20000439 Result: Down-regulated in Transcription
  misc_feature: MA Experiment 20000439 PARAMETER Experiment Name: At_Roots__P Parameter: Age (day) Value: 14 vs. 21
  misc_feature: MA Experiment 20000439 PARAMETER Experiment Name: At_Roots__P Parameter: Organism Value: A. thaliana
  misc_feature: MA Experiment 20000439 PARAMETER Experiment Name: At_Roots__P Parameter: Tissue Value: Roots vs. Whole Plant
  misc_feature: MA Experiment ID: 20000495 Result: Down-regulated in Transcription
  misc_feature: MA Experiment 20000495 PARAMETER Experiment Name: At_Guard_Cells_P Parameter: Harvest Date Value: 8/2/2002
  misc_feature: MA Experiment 20000495 PARAMETER Experiment Name: At_Guard_Cells_P Parameter: Organism Value: A. thaliana
  misc_feature: MA Experiment 20000495 PARAMETER Experiment Name: At_Guard_Cells_P Parameter: Tissue Value: Guard Cells vs. Leaves
  misc_feature: MA Experiment ID: 20001248 Result: Down-regulated in Transcription
  misc_feature: MA Experiment 20001248 PARAMETER Experiment Name: At_Far-red-induction_P Parameter: Age (day) Value: 7
  misc_feature: MA Experiment 20001248 PARAMETER Experiment Name: At_Far-red-induction_P Parameter: Light Value: Far-red vs. White
  misc_feature: MA Experiment 20001248 PARAMETER Experiment Name: At_Far-red-induction_P Parameter: Organism Value: A. thaliana
  misc_feature: MA Experiment 20001248 PARAMETER Experiment Name: At_Far-red-induction_P Parameter: Plant Line Value: Columbia
  misc_feature: MA Experiment 20001248 PARAMETER Experiment Name: At_Far-red-induction_P Parameter: Timepoint (hr) Value: 4
  misc_feature: MA Experiment 20001248 PARAMETER Experiment Name: At_Far-red-induction_P Parameter: Tissue Value: Whole Plant
  misc_feature: MA Experiment ID: 20001450 Result: Down-regulated in Transcription
  misc_feature: MA Experiment 20001450 PARAMETER Experiment Name: At_Far-red-induction_P Parameter: Age (day) Value: 7
  misc_feature: MA Experiment 20001450 PARAMETER Experiment Name: At_Far-red-induction_P Parameter: Light Value: Far-red vs. White
  misc_feature: MA Experiment 20001450 PARAMETER Experiment Name: At_Far-red-induction_P Parameter: Organism Value: A. thaliana
  misc_feature: MA Experiment 20001450 PARAMETER Experiment Name: At_Far-red-induction_P Parameter: Plant Line Value: Columbia
  misc_feature: MA Experiment 20001450 PARAMETER Experiment Name: At_Far-red-induction_P Parameter: Timepoint (hr) Value: 8
  misc_feature: MA Experiment 20001450 PARAMETER Experiment Name: At_Far-red-induction_P Parameter: Tissue Value: Whole Plant
  misc_feature: MA Experiment ID: 20001451 Result: Down-regulated in Transcription
  misc_feature: MA Experiment 20001451 PARAMETER Experiment Name: At_Far-red-induction_P Parameter: Age (day) Value: 7
  misc_feature: MA Experiment 20001451 PARAMETER Experiment Name: At_Far-red-induction_P Parameter: Light Value: Far-red vs. White
  misc_feature: MA Experiment 20001451 PARAMETER Experiment Name: At_Far-red-induction_P Parameter: Organism Value: A. thaliana
  misc_feature: MA Experiment 20001451 PARAMETER Experiment Name: At_Far-red-induction_P Parameter: Plant Line Value: Columbia
  misc_feature: MA Experiment 20001451 PARAMETER Experiment Name: At_Far-red-induction_P Parameter: Timepoint (hr) Value: 24
  misc_feature: MA Experiment 20001451 PARAMETER Experiment Name: At_Far-red-induction_P Parameter: Tissue Value: Whole Plant
  misc_feature: MA Experiment ID: 20001911 Result: Down-regulated in Transcription
  misc_feature: MA Experiment 20001911 PARAMETER Experiment Name: At_Drought_Reproduction_P Parameter: Age (day) Value: 40
  misc_feature: MA Experiment 20001911 PARAMETER Experiment Name: At_Drought_Reproduction_P Parameter: Organism Value: A. thaliana
  misc_feature: MA Experiment 20001911 PARAMETER Experiment Name: At_Drought_Reproduction_P Parameter: Plant Line Value: WS
  misc_feature: MA Experiment 20001911 PARAMETER Experiment Name: At_Drought_Reproduction_P Parameter: Timepoint (day) Value: 10
  misc_feature: MA Experiment 20001911 PARAMETER Experiment Name: At_Drought_Reproduction_P Parameter: Tissue Value: Flowers
  misc_feature: MA Experiment 20001911 PARAMETER Experiment Name: At_Drought_Reproduction_P Parameter: Treatment Value: Drought vs. No Drought

SEQ ID NO: 31851 - protein, 470 aa, Arabidopsis thaliana; identical to SEQ ID NO: 22873
  peptide (1)..(470): Ceres Seq. ID no. 12377574
  misc_feature (138)..(315): Pfam Name: DNA photolyase Pfam Description: DNA photolyase
  misc_feature (138)..(315): Pfam Name: DNA photolyase Pfam Description: DNA photolyase
  misc_feature (128)..(443): Homolog of NCBI NO: 18400841 NR Description: 6-4 photolyase (UVR3)
  misc_feature (169)..(452): Homolog of NCBI NO: 16330358 NR Description: DNA photolyase [Synechocystis sp. PCC 6803]
  misc_feature (138)..(450): Homolog of NCBI NO: 23135973 NR Description: hypothetical protein [Cytophaga hutchinsonii]
  misc_feature (141)..(452): Homolog of NCBI NO: 28374085 NR Description: Chain A, Crystal Structure Analysis Of
  misc_feature (130)..(461): Homolog of NCBI NO: 28971609 NR Description: cryptochrome dash [Arabidopsis thaliana]
  misc_feature (128)..(443): Homolog of NCBI NO: 18400841 NR Description: 6-4 photolyase (UVR3)
  misc_feature (138)..(450): Homolog of NCBI NO: 23135973 NR Description: hypothetical protein [Cytophaga hutchinsonii]
  misc_feature (130)..(461): Homolog of NCBI NO: 28971609 NR Description: cryptochrome dash [Arabidopsis thaliana]
  misc_feature (24)..(470): Homolog of NCBI NO: 15226633 NR Description: photolyase/blue-light receptor (PHR2)
  misc_feature (24)..(470): Homolog of NCBI NO: 21592984 NR Description: photolyase/blue-light receptor PHR2 [Arabidopsis
  misc_feature (141)..(452): Homolog of NCBI NO: 23040111 NR Description: hypothetical protein [Trichodesmium erythraeum
  misc_feature (138)..(450): Homolog of NCBI NO: 37520404 NR Description: probable bacterial cryptochrome [Gloeobacter
  misc_feature (130)..(461): Homolog of NCBI NO: 22327046 NR Description: DNA photolyase - like protein
  misc_feature (141)..(452): Homolog of NCBI NO: 28374085 NR Description: Chain A, Crystal Structure Analysis Of
  misc_feature (169)..(452): Homolog of NCBI NO: 16330358 NR Description: DNA photolyase [Synechocystis sp. PCC 6803]
  misc_feature (130)..(461): Homolog of NCBI NO: 22327046 NR Description: DNA photolyase - like protein
  misc_feature (138)..(450): Homolog of NCBI NO: 37520404 NR Description: probable bacterial cryptochrome [Gloeobacter
  misc_feature (141)..(452): Homolog of NCBI NO: 23040111 NR Description: hypothetical protein [Trichodesmium erythraeum
  misc_feature (24)..(470): Homolog of NCBI NO: 21592984 NR Description: photolyase/blue-light receptor PHR2 [Arabidopsis
  misc_feature (24)..(470): Homolog of NCBI NO: 15226633 NR Description: photolyase/blue-light receptor (PHR2)

SEQ ID NO: 31852 - protein, 447 aa, Arabidopsis thaliana; identical to SEQ ID NO: 22874
  peptide (1)..(447): Ceres Seq. ID no. 12377575
  misc_feature (115)..(292): Pfam Name: DNA photolyase Pfam Description: DNA photolyase
  misc_feature (115)..(292): Pfam Name: DNA photolyase Pfam Description: DNA photolyase
  misc_feature (105)..(420): Homolog of NCBI NO: 18400841 NR Description: 6-4 photolyase (UVR3)
  misc_feature (146)..(429): Homolog of NCBI NO: 16330358 NR Description: DNA photolyase [Synechocystis sp. PCC 6803]
  misc_feature (115)..(427): Homolog of NCBI NO: 23135973 NR Description: hypothetical protein [Cytophaga hutchinsonii]
  misc_feature (118)..(429): Homolog of NCBI NO: 28374085 NR Description: Chain A, Crystal Structure Analysis Of
  misc_feature (107)..(438): Homolog of NCBI NO: 28971609 NR Description: cryptochrome dash [Arabidopsis thaliana]
  misc_feature (105)..(420): Homolog of NCBI NO: 18400841 NR Description: 6-4 photolyase (UVR3)
  misc_feature (115)..(427): Homolog of NCBI NO: 23135973 NR Description: hypothetical protein [Cytophaga hutchinsonii]
  misc_feature (107)..(438): Homolog of NCBI NO: 28971609 NR Description: cryptochrome dash [Arabidopsis thaliana]
  misc_feature (1)..(447): Homolog of NCBI NO: 15226633 NR Description: photolyase/blue-light receptor (PHR2)
  misc_feature (1)..(447): Homolog of NCBI NO: 21592984 NR Description: photolyase/blue-light receptor PHR2 [Arabidopsis
  misc_feature (118)..(429): Homolog of NCBI NO: 23040111 NR Description: hypothetical protein [Trichodesmium erythraeum
  misc_feature (115)..(427): Homolog of NCBI NO: 37520404 NR Description: probable bacterial cryptochrome [Gloeobacter
  misc_feature (107)..(438): Homolog of NCBI NO: 22327046 NR Description: DNA photolyase - like protein
  misc_feature (118)..(429): Homolog of NCBI NO: 28374085 NR Description: Chain A, Crystal Structure Analysis Of
  misc_feature (146)..(429): Homolog of NCBI NO: 16330358 NR Description: DNA photolyase [Synechocystis sp. PCC 6803]
  misc_feature (107)..(438): Homolog of NCBI NO: 22327046 NR Description: DNA photolyase - like protein
  misc_feature (115)..(427): Homolog of NCBI NO: 37520404 NR Description: probable bacterial cryptochrome [Gloeobacter
  misc_feature (118)..(429): Homolog of NCBI NO: 23040111 NR Description: hypothetical protein [Trichodesmium erythraeum
  misc_feature (1)..(447): Homolog of NCBI NO: 21592984 NR Description: photolyase/blue-light receptor PHR2 [Arabidopsis
  misc_feature (1)..(447): Homolog of NCBI NO: 15226633 NR Description: photolyase/blue-light receptor (PHR2)

SEQ ID NO: 31853 - DNA, 932 bp, Arabidopsis thaliana; identical to SEQ ID NO: 28263
  misc_feature (1)..(932): Ceres Seq. ID no. 12332733
  misc_feature: MA Experiment ID: 108434 Result: Down-regulated in Transcription
  misc_feature: MA Experiment 108434 PARAMETER Experiment Name: At_Root_Tips_cDNA_P Parameter: Tissue Value: Root Tips
  misc_feature: MA Experiment ID: 108435 Result: Down-regulated in Transcription
  misc_feature: MA Experiment 108435 PARAMETER Experiment Name: At_stm_Mutants_cDNA_P Parameter: Plant Line Value: wt Landsburg vs stm
  misc_feature: MA Experiment 108435 PARAMETER Experiment Name: At_stm_Mutants_cDNA_P Parameter: Tissue Value: Shoot Apical Meristem Region
  misc_feature: MA Experiment ID: 108461 Result: Up-regulated in Transcription
  misc_feature: MA Experiment 108461 PARAMETER Experiment Name: At_Germinating_Seeds_cDNA_P Parameter: Age (day) Value: 1 vs. 0
  misc_feature: MA Experiment 108461 PARAMETER Experiment Name: At_Germinating_Seeds_cDNA_P Parameter: Tissue Value: Germinating Seeds
  misc_feature: MA Experiment ID: 108462 Result: Up-regulated in Transcription
  misc_feature: MA Experiment 108462 PARAMETER Experiment Name: At_Germinating_Seeds_cDNA_P Parameter: Age (day) Value: 2 vs. 0
  misc_feature: MA Experiment 108462 PARAMETER Experiment Name: At_Germinating_Seeds_cDNA_P Parameter: Tissue Value: Germinating Seeds
  misc_feature: MA Experiment ID: 108464 Result: Up-regulated in Transcription
  misc_feature: MA Experiment 108464 PARAMETER Experiment Name: At_Germinating_Seeds_cDNA_P Parameter: Age (day) Value: 4 vs. 0
  misc_feature: MA Experiment 108464 PARAMETER Experiment Name: At_Germinating_Seeds_cDNA_P Parameter: Tissue Value: Germinating Seeds
  misc_feature: MA Experiment ID: 108488 Result: Up-regulated in Transcription
  misc_feature: MA Experiment ID: 108595 Result: Down-regulated in Transcription
  misc_feature: MA Experiment 108595 PARAMETER Experiment Name: At_Ler-pi_Ovule_cDNA_P Parameter: Plant Line Value: null
  misc_feature: MA Experiment ID: 20000087 Result: Down-regulated in Transcription
  misc_feature: MA Experiment 20000087 PARAMETER Experiment Name: At_100uM_ABA_Mutants_cDNA_P Parameter: Plant Line Value: WS
  misc_feature: MA Experiment 20000087 PARAMETER Experiment Name: At_100uM_ABA_Mutants_cDNA_P Parameter: Timepoint (hr) Value: 6
  misc_feature: MA Experiment 20000087 PARAMETER Experiment Name: At_100uM_ABA_Mutants_cDNA_P Parameter: Tissue Value: Aerial
  misc_feature: MA Experiment 20000087 PARAMETER Experiment Name: At_100uM_ABA_Mutants_cDNA_P Parameter: Treatment Value: 100uM ABA vs. No Treatment
  misc_feature: MA Experiment ID: 20000179 Result: Up-regulated in Transcription
  misc_feature: MA Experiment 20000179 PARAMETER Experiment Name: At_Germinating_Seeds_P Parameter: Age (hr) Value: 6 vs. 0
  misc_feature: MA Experiment 20000179 PARAMETER Experiment Name: At_Germinating_Seeds_P Parameter: Tissue Value: Germinating Seeds
  misc_feature: MA Experiment ID: 20000180 Result: Up-regulated in Transcription
  misc_feature: MA Experiment 20000180 PARAMETER Experiment Name: At_Germinating_Seeds_P Parameter: Age (hr) Value: 24 vs. 0
  misc_feature: MA Experiment 20000180 PARAMETER Experiment Name: At_Germinating_Seeds_P Parameter: Tissue Value: Germinating Seeds
  misc_feature: MA Experiment ID: 20000185 Result: Down-regulated in Transcription
  misc_feature: MA Experiment 20000185 PARAMETER Experiment Name: At_Roots__P Parameter: Age (day) Value: 7 vs. 21
  misc_feature: MA Experiment 20000185 PARAMETER Experiment Name: At_Roots__P Parameter: Organism Value: A. thaliana
  misc_feature: MA Experiment 20000185 PARAMETER Experiment Name: At_Roots__P Parameter: Tissue Value: Roots vs. Whole Plant
  misc_feature: MA Experiment ID: 20000269 Result: Down-regulated in Transcription
  misc_feature: MA Experiment 20000269 PARAMETER Experiment Name: At_1mM_KNO3_L-vs-H_Roots_P Parameter: Age (day) Value: 7,10,12
  misc_feature: MA Experiment 20000269 PARAMETER Experiment Name: At_1mM_KNO3_L-vs-H_Roots_P Parameter: Organism Value: A. thaliana
  misc_feature: MA Experiment 20000269 PARAMETER Experiment Name: At_1mM_KNO3_L-vs-H_Roots_P Parameter: Plant Line Value: WS
  misc_feature: MA Experiment 20000269 PARAMETER Experiment Name: At_1mM_KNO3_L-vs-H_Roots_P Parameter: Timepoint (day) Value: 7,10,12
  misc_feature: MA Experiment 20000269 PARAMETER Experiment Name: At_1mM_KNO3_L-vs-H_Roots_P Parameter: Tissue Value: Roots
  misc_feature: MA Experiment 20000269 PARAMETER Experiment Name: At_1mM_KNO3_L-vs-H_Roots_P Parameter: Treatment Value: 1mM KNO3 vs. 50mM KNO3
  misc_feature: MA Experiment ID: 20000439 Result: Down-regulated in Transcription
  misc_feature: MA Experiment 20000439 PARAMETER Experiment Name: At_Roots__P Parameter: Age (day) Value: 14 vs. 21
  misc_feature: MA Experiment 20000439 PARAMETER Experiment Name: At_Roots__P Parameter: Organism Value: A. thaliana
  misc_feature: MA Experiment 20000439 PARAMETER Experiment Name: At_Roots__P Parameter: Tissue Value: Roots vs. Whole Plant
  misc_feature: MA Experiment ID: 20000794 Result: Down-regulated in Transcription
  misc_feature: MA Experiment 20000794 PARAMETER Experiment Name: At_Petals_P Parameter: Age (day) Value: 23-25 days
  misc_feature: MA Experiment 20000794 PARAMETER Experiment Name: At_Petals_P Parameter: Plant Line Value: WS
  misc_feature: MA Experiment 20000794 PARAMETER Experiment Name: At_Petals_P Parameter: Tissue Value: Petals vs. Whole plant
  misc_feature: MA Experiment ID: 20001557 Result: Down-regulated in Transcription
  misc_feature: MA Experiment 20001557 PARAMETER Experiment Name: At_Drought_Soil_Dry_P Parameter: Age (day) Value: 27
  misc_feature: MA Experiment 20001557 PARAMETER Experiment Name: At_Drought_Soil_Dry_P Parameter: Organism Value: A. thaliana
  misc_feature: MA Experiment 20001557 PARAMETER Experiment Name: At_Drought_Soil_Dry_P Parameter: Plant Line Value: WS
  misc_feature: MA Experiment 20001557 PARAMETER Experiment Name: At_Drought_Soil_Dry_P Parameter: Post Timepoint (hr) Value: 3
  misc_feature: MA Experiment 20001557 PARAMETER Experiment Name: At_Drought_Soil_Dry_P Parameter: Post-Treatment Value: Re-Water vs. No Drought
  misc_feature: MA Experiment 20001557 PARAMETER Experiment Name: At_Drought_Soil_Dry_P Parameter: Timepoint (day) Value: 13
  misc_feature: MA Experiment 20001557 PARAMETER Experiment Name: At_Drought_Soil_Dry_P Parameter: Treatment Value: Drought vs. No Drought
  misc_feature: MA Experiment ID: 20001757 Result: Up-regulated in Transcription
  misc_feature: MA Experiment 20001757 PARAMETER Experiment Name: At_50mM_NH4NO3_L-to-H_P Parameter: Timepoint (hr) Value: 6
  misc_feature: MA Experiment 20001757 PARAMETER Experiment Name: At_50mM_NH4NO3_L-to-H_P Parameter: Tissue Value: Leaf
  misc_feature: MA Experiment 20001757 PARAMETER Experiment Name: At_50mM_NH4NO3_L-to-H_P Parameter: Treatment Value: 50mM NH4NO3 vs 100mM Mannitol
  misc_feature: MA Experiment ID: 20001904 Result: Down-regulated in Transcription
  misc_feature: MA Experiment 20001904 PARAMETER Experiment Name: At_Drought_Reproduction_P Parameter: Age (day) Value: 37
  misc_feature: MA Experiment 20001904 PARAMETER Experiment Name: At_Drought_Reproduction_P Parameter: Organism Value: A. thaliana
  misc_feature: MA Experiment 20001904 PARAMETER Experiment Name: At_Drought_Reproduction_P Parameter: Plant Line Value: WS
  misc_feature: MA Experiment 20001904 PARAMETER Experiment Name: At_Drought_Reproduction_P Parameter: Timepoint (day) Value: 7
  misc_feature: MA Experiment 20001904 PARAMETER Experiment Name: At_Drought_Reproduction_P Parameter: Tissue Value: Rosettes
  misc_feature: MA Experiment 20001904 PARAMETER Experiment Name: At_Drought_Reproduction_P Parameter: Treatment Value: Drought vs. No Drought
  misc_feature: MA Experiment ID: 20001906 Result: Down-regulated in Transcription
  misc_feature: MA Experiment 20001906 PARAMETER Experiment Name: At_Drought_Reproduction_P Parameter: Age (day) Value: 35
  misc_feature: MA Experiment 20001906 PARAMETER Experiment Name: At_Drought_Reproduction_P Parameter: Organism Value: A. thaliana
  misc_feature: MA Experiment 20001906 PARAMETER Experiment Name: At_Drought_Reproduction_P Parameter: Plant Line Value: WS
  misc_feature: MA Experiment 20001906 PARAMETER Experiment Name: At_Drought_Reproduction_P Parameter: Timepoint (day) Value: 5
  misc_feature: MA Experiment 20001906 PARAMETER Experiment Name: At_Drought_Reproduction_P Parameter: Tissue Value: Siliques
  misc_feature: MA Experiment 20001906 PARAMETER Experiment Name: At_Drought_Reproduction_P Parameter: Treatment Value: Drought vs. No Drought

SEQ ID NO: 31854 - protein, 279 aa, Arabidopsis thaliana; identical to SEQ ID NO: 28264
  peptide (1)..(279): Ceres Seq. ID no. 12332734
  misc_feature (77)..(279): Pfam Name: PsbP Pfam Description: PsbP
  misc_feature (18)..(279): Homolog of NCBI NO: 266856 NR Description: Oxygen-evolving enhancer protein 2, chloroplast (OEE2) (23 kDa subunit of oxygen evolving system of photosystem
  misc_feature (17)..(279): Homolog of NCBI NO: 417604 NR Description: 23 kDa polypeptide of water-oxidizing complex of
  misc_feature (24)..(279): Homolog of NCBI NO: 19898 NR Description: photosystem II 23 kDa polypeptide [Nicotiana
  misc_feature (22)..(279): Homolog of NCBI NO: 1345550 NR Description: 23-kDa ploypeptide of photosystem II
  misc_feature (17)..(279): Homolog of NCBI NO: 7443216 NR Description: photosystem II oxygen-evolving complex protein 2
  misc_feature (17)..(279): Homolog of NCBI NO: 15224572 NR Description: photosystem II oxygen-evolving complex 23 (OEC23)
  misc_feature (29)..(279): Homolog of NCBI NO: 81723 NR Description: photosystem II oxygen-evolving complex protein 2
  misc_feature (17)..(279): Homolog of NCBI NO: 11133887 NR Description: OXYGEN-EVOLVING ENHANCER PROTEIN 2-2, CHLOROPLAST (OEE2) (23 KDA SUBUNIT OF OXYGEN EVOLVING SYSTEM OF PHOTOSYSTEM
  misc_feature (17)..(279): Homolog of NCBI NO: 131391 NR Description: Oxygen-evolving enhancer protein 2, chloroplast (OEE2) (23 kDa subunit of oxygen evolving system of photosystem
  misc_feature (17)..(279): Homolog of NCBI NO: 15222166 NR Description: photosystem II oxygen-evolving complex 23 (OEC23)

SEQ ID NO: 31855 - protein, 263 aa, Arabidopsis thaliana; identical to SEQ ID NO: 28265
  peptide (1)..(263): Ceres Seq. ID no. 12332735
  misc_feature (61)..(263): Pfam Name: PsbP Pfam Description: PsbP
  misc_feature (2)..(263): Homolog of NCBI NO: 266856 NR Description: Oxygen-evolving enhancer protein 2, chloroplast (OEE2) (23 kDa subunit of oxygen evolving system of photosystem
  misc_feature (1)..(263): Homolog of NCBI NO: 417604 NR Description: 23 kDa polypeptide of water-oxidizing complex of
  misc_feature (8)..(263): Homolog of NCBI NO: 19898 NR Description: photosystem II 23 kDa polypeptide [Nicotiana
  misc_feature (6)..(263): Homolog of NCBI NO: 1345550 NR Description: 23-kDa ploypeptide of photosystem II
  misc_feature (1)..(263): Homolog of NCBI NO: 7443216 NR Description: photosystem II oxygen-evolving complex protein 2
  misc_feature (1)..(263): Homolog of NCBI NO: 15224572 NR Description: photosystem II oxygen-evolving complex 23 (OEC23)
  misc_feature (13)..(263): Homolog of NCBI NO: 81723 NR Description: photosystem II oxygen-evolving complex protein 2
  misc_feature (1)..(263): Homolog of NCBI NO: 11133887 NR Description: OXYGEN-EVOLVING ENHANCER PROTEIN 2-2, CHLOROPLAST (OEE2) (23 KDA SUBUNIT OF OXYGEN EVOLVING SYSTEM OF PHOTOSYSTEM
  misc_feature (1)..(263): Homolog of NCBI NO: 131391 NR Description: Oxygen-evolving enhancer protein 2, chloroplast (OEE2) (23 kDa subunit of oxygen evolving system of photosystem
  misc_feature (1)..(263): Homolog of NCBI NO: 15222166 NR Description: photosystem II oxygen-evolving complex 23 (OEC23)

SEQ ID NO: 31856 - DNA, 2203 bp, Arabidopsis thaliana; identical to SEQ ID NO: 28266
  misc_feature (1)..(2203): Ceres Seq. ID no. 12325555
  misc_feature: MA Experiment ID: 108462 Result: Down-regulated in Transcription
  misc_feature: MA Experiment 108462 PARAMETER Experiment Name: At_Germinating_Seeds_cDNA_P Parameter: Age (day) Value: 2 vs. 0
  misc_feature: MA Experiment 108462 PARAMETER Experiment Name: At_Germinating_Seeds_cDNA_P Parameter: Tissue Value: Germinating Seeds
  misc_feature: MA Experiment ID: 108463 Result: Down-regulated in Transcription
  misc_feature: MA Experiment 108463 PARAMETER Experiment Name: At_Germinating_Seeds_cDNA_P Parameter: Age (day) Value: 3 vs. 0
  misc_feature: MA Experiment 108463 PARAMETER Experiment Name: At_Germinating_Seeds_cDNA_P Parameter: Tissue Value: Germinating Seeds
  misc_feature: MA Experiment ID: 108464 Result: Down-regulated in Transcription
  misc_feature: MA Experiment 108464 PARAMETER Experiment Name: At_Germinating_Seeds_cDNA_P Parameter: Age (day) Value: 4 vs. 0
  misc_feature: MA Experiment 108464 PARAMETER Experiment Name: At_Germinating_Seeds_cDNA_P Parameter: Tissue Value: Germinating Seeds
  misc_feature: MA Experiment ID: 20001557 Result: Up-regulated in Transcription
  misc_feature: MA Experiment 20001557 PARAMETER Experiment Name: At_Drought_Soil_Dry_P Parameter: Age (day) Value: 27
  misc_feature: MA Experiment 20001557 PARAMETER Experiment Name: At_Drought_Soil_Dry_P Parameter: Organism Value: A. thaliana
  misc_feature: MA Experiment 20001557 PARAMETER Experiment Name: At_Drought_Soil_Dry_P Parameter: Plant Line Value: WS
  misc_feature: MA Experiment 20001557 PARAMETER Experiment Name: At_Drought_Soil_Dry_P Parameter: Post Timepoint (hr) Value: 3
  misc_feature: MA Experiment 20001557 PARAMETER Experiment Name: At_Drought_Soil_Dry_P Parameter: Post-Treatment Value: Re-Water vs. No Drought
  misc_feature: MA Experiment 20001557 PARAMETER Experiment Name: At_Drought_Soil_Dry_P Parameter: Timepoint (day) Value: 13
  misc_feature: MA Experiment 20001557 PARAMETER Experiment Name: At_Drought_Soil_Dry_P Parameter: Treatment Value: Drought vs. No Drought

SEQ ID NO: 31857 - protein, 532 aa, Arabidopsis thaliana; identical to SEQ ID NO: 28267
  peptide (1)..(532): Ceres Seq. ID no. 12325556
  misc_feature (12)..(531): Homolog of NCBI NO: 30421147 NR Description: importin alpha [Toxoplasma gondii]
  misc_feature (1)..(531): Homolog of NCBI NO: 6682927 NR Description: importin alpha 1b [Oryza sativa (japonica
  misc_feature (1)..(532): Homolog of NCBI NO: 3915737 NR Description: Importin alpha subunit (Karyopherin alpha
  misc_feature (1)..(531): Homolog of NCBI NO: 13752562 NR Description: importin alpha 2 [Capsicum annuum]
  misc_feature (1)..(531): Homolog of NCBI NO: 25314870 NR Description: probable nuclear transport factor importin alpha
  misc_feature (1)..(531): Homolog of NCBI NO: 13605661 NR Description: AT3g06720/F3E22_14 [Arabidopsis thaliana]
  misc_feature (1)..(532): Homolog of NCBI NO: 13699777 NR Description: AtKAP alpha [Arabidopsis thaliana]
  misc_feature (1)..(532): Homolog of NCBI NO: 25314876 NR Description: probable nuclear transport factor importin
  misc_feature (1)..(532): Homolog of NCBI NO: 15809794 NR Description: AT3g06720/F3E22_14 [Arabidopsis thaliana]
  misc_feature (1)..(532): Homolog of NCBI NO: 15230778 NR Description: importin alpha

SEQ ID NO: 31858 - protein, 500 aa, Arabidopsis thaliana; identical to SEQ ID NO: 28268
  peptide (1)..(500): Ceres Seq. ID no. 12325557
  misc_feature (1)..(499): Homolog of NCBI NO: 30421147 NR Description: importin alpha [Toxoplasma gondii]
  misc_feature (1)..(499): Homolog of NCBI NO: 6682927 NR Description: importin alpha 1b [Oryza sativa (japonica
  misc_feature (1)..(500): Homolog of NCBI NO: 3915737 NR Description: Importin alpha subunit (Karyopherin alpha
  misc_feature (1)..(499): Homolog of NCBI NO: 13752562 NR Description: importin alpha 2 [Capsicum annuum]
  misc_feature (1)..(499): Homolog of NCBI NO: 25314870 NR Description: probable nuclear transport factor importin alpha
  misc_feature (1)..(499): Homolog of NCBI NO: 13605661 NR Description: AT3g06720/F3E22_14 [Arabidopsis thaliana]
  misc_feature (1)..(500): Homolog of NCBI NO: 13699777 NR Description: AtKAP alpha [Arabidopsis thaliana]
  misc_feature (1)..(500): Homolog of NCBI NO: 25314876 NR Description: probable nuclear transport factor importin
  misc_feature (1)..(500): Homolog of NCBI NO: 15809794 NR Description: AT3g06720/F3E22_14 [Arabidopsis thaliana]
  misc_feature (1)..(500): Homolog of NCBI NO: 15230778 NR Description: importin alpha

SEQ ID NO: 31859 - protein, 487 aa, Arabidopsis thaliana; identical to SEQ ID NO: 28269
  peptide (1)..(487): Ceres Seq. ID no. 12325558
  misc_feature (1)..(486): Homolog of NCBI NO: 30421147 NR Description: importin alpha [Toxoplasma gondii]
  misc_feature (1)..(486): Homolog of NCBI NO: 6682927 NR Description: importin alpha 1b [Oryza sativa (japonica
  misc_feature (1)..(487): Homolog of NCBI NO: 3915737 NR Description: Importin alpha subunit (Karyopherin alpha
  misc_feature (1)..(486): Homolog of NCBI NO: 13752562 NR Description: importin alpha 2 [Capsicum annuum]
  misc_feature (1)..(486): Homolog of NCBI NO: 25314870 NR Description: probable nuclear transport factor importin alpha
  misc_feature (1)..(486): Homolog of NCBI NO: 13605661 NR Description: AT3g06720/F3E22_14 [Arabidopsis thaliana]
  misc_feature (1)..(487): Homolog of NCBI NO: 13699777 NR Description: AtKAP alpha [Arabidopsis thaliana]
  misc_feature (1)..(487): Homolog of NCBI NO: 25314876 NR Description: probable nuclear transport factor importin
  misc_feature (1)..(487): Homolog of NCBI NO: 15809794 NR Description: AT3g06720/F3E22_14 [Arabidopsis thaliana]
  misc_feature (1)..(487): Homolog of NCBI NO: 15230778 NR Description: importin alpha

SEQ ID NO: 31860 - DNA, 914 bp, Arabidopsis thaliana; identical to SEQ ID NO: 28270
  misc_feature (1)..(914): Ceres Seq. ID no. 12321613
  misc_feature: MA Experiment ID: 108461 Result: Up-regulated in Transcription
  misc_feature: MA Experiment 108461 PARAMETER Experiment Name: At_Germinating_Seeds_cDNA_P Parameter: Age (day) Value: 1 vs. 0
  misc_feature: MA Experiment 108461 PARAMETER Experiment Name: At_Germinating_Seeds_cDNA_P Parameter: Tissue Value: Germinating Seeds
  misc_feature: MA Experiment ID: 108462 Result: Up-regulated in Transcription
  misc_feature: MA Experiment 108462 PARAMETER Experiment Name: At_Germinating_Seeds_cDNA_P Parameter: Age (day) Value: 2 vs. 0
  misc_feature: MA Experiment 108462 PARAMETER Experiment Name: At_Germinating_Seeds_cDNA_P Parameter: Tissue Value: Germinating Seeds
  misc_feature: MA Experiment ID: 108576 Result: Down-regulated in Transcription
  misc_feature: MA Experiment 108576 PARAMETER Experiment Name: At_42deg_Heat_cDNA_P Parameter: Temperature (deg C) Value: 42 vs. 22
  misc_feature: MA Experiment 108576 PARAMETER Experiment Name: At_42deg_Heat_cDNA_P Parameter: Timepoint (hr) Value: 1
  misc_feature: MA Experiment 108576 PARAMETER Experiment Name: At_42deg_Heat_cDNA_P Parameter: Tissue Value: Aerial
  misc_feature: MA Experiment ID: 108579 Result: Down-regulated in Transcription
  misc_feature: MA Experiment 108579 PARAMETER Experiment Name: At_4deg_Cold_cDNA_P Parameter: Temperature (deg C) Value: 4 vs. 22
  misc_feature: MA Experiment 108579 PARAMETER Experiment Name: At_4deg_Cold_cDNA_P Parameter: Timepoint (hr) Value: 6
  misc_feature: MA Experiment 108579 PARAMETER Experiment Name: At_4deg_Cold_cDNA_P Parameter: Tissue Value: Aerial
  misc_feature: MA Experiment ID: 108585 Result: Up-regulated in Transcription
  misc_feature: MA Experiment 108585 PARAMETER Experiment Name: At_5mM_NaNP_cDNA_P Parameter: Timepoint (hr) Value: 6
  misc_feature: MA Experiment 108585 PARAMETER Experiment Name: At_5mM_NaNP_cDNA_P Parameter: Tissue Value: Aerial
  misc_feature: MA Experiment 108585 PARAMETER Experiment Name: At_5mM_NaNP_cDNA_P Parameter: Treatment Value: null
  misc_feature: MA Experiment ID: 20000113 Result: Down-regulated in Transcription
  misc_feature: MA Experiment 20000113 PARAMETER Experiment Name: At_42deg_Heat_cDNA_P Parameter: Temperature (deg C) Value: 42 vs. 22
  misc_feature: MA Experiment 20000113 PARAMETER Experiment Name: At_42deg_Heat_cDNA_P Parameter: Timepoint (hr) Value: 8
  misc_feature: MA Experiment 20000113 PARAMETER Experiment Name: At_42deg_Heat_cDNA_P Parameter: Tissue Value: Aerial
  misc_feature: MA Experiment ID: 20000180 Result: Up-regulated in Transcription
  misc_feature: MA Experiment 20000180 PARAMETER Experiment Name: At_Germinating_Seeds_P Parameter: Age (hr) Value: 24 vs. 0
  misc_feature: MA Experiment 20000180 PARAMETER Experiment Name: At_Germinating_Seeds_P Parameter: Tissue Value: Germinating Seeds
  misc_feature: MA Experiment ID: 20000224 Result: Down-regulated in Transcription

SEQ ID NO: 31861 - protein, 255 aa, Arabidopsis thaliana; identical to SEQ ID NO: 28271
  peptide (1)..(255): Ceres Seq. ID no. 12321614
  misc_feature (117)..(252): Homolog of NCBI NO: 34912942 NR Description: OSJNBb0035I14.10 [Oryza sativa (japonica
  misc_feature (56)..(247): Homolog of NCBI NO: 34904544 NR Description: B1066G12.17 [Oryza sativa (japonica
  misc_feature (59)..(246): Homolog of NCBI NO: 18397368 NR Description: bHLH protein; protein id: At3g05800.1, supported
  misc_feature (193)..(254): Homolog of NCBI NO: 34898122 NR Description: bHLH protein-like [Oryza sativa (japonica
  misc_feature (59)..(185): Homolog of NCBI NO: 34898122 NR Description: bHLH protein-like [Oryza sativa (japonica
  misc_feature (38)..(252): Homolog of NCBI NO: 18390998 NR Description: bHLH protein; protein id: At1g09250.1, supported
  misc_feature (42)..(254): Homolog of NCBI NO: 18401374 NR Description: bHLH protein
  misc_feature (35)..(255): Homolog of NCBI NO: 21618012 NR Description: unknown [Arabidopsis thaliana]
  misc_feature (35)..(255): Homolog of NCBI NO: 18397627 NR Description: bHLH protein

SEQ ID NO: 31862 - protein, 221 aa, Arabidopsis thaliana; identical to SEQ ID NO: 28272
  peptide (1)..(221): Ceres Seq. ID no. 12321615
  misc_feature (83)..(218): Homolog of NCBI NO: 34912942 NR Description: OSJNBb0035I14.10 [Oryza sativa (japonica
  misc_feature (22)..(213): Homolog of NCBI NO: 34904544 NR Description: B1066G12.17 [Oryza sativa (japonica
  misc_feature (25)..(212): Homolog of NCBI NO: 18397368 NR Description: bHLH protein; protein id: At3g05800.1, supported
  misc_feature (159)..(220): Homolog of NCBI NO: 34898122 NR Description: bHLH protein-like [Oryza sativa (japonica
  misc_feature (25)..(151): Homolog of NCBI NO: 34898122 NR Description: bHLH protein-like [Oryza sativa (japonica
  misc_feature (4)..(218): Homolog of NCBI NO: 18390998 NR Description: bHLH protein; protein id: At1g09250.1, supported
  misc_feature (8)..(220): Homolog of NCBI NO: 18401374 NR Description: bHLH protein
  misc_feature (1)..(221): Homolog of NCBI NO: 21618012 NR Description: unknown [Arabidopsis thaliana]
  misc_feature (1)..(221): Homolog of NCBI NO: 18397627 NR Description: bHLH protein

SEQ ID NO: 31863 - DNA, 616 bp, Arabidopsis thaliana; identical to SEQ ID NO: 28273
  misc_feature (1)..(616): Ceres Seq. ID no. 12322085
  misc_feature: MA Experiment ID: 108434 Result: Down-regulated in Transcription
  misc_feature: MA Experiment 108434 PARAMETER Experiment Name: At_Root_Tips_cDNA_P Parameter: Tissue Value: Root Tips
  misc_feature: MA Experiment ID: 108435 Result: Down-regulated in Transcription
  misc_feature: MA Experiment 108435 PARAMETER Experiment Name: At_stm_Mutants_cDNA_P Parameter: Plant Line Value: wt Landsburg vs stm
  misc_feature: MA Experiment 108435 PARAMETER Experiment Name: At_stm_Mutants_cDNA_P Parameter: Tissue Value: Shoot Apical Meristem Region
  misc_feature: MA Experiment ID: 108461 Result: Up-regulated in Transcription
  misc_feature: MA Experiment 108461 PARAMETER Experiment Name: At_Germinating_Seeds_cDNA_P Parameter: Age (day) Value: 1 vs. 0
  misc_feature: MA Experiment 108461 PARAMETER Experiment Name: At_Germinating_Seeds_cDNA_P Parameter: Tissue Value: Germinating Seeds
  misc_feature: MA Experiment ID: 108488 Result: Down-regulated in Transcription
  misc_feature: MA Experiment ID: 108561 Result: Up-regulated in Transcription
  misc_feature: MA Experiment 108561 PARAMETER Experiment Name: At_100uM_ABA_cDNA_P Parameter: Timepoint (hr) Value: 6
  misc_feature: MA Experiment 108561 PARAMETER Experiment Name: At_100uM_ABA_cDNA_P Parameter: Tissue Value: Aerial
  misc_feature: MA Experiment 108561 PARAMETER Experiment Name: At_100uM_ABA_cDNA_P Parameter: Treatment Value: 100uM ABA vs. No Treatment
  misc_feature: MA Experiment ID: 108576 Result: Up-regulated in Transcription
  misc_feature: MA Experiment 108576 PARAMETER Experiment Name: At_42deg_Heat_cDNA_P Parameter: Temperature (deg C) Value: 42 vs. 22
  misc_feature: MA Experiment 108576 PARAMETER Experiment Name: At_42deg_Heat_cDNA_P Parameter: Timepoint (hr) Value: 1
  misc_feature: MA Experiment 108576 PARAMETER Experiment Name: At_42deg_Heat_cDNA_P Parameter: Tissue Value: Aerial
  misc_feature: MA Experiment ID: 108579 Result: Up-regulated in Transcription
  misc_feature: MA Experiment 108579 PARAMETER Experiment Name: At_4deg_Cold_cDNA_P Parameter: Temperature (deg C) Value: 4 vs. 22
  misc_feature: MA Experiment 108579 PARAMETER Experiment Name: At_4deg_Cold_cDNA_P Parameter: Timepoint (hr) Value: 6
  misc_feature: MA Experiment 108579 PARAMETER Experiment Name: At_4deg_Cold_cDNA_P Parameter: Tissue Value: Aerial
  misc_feature: MA Experiment ID: 108595 Result: Down-regulated in Transcription
  misc_feature: MA Experiment 108595 PARAMETER Experiment Name: At_Ler-pi_Ovule_cDNA_P Parameter: Plant Line Value: null
  misc_feature: MA Experiment ID: 108608 Result: Up-regulated in Transcription
  misc_feature: MA Experiment 108608 PARAMETER Experiment Name: At_100uM_ABA_cDNA_P Parameter: Timepoint (hr) Value: 1
  misc_feature: MA Experiment 108608 PARAMETER Experiment Name: At_100uM_ABA_cDNA_P Parameter: Tissue Value: Aerial
  misc_feature: MA Experiment 108608 PARAMETER Experiment Name: At_100uM_ABA_cDNA_P Parameter: Treatment Value: 100uM ABA vs. No Treatment
  misc_feature: MA Experiment ID: 108668 Result: Down-regulated in Transcription
  misc_feature: MA Experiment 108668 PARAMETER Experiment Name: At_2mM_SA_cDNA_P Parameter: Plant Line Value: WS
  misc_feature: MA Experiment 108668 PARAMETER Experiment Name: At_2mM_SA_cDNA_P Parameter: Timepoint (hr) Value: 6
  misc_feature: MA Experiment 108668 PARAMETER Experiment Name: At_2mM_SA_cDNA_P Parameter: Treatment Value: 2mM SA vs. No Treatment
  misc_feature: MA Experiment ID: 20000069 Result: Up-regulated in Transcription
  misc_feature: MA Experiment 20000069 PARAMETER Experiment Name: At_100uM_ABA_Mutants_cDNA_P Parameter: Plant Line Value: CS23
  misc_feature: MA Experiment 20000069 PARAMETER Experiment Name: At_100uM_ABA_Mutants_cDNA_P Parameter: Timepoint (hr) Value: 6
  misc_feature: MA Experiment 20000069 PARAMETER Experiment Name: At_100uM_ABA_Mutants_cDNA_P Parameter: Tissue Value: Aerial
  misc_feature: MA Experiment 20000069 PARAMETER Experiment Name: At_100uM_ABA_Mutants_cDNA_P Parameter: Treatment Value: 100uM ABA vs. No Treatment
  misc_feature: MA Experiment ID: 20000071 Result: Up-regulated in Transcription
  misc_feature: MA Experiment 20000071 PARAMETER Experiment Name: At_100uM_ABA_Mutants_cDNA_P Parameter: Plant Line Value: CS8104
  misc_feature: MA Experiment 20000071 PARAMETER Experiment Name: At_100uM_ABA_Mutants_cDNA_P Parameter: Timepoint (hr) Value: 6
  misc_feature: MA Experiment 20000071 PARAMETER Experiment Name: At_100uM_ABA_Mutants_cDNA_P Parameter: Tissue Value: Aerial
  misc_feature: MA Experiment 20000071 PARAMETER Experiment Name: At_100uM_ABA_Mutants_cDNA_P Parameter: Treatment Value: 100uM ABA vs. No Treatment
  misc_feature: MA Experiment ID: 20000087 Result: Up-regulated in Transcription
  misc_feature: MA Experiment 20000087 PARAMETER Experiment Name: At_100uM_ABA_Mutants_cDNA_P Parameter: Plant Line Value: WS
  misc_feature: MA Experiment 20000087 PARAMETER Experiment Name: At_100uM_ABA_Mutants_cDNA_P Parameter: Timepoint (hr) Value: 6
  misc_feature: MA Experiment 20000087 PARAMETER Experiment Name: At_100uM_ABA_Mutants_cDNA_P Parameter: Tissue Value: Aerial
  misc_feature: MA Experiment 20000087 PARAMETER Experiment Name: At_100uM_ABA_Mutants_cDNA_P Parameter: Treatment Value: 100uM ABA vs. No Treatment
  misc_feature: MA Experiment ID: 20000088 Result: Up-regulated in Transcription
  misc_feature: MA Experiment 20000088 PARAMETER Experiment Name: At_100uM_ABA_Mutants_cDNA_P Parameter: Plant Line Value: Landsberg
  misc_feature: MA Experiment 20000088 PARAMETER Experiment Name: At_100uM_ABA_Mutants_cDNA_P Parameter: Timepoint (hr) Value: 6
  misc_feature: MA Experiment 20000088 PARAMETER Experiment Name: At_100uM_ABA_Mutants_cDNA_P Parameter: Tissue Value: Aerial
  misc_feature: MA Experiment 20000088 PARAMETER Experiment Name: At_100uM_ABA_Mutants_cDNA_P Parameter: Treatment Value: 100uM ABA vs. No Treatment
  misc_feature: MA Experiment ID: 20000090 Result: Up-regulated in Transcription
  misc_feature: MA Experiment ID: 20000112 Result: Up-regulated in Transcription
  misc_feature: MA Experiment 20000112 PARAMETER Experiment Name: At_42deg_Heat_cDNA_P Parameter: Temperature (deg C) Value: 42 vs. 22
  misc_feature: MA Experiment 20000112 PARAMETER Experiment Name: At_42deg_Heat_cDNA_P Parameter: Timepoint (hr) Value: 2
  misc_feature: MA Experiment 20000112 PARAMETER Experiment Name: At_42deg_Heat_cDNA_P Parameter: Tissue Value: Aerial
  misc_feature: MA Experiment ID: 20000117 Result: Up-regulated in Transcription
  misc_feature: MA Experiment 20000117 PARAMETER Experiment Name: At_100uM_ABA_Mutants_cDNA_P Parameter: Plant Line Value: Columbia
  misc_feature: MA Experiment 20000117 PARAMETER Experiment Name: At_100uM_ABA_Mutants_cDNA_P Parameter: Timepoint (hr) Value: 6
  misc_feature: MA Experiment 20000117 PARAMETER Experiment Name: At_100uM_ABA_Mutants_cDNA_P Parameter: Tissue Value: Aerial
  misc_feature: MA Experiment 20000117 PARAMETER Experiment Name: At_100uM_ABA_Mutants_cDNA_P Parameter: Treatment Value: 100uM ABA vs. No Treatment
  misc_feature: MA Experiment ID: 20000173 Result: Down-regulated in Transcription
  misc_feature: MA Experiment 20000173 PARAMETER Experiment Name: At_42deg_Heat_P Parameter: Age (day) Value: 14
  misc_feature: MA Experiment 20000173 PARAMETER Experiment Name: At_42deg_Heat_P Parameter: Organism Value: A. thaliana
  misc_feature: MA Experiment 20000173 PARAMETER Experiment Name: At_42deg_Heat_P Parameter: Plant Line Value: WS
  misc_feature: MA Experiment 20000173 PARAMETER Experiment Name: At_42deg_Heat_P Parameter: Temperature (deg C) Value: 42 vs. 22
  misc_feature: MA Experiment 20000173 PARAMETER Experiment Name: At_42deg_Heat_P Parameter: Timepoint (hr) Value: 6
  misc_feature: MA Experiment 20000173 PARAMETER Experiment Name: At_42deg_Heat_P Parameter: Tissue Value: Aerial
  misc_feature: MA Experiment ID: 20000179 Result: Up-regulated in Transcription
  misc_feature: MA Experiment 20000179 PARAMETER Experiment Name: At_Germinating_Seeds_P Parameter: Age (hr) Value: 6 vs. 0
  misc_feature: MA Experiment 20000179 PARAMETER Experiment Name: At_Germinating_Seeds_P Parameter: Tissue Value: Germinating Seeds
  misc_feature: MA Experiment ID: 20000184 Result: Down-regulated in Transcription
  misc_feature: MA Experiment 20000184 PARAMETER Experiment Name: At_Shoots__P Parameter: Age (day) Value: 7
  misc_feature: MA Experiment 20000184 PARAMETER Experiment Name: At_Shoots__P Parameter: Tissue Value: Shoots vs. Whole Plant
  misc_feature: MA Experiment ID: 20000185 Result: Down-regulated in Transcription
  misc_feature: MA Experiment 20000185 PARAMETER Experiment Name: At_Roots__P Parameter: Age (day) Value: 7 vs. 21
  misc_feature: MA Experiment 20000185 PARAMETER Experiment Name: At_Roots__P Parameter: Organism Value: A. thaliana
  misc_feature: MA Experiment 20000185 PARAMETER Experiment Name: At_Roots__P Parameter: Tissue Value: Roots vs. Whole Plant
  misc_feature: MA Experiment ID: 20000214 Result: Up-regulated in Transcription
  misc_feature: MA Experiment 20000214 PARAMETER Experiment Name: At_4deg_Cold_P Parameter: Timepoint (hr) Value: 6
  misc_feature: MA Experiment ID: 20000234 Result: Down-regulated in Transcription
  misc_feature: MA Experiment 20000234 PARAMETER Experiment Name: At_Siliques_P Parameter: Age (day) Value: 21
  misc_feature: MA Experiment 20000234 PARAMETER Experiment Name: At_Siliques_P Parameter: Organism Value: A. thaliana
  misc_feature: MA Experiment 20000234 PARAMETER Experiment Name: At_Siliques_P Parameter: Plant Line Value: WS
  misc_feature: MA Experiment 20000234 PARAMETER Experiment Name: At_Siliques_P Parameter: Tissue Value: Less Than 5mm Siliques vs. Whole Plant
  misc_feature: MA Experiment ID: 20000235 Result: Down-regulated in Transcription
  misc_feature: MA Experiment 20000235 PARAMETER Experiment Name: At_Siliques_P Parameter: Age (day) Value: 21
  misc_feature: MA Experiment 20000235 PARAMETER Experiment Name: At_Siliques_P Parameter: Organism Value: A. thaliana
  misc_feature: MA Experiment 20000235 PARAMETER Experiment Name: At_Siliques_P Parameter: Plant Line Value: WS
  misc_feature: MA Experiment 20000235 PARAMETER Experiment Name: At_Siliques_P Parameter: Tissue Value: 5-10mm Siliques vs. Whole Plant
  misc_feature: MA Experiment ID: 20000437 Result: Up-regulated in Transcription
  misc_feature: MA Experiment 20000437 PARAMETER Experiment Name: At_Drought_P Parameter: Age (day) Value: 8
  misc_feature: MA Experiment 20000437 PARAMETER Experiment Name: At_Drought_P Parameter: Organism Value: A. thaliana
  misc_feature: MA Experiment 20000437 PARAMETER Experiment Name: At_Drought_P Parameter: Plant Line Value: WS
  misc_feature: MA Experiment 20000437 PARAMETER Experiment Name: At_Drought_P Parameter: Timepoint (hr) Value: 24
  misc_feature: MA Experiment 20000437 PARAMETER Experiment Name: At_Drought_P Parameter: Tissue Value: Whole Plant
  misc_feature: MA Experiment 20000437 PARAMETER Experiment Name: At_Drought_P Parameter: Treatment Value: Drought vs. No Drought
  misc_feature: MA Experiment ID: 20000438 Result: Down-regulated in Transcription
  misc_feature: MA Experiment 20000438 PARAMETER Experiment Name: At_Shoots__P Parameter: Age (day) Value: 14
  misc_feature: MA Experiment 20000438 PARAMETER Experiment Name: At_Shoots__P Parameter: Tissue Value: Shoots vs. Whole Plant
  misc_feature: MA Experiment ID: 20000439 Result: Down-regulated in Transcription
  misc_feature: MA Experiment 20000439 PARAMETER Experiment Name: At_Roots__P Parameter: Age (day) Value: 14 vs. 21
  misc_feature: MA Experiment 20000439 PARAMETER Experiment Name: At_Roots__P Parameter: Organism Value: A. thaliana
  misc_feature: MA Experiment 20000439 PARAMETER Experiment Name: At_Roots__P Parameter: Tissue Value: Roots vs. Whole Plant
  misc_feature: MA Experiment ID: 20000441 Result: Down-regulated in Transcription
  misc_feature: MA Experiment 20000441 PARAMETER Experiment Name: At_1uM_BR-BRZ__P Parameter: Tissue Value: Shoot Apices
  misc_feature: MA Experiment 20000441 PARAMETER Experiment Name: At_1uM_BR-BRZ__P Parameter: Treatment Value: 1uM BR vs. No Treatment
  misc_feature: MA Experiment ID: 20000443 Result: Down-regulated in Transcription
  misc_feature: MA Experiment 20000443 PARAMETER Experiment Name: At_1uM_BR-BRZ__P Parameter: Tissue Value: Shoot Apices
  misc_feature: MA Experiment 20000443 PARAMETER Experiment Name: At_1uM_BR-BRZ__P Parameter: Treatment Value: 1uM BRZ vs. No Treatment
  misc_feature: MA Experiment ID: 20000495 Result: Down-regulated in Transcription
  misc_feature: MA Experiment 20000495 PARAMETER Experiment Name: At_Guard_Cells_P Parameter: Harvest Date Value: 8/2/2002
  misc_feature: MA Experiment 20000495 PARAMETER Experiment Name: At_Guard_Cells_P Parameter: Organism Value: A. thaliana
  misc_feature: MA Experiment 20000495 PARAMETER Experiment Name: At_Guard_Cells_P Parameter: Tissue Value: Guard Cells vs. Leaves
  misc_feature: MA Experiment ID: 20000496 Result: Down-regulated in Transcription
  misc_feature: MA Experiment 20000496 PARAMETER Experiment Name: At_Guard_Cells_P Parameter: Harvest Date Value: 7/19/2002
  misc_feature: MA Experiment 20000496 PARAMETER Experiment Name: At_Guard_Cells_P Parameter: Organism Value: Canola
  misc_feature: MA Experiment 20000496 PARAMETER Experiment Name: At_Guard_Cells_P Parameter: Tissue Value: Guard Cells vs. Leaves
  misc_feature: MA Experiment ID: 20000794 Result: Up-regulated in Transcription
  misc_feature: MA Experiment 20000794 PARAMETER Experiment Name: At_Petals_P Parameter: Age (day) Value: 23-25 days
  misc_feature: MA Experiment 20000794 PARAMETER Experiment Name: At_Petals_P Parameter: Plant Line Value: WS
  misc_feature: MA Experiment 20000794 PARAMETER Experiment Name: At_Petals_P Parameter: Tissue Value: Petals vs. Whole plant
  misc_feature: MA Experiment ID: 20001247 Result: Down-regulated in Transcription
  misc_feature: MA Experiment 20001247 PARAMETER Experiment Name: At_Far-red-induction_P Parameter: Age (day) Value: 7
  misc_feature: MA Experiment 20001247 PARAMETER Experiment Name: At_Far-red-induction_P Parameter: Light Value: Far-red vs. White
  misc_feature: MA Experiment 20001247 PARAMETER Experiment Name: At_Far-red-induction_P Parameter: Organism Value: A. thaliana
  misc_feature: MA Experiment 20001247 PARAMETER Experiment Name: At_Far-red-induction_P Parameter: Plant Line Value: Columbia
  misc_feature: MA Experiment 20001247 PARAMETER Experiment Name: At_Far-red-induction_P Parameter: Timepoint (hr) Value: 1
  misc_feature: MA Experiment 20001247 PARAMETER Experiment Name: At_Far-red-induction_P Parameter: Tissue Value: Whole Plant
  misc_feature: MA Experiment ID: 20001248 Result: Up-regulated in Transcription
  misc_feature: MA Experiment 20001248 PARAMETER Experiment Name: At_Far-red-induction_P Parameter: Age (day) Value: 7
  misc_feature: MA Experiment 20001248 PARAMETER Experiment Name: At_Far-red-induction_P Parameter: Light Value: Far-red vs. White
  misc_feature: MA Experiment 20001248 PARAMETER Experiment Name: At_Far-red-induction_P Parameter: Organism Value: A. thaliana
  misc_feature: MA Experiment 20001248 PARAMETER Experiment Name: At_Far-red-induction_P Parameter: Plant Line Value: Columbia
  misc_feature: MA Experiment 20001248 PARAMETER Experiment Name: At_Far-red-induction_P Parameter: Timepoint (hr) Value: 4
  misc_feature: MA Experiment 20001248 PARAMETER Experiment Name: At_Far-red-induction_P Parameter: Tissue Value: Whole Plant
  misc_feature: MA Experiment ID: 20001458 Result: Up-regulated in Transcription
  misc_feature: MA Experiment 20001458 PARAMETER Experiment Name: At_50mM_NH4NO3_L-to-H_P Parameter: Age (day) Value: Undefined
  misc_feature: MA Experiment 20001458 PARAMETER Experiment Name: At_50mM_NH4NO3_L-to-H_P Parameter: Organism Value: Undefined
  misc_feature: MA Experiment 20001458 PARAMETER Experiment Name: At_50mM_NH4NO3_L-to-H_P Parameter: Plant Line Value: Undefined
  misc_feature: MA Experiment 20001458 PARAMETER Experiment Name: At_50mM_NH4NO3_L-to-H_P Parameter: Timepoint (hr) Value: 2
  misc_feature: MA Experiment 20001458 PARAMETER Experiment Name: At_50mM_NH4NO3_L-to-H_P Parameter: Tissue Value: Siliques
  misc_feature: MA Experiment 20001458 PARAMETER Experiment Name: At_50mM_NH4NO3_L-to-H_P Parameter: Treatment Value: 50mM NH4NO3 vs. 100mM Manitol
  misc_feature: MA Experiment ID: 20001554 Result: Up-regulated in Transcription
  misc_feature: MA Experiment 20001554 PARAMETER Experiment Name: At_Drought_Soil_Dry_P Parameter: Age (day) Value: 21
  misc_feature: MA Experiment 20001554 PARAMETER Experiment Name: At_Drought_Soil_Dry_P Parameter: Organism Value: A. thaliana
  misc_feature: MA Experiment 20001554 PARAMETER Experiment Name: At_Drought_Soil_Dry_P Parameter: Plant Line Value: WS
  misc_feature: MA Experiment 20001554 PARAMETER Experiment Name: At_Drought_Soil_Dry_P Parameter: Post Timepoint (hr) Value: None
  misc_feature: MA Experiment 20001554 PARAMETER Experiment Name: At_Drought_Soil_Dry_P Parameter: Post-Treatment Value: None
  misc_feature: MA Experiment 20001554 PARAMETER Experiment Name: At_Drought_Soil_Dry_P Parameter: Timepoint (day) Value: 7
  misc_feature: MA Experiment 20001554 PARAMETER Experiment Name: At_Drought_Soil_Dry_P Parameter: Treatment Value: Drought vs. No Drought
  misc_feature: MA Experiment ID: 20001555 Result: Up-regulated in Transcription
  misc_feature: MA Experiment 20001555 PARAMETER Experiment Name: At_Drought_Soil_Dry_P Parameter: Age (day) Value: 24
  misc_feature: MA Experiment 20001555 PARAMETER Experiment Name: At_Drought_Soil_Dry_P Parameter: Organism Value: A. thaliana
  misc_feature: MA Experiment 20001555 PARAMETER Experiment Name: At_Drought_Soil_Dry_P Parameter: Plant Line Value: WS
  misc_feature: MA Experiment 20001555 PARAMETER Experiment Name: At_Drought_Soil_Dry_P Parameter: Post Timepoint (hr) Value: None
  misc_feature: MA Experiment 20001555 PARAMETER Experiment Name: At_Drought_Soil_Dry_P Parameter: Post-Treatment Value: None
  misc_feature: MA Experiment 20001555 PARAMETER Experiment Name: At_Drought_Soil_Dry_P Parameter: Timepoint (day) Value: 10
  misc_feature: MA Experiment 20001555 PARAMETER Experiment Name: At_Drought_Soil_Dry_P Parameter: Treatment Value: Drought vs. No Drought
  misc_feature: MA Experiment ID: 20001556 Result: Up-regulated in Transcription
  misc_feature: MA Experiment 20001556 PARAMETER Experiment Name: At_Drought_Soil_Dry_P Parameter: Age (day) Value: 26
  misc_feature: MA Experiment 20001556 PARAMETER Experiment Name: At_Drought_Soil_Dry_P Parameter: Organism Value: A. thaliana
  misc_feature: MA Experiment 20001556 PARAMETER Experiment Name: At_Drought_Soil_Dry_P Parameter: Plant Line Value: WS
  misc_feature: MA Experiment 20001556 PARAMETER Experiment Name: At_Drought_Soil_Dry_P Parameter: Post Timepoint (hr) Value: None
  misc_feature: MA Experiment 20001556 PARAMETER Experiment Name: At_Drought_Soil_Dry_P Parameter: Post-Treatment Value: None
  misc_feature: MA Experiment 20001556 PARAMETER Experiment Name: At_Drought_Soil_Dry_P Parameter: Timepoint (day) Value: 12
  misc_feature: MA Experiment 20001556 PARAMETER Experiment Name: At_Drought_Soil_Dry_P Parameter: Treatment Value: Drought vs. No Drought
  misc_feature: MA Experiment ID: 20001557 Result: Up-regulated in Transcription
  misc_feature: MA Experiment 20001557 PARAMETER Experiment Name: At_Drought_Soil_Dry_P Parameter: Age (day) Value: 27
  misc_feature: MA Experiment 20001557 PARAMETER Experiment Name: At_Drought_Soil_Dry_P Parameter: Organism Value: A. thaliana
  misc_feature: MA Experiment 20001557 PARAMETER Experiment Name: At_Drought_Soil_Dry_P Parameter: Plant Line Value: WS
  misc_feature: MA Experiment 20001557 PARAMETER Experiment Name: At_Drought_Soil_Dry_P Parameter: Post Timepoint (hr) Value: 3
  misc_feature: MA Experiment 20001557 PARAMETER Experiment Name: At_Drought_Soil_Dry_P Parameter: Post-Treatment Value: Re-Water vs. No Drought
  misc_feature: MA Experiment 20001557 PARAMETER Experiment Name: At_Drought_Soil_Dry_P Parameter: Timepoint (day) Value: 13
  misc_feature: MA Experiment 20001557 PARAMETER Experiment Name: At_Drought_Soil_Dry_P Parameter: Treatment Value: Drought vs. No Drought
  misc_feature: MA Experiment ID: 20001559 Result: Up-regulated in Transcription
  misc_feature: MA Experiment 20001559 PARAMETER Experiment Name: At_Drought_Soil_Dry_P Parameter: Age (day) Value: 28
  misc_feature: MA Experiment 20001559 PARAMETER Experiment Name: At_Drought_Soil_Dry_P Parameter: Organism Value: A. thaliana
  misc_feature: MA Experiment 20001559 PARAMETER Experiment Name: At_Drought_Soil_Dry_P Parameter: Plant Line Value: WS
  misc_feature: MA Experiment 20001559 PARAMETER Experiment Name: At_Drought_Soil_Dry_P Parameter: Post Timepoint (hr) Value: 29
  misc_feature: MA Experiment 20001559 PARAMETER Experiment Name: At_Drought_Soil_Dry_P Parameter: Post-Treatment Value: Re-Water vs. No Drought
  misc_feature: MA Experiment 20001559 PARAMETER Experiment Name: At_Drought_Soil_Dry_P Parameter: Timepoint (day) Value: 14
  misc_feature: MA Experiment 20001559 PARAMETER Experiment Name: At_Drought_Soil_Dry_P Parameter: Treatment Value: Drought vs. No Drought
  misc_feature: MA Experiment ID: 20001906 Result: Up-regulated in Transcription
  misc_feature: MA Experiment 20001906 PARAMETER Experiment Name: At_Drought_Reproduction_P Parameter: Age (day) Value: 35
  misc_feature: MA Experiment 20001906 PARAMETER Experiment Name: At_Drought_Reproduction_P Parameter: Organism Value: A. thaliana
  misc_feature: MA Experiment 20001906 PARAMETER Experiment Name: At_Drought_Reproduction_P Parameter: Plant Line Value: WS
  misc_feature: MA Experiment 20001906 PARAMETER Experiment Name: At_Drought_Reproduction_P Parameter: Timepoint (day) Value: 5
  misc_feature: MA Experiment 20001906 PARAMETER Experiment Name: At_Drought_Reproduction_P Parameter: Tissue Value: Siliques
  misc_feature: MA Experiment 20001906 PARAMETER Experiment Name: At_Drought_Reproduction_P Parameter: Treatment Value: Drought vs. No Drought
  misc_feature: MA Experiment ID: 20001908 Result: Up-regulated in Transcription
  misc_feature: MA Experiment 20001908 PARAMETER Experiment Name: At_Drought_Reproduction_P Parameter: Age (day) Value: 40
  misc_feature: MA Experiment 20001908 PARAMETER Experiment Name: At_Drought_Reproduction_P Parameter: Organism Value: A. thaliana
  misc_feature: MA Experiment 20001908 PARAMETER Experiment Name: At_Drought_Reproduction_P Parameter: Plant Line Value: WS
  misc_feature: MA Experiment 20001908 PARAMETER Experiment Name: At_Drought_Reproduction_P Parameter: Timepoint (day) Value: 10
  misc_feature: MA Experiment 20001908 PARAMETER Experiment Name: At_Drought_Reproduction_P Parameter: Tissue Value: Siliques
  misc_feature: MA Experiment 20001908 PARAMETER Experiment Name: At_Drought_Reproduction_P Parameter: Treatment Value: Drought vs. No Drought

SEQ ID NO: 31864 - protein, 121 aa, Arabidopsis thaliana; identical to SEQ ID NO: 28274
  peptide (1)..(121): Ceres Seq. ID no. 12322086
  misc_feature (32)..(114): Homolog of NCBI NO: 18394486 NR Description: Expressed protein
  misc_feature (32)..(114): Homolog of NCBI NO: 8778455 NR Description: F1L3.15 [Arabidopsis thaliana]
  misc_feature (32)..(114): Homolog of NCBI NO: 25406197 NR Description: hypothetical protein F28P22.18 [imported] -
  misc_feature (32)..(114): Homolog of NCBI NO: 18410139 NR Description: expressed protein
  misc_feature (32)..(120): Homolog of NCBI NO: 18396289 NR Description: Expressed protein
  misc_feature (23)..(121): Homolog of NCBI NO: 4680201 NR Description: hypothetical protein [Sorghum bicolor]
  misc_feature (27)..(114): Homolog of NCBI NO: 4680489 NR Description: hypothetical protein [Oryza sativa]
  misc_feature (31)..(104): Homolog of NCBI NO: 15227672 NR Description: hypothetical protein; protein id: At2g29950.1
  misc_feature (12)..(121): Homolog of NCBI NO: 34499881 NR Description: early flowering 4 [Mesembryanthemum crystallinum]
  misc_feature (11)..(121): Homolog of NCBI NO: 18405258 NR Description: expressed protein

SEQ ID NO: 31865 - protein, 111 aa, Arabidopsis thaliana; identical to SEQ ID NO: 28275
  peptide (1)..(111): Ceres Seq. ID no. 12322087
  misc_feature (22)..(104): Homolog of NCBI NO: 18394486 NR Description: Expressed protein
  misc_feature (22)..(104): Homolog of NCBI NO: 8778455 NR Description: F1L3.15 [Arabidopsis thaliana]
  misc_feature (22)..(104): Homolog of NCBI NO: 25406197 NR Description: hypothetical protein F28P22.18 [imported] -
  misc_feature (22)..(104): Homolog of NCBI NO: 18410139 NR Description: expressed protein
  misc_feature (22)..(110): Homolog of NCBI NO: 18396289 NR Description: Expressed protein
  misc_feature (13)..(111): Homolog of NCBI NO: 4680201 NR Description: hypothetical protein [Sorghum bicolor]
  misc_feature (17)..(104): Homolog of NCBI NO: 4680489 NR Description: hypothetical protein [Oryza sativa]
  misc_feature (21)..(94): Homolog of NCBI NO: 15227672 NR Description: hypothetical protein; protein id: At2g29950.1
  misc_feature (2)..(111): Homolog of NCBI NO: 34499881 NR Description: early flowering 4 [Mesembryanthemum crystallinum]
  misc_feature (1)..(111): Homolog of NCBI NO: 18405258 NR Description: expressed protein

SEQ ID NO: 31866 - protein, 87 aa, Arabidopsis thaliana; identical to SEQ ID NO: 28276
  peptide (1)..(87): Ceres Seq. ID no. 12322088
  misc_feature (1)..(80): Homolog of NCBI NO: 18394486 NR Description: Expressed protein
  misc_feature (1)..(80): Homolog of NCBI NO: 8778455 NR Description: F1L3.15 [Arabidopsis thaliana]
  misc_feature (1)..(80): Homolog of NCBI NO: 25406197 NR Description: hypothetical protein F28P22.18 [imported] -
  misc_feature (1)..(80): Homolog of NCBI NO: 18410139 NR Description: expressed protein
  misc_feature (1)..(86): Homolog of NCBI NO: 18396289 NR Description: Expressed protein
  misc_feature (1)..(87): Homolog of NCBI NO: 4680201 NR Description: hypothetical protein [Sorghum bicolor]
  misc_feature (1)..(80): Homolog of NCBI NO: 4680489 NR Description: hypothetical protein [Oryza sativa]
  misc_feature (1)..(70): Homolog of NCBI NO: 15227672 NR Description: hypothetical protein; protein id: At2g29950.1
  misc_feature (1)..(87): Homolog of NCBI NO: 34499881 NR Description: early flowering 4 [Mesembryanthemum crystallinum]
  misc_feature (1)..(87): Homolog of NCBI NO: 18405258 NR Description: expressed protein

SEQ ID NO: 31867 - DNA, 629 bp, Arabidopsis thaliana; identical to SEQ ID NO: 28277
  misc_feature (1)..(629): Ceres Seq. ID no. 12348641
  misc_feature: MA Experiment ID: 108434 Result: Down-regulated in Transcription
  misc_feature: MA Experiment 108434 PARAMETER Experiment Name: At_Root_Tips_cDNA_P Parameter: Tissue Value: Root Tips
  misc_feature: MA Experiment ID: 108435 Result: Down-regulated in Transcription
  misc_feature: MA Experiment 108435 PARAMETER Experiment Name: At_stm_Mutants_cDNA_P Parameter: Plant Line Value: wt Landsburg vs stm
  misc_feature: MA Experiment 108435 PARAMETER Experiment Name: At_stm_Mutants_cDNA_P Parameter: Tissue Value: Shoot Apical Meristem Region
  misc_feature: MA Experiment ID: 108461 Result: Up-regulated in Transcription
  misc_feature: MA Experiment 108461 PARAMETER Experiment Name: At_Germinating_Seeds_cDNA_P Parameter: Age (day) Value: 1 vs. 0
  misc_feature: MA Experiment 108461 PARAMETER Experiment Name: At_Germinating_Seeds_cDNA_P Parameter: Tissue Value: Germinating Seeds
  misc_feature: MA Experiment ID: 108462 Result: Up-regulated in Transcription
  misc_feature: MA Experiment 108462 PARAMETER Experiment Name: At_Germinating_Seeds_cDNA_P Parameter: Age (day) Value: 2 vs. 0
  misc_feature: MA Experiment 108462 PARAMETER Experiment Name: At_Germinating_Seeds_cDNA_P Parameter: Tissue Value: Germinating Seeds
  misc_feature: MA Experiment ID: 108463 Result: Up-regulated in Transcription
  misc_feature: MA Experiment 108463 PARAMETER Experiment Name: At_Germinating_Seeds_cDNA_P Parameter: Age (day) Value: 3 vs. 0
  misc_feature: MA Experiment 108463 PARAMETER Experiment Name: At_Germinating_Seeds_cDNA_P Parameter: Tissue Value: Germinating Seeds
  misc_feature: MA Experiment ID: 108464 Result: Up-regulated in Transcription
  misc_feature: MA Experiment 108464 PARAMETER Experiment Name: At_Germinating_Seeds_cDNA_P Parameter: Age (day) Value: 4 vs. 0
  misc_feature: MA Experiment 108464 PARAMETER Experiment Name: At_Germinating_Seeds_cDNA_P Parameter: Tissue Value: Germinating Seeds
  misc_feature: MA Experiment ID: 108473 Result: Down-regulated in Transcription
  misc_feature: MA Experiment 108473 PARAMETER Experiment Name: At_Drought_Flowers_cDNA_P Parameter: Timepoint (hr) Value: 7 d
  misc_feature: MA Experiment 108473 PARAMETER Experiment Name: At_Drought_Flowers_cDNA_P Parameter: Tissue Value: Flower
  misc_feature: MA Experiment 108473 PARAMETER Experiment Name: At_Drought_Flowers_cDNA_P Parameter: Treatment Value: Drought vs. No Drought
  misc_feature: MA Experiment ID: 108501 Result: Down-regulated in Transcription
  misc_feature: MA Experiment 108501 PARAMETER Experiment Name: At_ap2_floral_buds_cDNA_P Parameter: Plant Line Value: ap2 (Ler.)
  misc_feature: MA Experiment 108501 PARAMETER Experiment Name: At_ap2_floral_buds_cDNA_P Parameter: Tissue Value: Closed Flower
  misc_feature: MA Experiment ID: 108572 Result: Down-regulated in Transcription
  misc_feature: MA Experiment 108572 PARAMETER Experiment Name: At_Drought_cDNA_P Parameter: Timepoint (hr) Value: 1
  misc_feature: MA Experiment 108572 PARAMETER Experiment Name: At_Drought_cDNA_P Parameter: Tissue Value: Aerial
  misc_feature: MA Experiment 108572 PARAMETER Experiment Name: At_Drought_cDNA_P Parameter: Treatment Value: Drought vs. No Drought
  misc_feature: MA Experiment ID: 108573 Result: Down-regulated in Transcription
  misc_feature: MA Experiment 108573 PARAMETER Experiment Name: At_Drought_cDNA_P Parameter: Timepoint (hr) Value: 6
  misc_feature: MA Experiment 108573 PARAMETER Experiment Name: At_Drought_cDNA_P Parameter: Tissue Value: Aerial
  misc_feature: MA Experiment 108573 PARAMETER Experiment Name: At_Drought_cDNA_P Parameter: Treatment Value: Drought vs. No Drought
  misc_feature: MA Experiment ID: 108576 Result: Up-regulated in Transcription
  misc_feature: MA Experiment 108576 PARAMETER Experiment Name: At_42deg_Heat_cDNA_P Parameter: Temperature (deg C) Value: 42 vs. 22
  misc_feature: MA Experiment 108576 PARAMETER Experiment Name: At_42deg_Heat_cDNA_P Parameter: Timepoint (hr) Value: 1
  misc_feature: MA Experiment 108576 PARAMETER Experiment Name: At_42deg_Heat_cDNA_P Parameter: Tissue Value: Aerial
  misc_feature: MA Experiment ID: 108577 Result: Up-regulated in Transcription
  misc_feature: MA Experiment 108577 PARAMETER Experiment Name: At_42deg_Heat_cDNA_P Parameter: Temperature (deg C) Value: 42 vs. 22
  misc_feature: MA Experiment 108577 PARAMETER Experiment Name: At_42deg_Heat_cDNA_P Parameter: Timepoint (hr) Value: 6
  misc_feature: MA Experiment 108577 PARAMETER Experiment Name: At_42deg_Heat_cDNA_P Parameter: Tissue Value: Aerial
  misc_feature: MA Experiment ID: 108595 Result: Down-regulated in Transcription
  misc_feature: MA Experiment 108595 PARAMETER Experiment Name: At_Ler-pi_Ovule_cDNA_P Parameter: Plant Line Value: null
  misc_feature: MA Experiment ID: 108607 Result: Down-regulated in Transcription
  misc_feature: MA Experiment 108607 PARAMETER Experiment Name: At_100uM_ABA_cDNA_P Parameter: Timepoint (hr) Value: 4
  misc_feature: MA Experiment 108607 PARAMETER Experiment Name: At_100uM_ABA_cDNA_P Parameter: Tissue Value: Aerial
  misc_feature: MA Experiment 108607 PARAMETER Experiment Name: At_100uM_ABA_cDNA_P Parameter: Treatment Value: 100uM ABA vs. No Treatment
  misc_feature: MA Experiment ID: 108609 Result: Up-regulated in Transcription
  misc_feature: MA Experiment 108609 PARAMETER Experiment Name: At_100uM_ABA_cDNA_P Parameter: Timepoint (hr) Value: 24
  misc_feature: MA Experiment 108609 PARAMETER Experiment Name: At_100uM_ABA_cDNA_P Parameter: Tissue Value: Aerial
  misc_feature: MA Experiment 108609 PARAMETER Experiment Name: At_100uM_ABA_cDNA_P Parameter: Treatment Value: 100uM ABA vs. No Treatment
  misc_feature: MA Experiment ID: 20000070 Result: Down-regulated in Transcription
  misc_feature: MA Experiment 20000070 PARAMETER Experiment Name: At_100uM_ABA_Mutants_cDNA_P Parameter: Plant Line Value: CS24
  misc_feature: MA Experiment 20000070 PARAMETER Experiment Name: At_100uM_ABA_Mutants_cDNA_P Parameter: Timepoint (hr) Value: 6
  misc_feature: MA Experiment 20000070 PARAMETER Experiment Name: At_100uM_ABA_Mutants_cDNA_P Parameter: Tissue Value: Aerial
  misc_feature: MA Experiment 20000070 PARAMETER Experiment Name: At_100uM_ABA_Mutants_cDNA_P Parameter: Treatment Value: 100uM ABA vs. No Treatment
  misc_feature: MA Experiment ID: 20000072 Result: Down-regulated in Transcription
  misc_feature: MA Experiment 20000072 PARAMETER Experiment Name: At_100uM_ABA_Mutants_cDNA_P Parameter: Plant Line Value: CS8105
  misc_feature: MA Experiment 20000072 PARAMETER Experiment Name: At_100uM_ABA_Mutants_cDNA_P Parameter: Timepoint (hr) Value: 6
  misc_feature: MA Experiment 20000072 PARAMETER Experiment Name: At_100uM_ABA_Mutants_cDNA_P Parameter: Tissue Value: Aerial
  misc_feature: MA Experiment 20000072 PARAMETER Experiment Name: At_100uM_ABA_Mutants_cDNA_P Parameter: Treatment Value: 100uM ABA vs. No Treatment
  misc_feature: MA Experiment ID: 20000093 Result: Up-regulated in Transcription
  misc_feature: MA Experiment 20000093 PARAMETER Experiment Name: At_42deg_Heat_cDNA_P Parameter: Temperature (deg C) Value: 42 vs. 22
  misc_feature: MA Experiment 20000093 PARAMETER Experiment Name: At_42deg_Heat_cDNA_P Parameter: Timepoint (hr) Value: 0.5
  misc_feature: MA Experiment 20000093 PARAMETER Experiment Name: At_42deg_Heat_cDNA_P Parameter: Tissue Value: Aerial
  misc_feature: MA Experiment ID: 20000111 Result: Up-regulated in Transcription
  misc_feature: MA Experiment 20000111 PARAMETER Experiment Name: At_42deg_Heat_cDNA_P Parameter: Temperature (deg C) Value: 42 vs. 22
  misc_feature: MA Experiment 20000111 PARAMETER Experiment Name: At_42deg_Heat_cDNA_P Parameter: Timepoint (hr) Value: 6
  misc_feature: MA Experiment 20000111 PARAMETER Experiment Name: At_42deg_Heat_cDNA_P Parameter: Tissue Value: Aerial
  misc_feature: MA Experiment ID: 20000112 Result: Up-regulated in Transcription
  misc_feature: MA Experiment 20000112 PARAMETER Experiment Name: At_42deg_Heat_cDNA_P Parameter: Temperature (deg C) Value: 42 vs. 22
  misc_feature: MA Experiment 20000112 PARAMETER Experiment Name: At_42deg_Heat_cDNA_P Parameter: Timepoint (hr) Value: 2
  misc_feature: MA Experiment 20000112 PARAMETER Experiment Name: At_42deg_Heat_cDNA_P Parameter: Tissue Value: Aerial
  misc_feature: MA Experiment ID: 20000113 Result: Up-regulated in Transcription
  misc_feature: MA Experiment 20000113 PARAMETER Experiment Name: At_42deg_Heat_cDNA_P Parameter: Temperature (deg C) Value: 42 vs. 22
  misc_feature: MA Experiment 20000113 PARAMETER Experiment Name: At_42deg_Heat_cDNA_P Parameter: Timepoint (hr) Value: 8
  misc_feature: MA Experiment 20000113 PARAMETER Experiment Name: At_42deg_Heat_cDNA_P Parameter: Tissue Value: Aerial
  misc_feature: MA Experiment ID: 20000144 Result: Up-regulated in Transcription
  misc_feature: MA Experiment 20000144 PARAMETER Experiment Name: At_42deg_Heat_cDNA_P Parameter: Temperature (deg C) Value: 42 vs. 22
  misc_feature: MA Experiment 20000144 PARAMETER Experiment Name: At_42deg_Heat_cDNA_P Parameter: Timepoint (hr) Value: 1
  misc_feature: MA Experiment 20000144 PARAMETER Experiment Name: At_42deg_Heat_cDNA_P Parameter: Tissue Value: Aerial
  misc_feature: MA Experiment ID: 20000171 Result: Up-regulated in Transcription
  misc_feature: MA Experiment 20000171 PARAMETER Experiment Name: At_42deg_Heat_P Parameter: Age (day) Value: 14
  misc_feature: MA Experiment 20000171 PARAMETER Experiment Name: At_42deg_Heat_P Parameter: Organism Value: A. thaliana
  misc_feature: MA Experiment 20000171 PARAMETER Experiment Name: At_42deg_Heat_P Parameter: Plant Line Value: WS
  misc_feature: MA Experiment 20000171 PARAMETER Experiment Name: At_42deg_Heat_P Parameter: Temperature (deg C) Value: 42 vs. 22
  misc_feature: MA Experiment 20000171 PARAMETER Experiment Name: At_42deg_Heat_P Parameter: Timepoint (hr) Value: 1
  misc_feature: MA Experiment 20000171 PARAMETER Experiment Name: At_42deg_Heat_P Parameter: Tissue Value: Aerial
  misc_feature: MA Experiment ID: 20000173 Result: Up-regulated in Transcription
  misc_feature: MA Experiment 20000173 PARAMETER Experiment Name: At_42deg_Heat_P Parameter: Age (day) Value: 14
  misc_feature: MA Experiment 20000173 PARAMETER Experiment Name: At_42deg_Heat_P Parameter: Organism Value: A. thaliana
  misc_feature: MA Experiment 20000173 PARAMETER Experiment Name: At_42deg_Heat_P Parameter: Plant Line Value: WS
  misc_feature: MA Experiment 20000173 PARAMETER Experiment Name: At_42deg_Heat_P Parameter: Temperature (deg C) Value: 42 vs. 22
  misc_feature: MA Experiment 20000173 PARAMETER Experiment Name: At_42deg_Heat_P Parameter: Timepoint (hr) Value: 6
  misc_feature: MA Experiment 20000173 PARAMETER Experiment Name: At_42deg_Heat_P Parameter: Tissue Value: Aerial
  misc_feature: MA Experiment ID: 20000179 Result: Up-regulated in Transcription
  misc_feature: MA Experiment 20000179 PARAMETER Experiment Name: At_Germinating_Seeds_P Parameter: Age (hr) Value: 6 vs. 0
  misc_feature: MA Experiment 20000179 PARAMETER Experiment Name: At_Germinating_Seeds_P Parameter: Tissue Value: Germinating Seeds
  misc_feature: MA Experiment ID: 20000180 Result: Up-regulated in Transcription
  misc_feature: MA Experiment 20000180 PARAMETER Experiment Name: At_Germinating_Seeds_P Parameter: Age (hr) Value: 24 vs. 0
  misc_feature: MA Experiment 20000180 PARAMETER Experiment Name: At_Germinating_Seeds_P Parameter: Tissue Value: Germinating Seeds
  misc_feature: MA Experiment ID: 20000184 Result: Up-regulated in Transcription
  misc_feature: MA Experiment 20000184 PARAMETER Experiment Name: At_Shoots__P Parameter: Age (day) Value: 7
  misc_feature: MA Experiment 20000184 PARAMETER Experiment Name: At_Shoots__P Parameter: Tissue Value: Shoots vs. Whole Plant
  misc_feature: MA Experiment ID: 20000224 Result: Down-regulated in Transcription
  misc_feature: MA Experiment ID: 20000267 Result: Down-regulated in Transcription
  misc_feature: MA Experiment 20000267 PARAMETER Experiment Name: At_Drought_P Parameter: Age (day) Value: 7
  misc_feature: MA Experiment 20000267 PARAMETER Experiment Name: At_Drought_P Parameter: Organism Value: A. thaliana
  misc_feature: MA Experiment 20000267 PARAMETER Experiment Name: At_Drought_P Parameter: Plant Line Value: WS
  misc_feature: MA Experiment 20000267 PARAMETER Experiment Name: At_Drought_P Parameter: Timepoint (hr) Value: 6
  misc_feature: MA Experiment 20000267 PARAMETER Experiment Name: At_Drought_P Parameter: Tissue Value: Whole Plant
  misc_feature: MA Experiment 20000267 PARAMETER Experiment Name: At_Drought_P Parameter: Treatment Value: Drought vs. No Drought
  misc_feature: MA Experiment ID: 20000268 Result: Down-regulated in Transcription
  misc_feature: MA Experiment 20000268 PARAMETER Experiment Name: At_100mM_NaCl__P Parameter: Age (day) Value: 14
  misc_feature: MA Experiment 20000268 PARAMETER Experiment Name: At_100mM_NaCl__P Parameter: Organism Value: A. thaliana
  misc_feature: MA Experiment 20000268 PARAMETER Experiment Name: At_100mM_NaCl__P Parameter: Plant Line Value: WS
  misc_feature: MA Experiment 20000268 PARAMETER Experiment Name: At_100mM_NaCl__P Parameter: Timepoint (hr) Value: 6
  misc_feature: MA Experiment 20000268 PARAMETER Experiment Name: At_100mM_NaCl__P Parameter: Tissue Value: Whole Plant
  misc_feature: MA Experiment 20000268 PARAMETER Experiment Name: At_100mM_NaCl__P Parameter: Treatment Value: 100mM NaCl vs. No Treatment
  misc_feature: MA Experiment ID: 20000436 Result: Down-regulated in Transcription
  misc_feature: MA Experiment 20000436 PARAMETER Experiment Name: At_Drought_P Parameter: Age (day) Value: 7
  misc_feature: MA Experiment 20000436 PARAMETER Experiment Name: At_Drought_P Parameter: Organism Value: A. thaliana
  misc_feature: MA Experiment 20000436 PARAMETER Experiment Name: At_Drought_P Parameter: Plant Line Value: WS
  misc_feature: MA Experiment 20000436 PARAMETER Experiment Name: At_Drought_P Parameter: Timepoint (hr) Value: 12
  misc_feature: MA Experiment 20000436 PARAMETER Experiment Name: At_Drought_P Parameter: Tissue Value: Whole Plant
  misc_feature: MA Experiment 20000436 PARAMETER Experiment Name: At_Drought_P Parameter: Treatment Value: Drought vs. No Drought
  misc_feature: MA Experiment ID: 20000437 Result: Down-regulated in Transcription
  misc_feature: MA Experiment 20000437 PARAMETER Experiment Name: At_Drought_P Parameter: Age (day) Value: 8
  misc_feature: MA Experiment 20000437 PARAMETER Experiment Name: At_Drought_P Parameter: Organism Value: A. thaliana
  misc_feature: MA Experiment 20000437 PARAMETER Experiment Name: At_Drought_P Parameter: Plant Line Value: WS
  misc_feature: MA Experiment 20000437 PARAMETER Experiment Name: At_Drought_P Parameter: Timepoint (hr) Value: 24
  misc_feature: MA Experiment 20000437 PARAMETER Experiment Name: At_Drought_P Parameter: Tissue Value: Whole Plant
  misc_feature: MA Experiment 20000437 PARAMETER Experiment Name: At_Drought_P Parameter: Treatment Value: Drought vs. No Drought
  misc_feature: MA Experiment ID: 20000441 Result: Up-regulated in Transcription
  misc_feature: MA Experiment 20000441 PARAMETER Experiment Name: At_1uM_BR-BRZ__P Parameter: Tissue Value: Shoot Apices
  misc_feature: MA Experiment 20000441 PARAMETER Experiment Name: At_1uM_BR-BRZ__P Parameter: Treatment Value: 1uM BR vs. No Treatment
  misc_feature: MA Experiment ID: 20000443 Result: Up-regulated in Transcription
  misc_feature: MA Experiment 20000443 PARAMETER Experiment Name: At_1uM_BR-BRZ__P Parameter: Tissue Value: Shoot Apices
  misc_feature: MA Experiment 20000443 PARAMETER Experiment Name: At_1uM_BR-BRZ__P Parameter: Treatment Value: 1uM BRZ vs. No Treatment
  misc_feature: MA Experiment ID: 20000453 Result: Up-regulated in Transcription
  misc_feature: MA Experiment 20000453 PARAMETER Experiment Name: At_100uM_ABA_P Parameter: Age (day) Value: 15
  misc_feature: MA Experiment 20000453 PARAMETER Experiment Name: At_100uM_ABA_P Parameter: Organism Value: A. thaliana
  misc_feature: MA Experiment 20000453 PARAMETER Experiment Name: At_100uM_ABA_P Parameter: Plant Line Value: WS
  misc_feature: MA Experiment 20000453 PARAMETER Experiment Name: At_100uM_ABA_P Parameter: Timepoint (hr) Value: 24
  misc_feature: MA Experiment 20000453 PARAMETER Experiment Name: At_100uM_ABA_P Parameter: Tissue Value: Aerial
  misc_feature: MA Experiment 20000453 PARAMETER Experiment Name: At_100uM_ABA_P Parameter: Treatment Value: 100uM ABA vs. No Treatment
  misc_feature: MA Experiment ID: 20000456 Result: Down-regulated in Transcription
  misc_feature: MA Experiment 20000456 PARAMETER Experiment Name: At_100uM_BA_P Parameter: Age (day) Value: 14
  misc_feature: MA Experiment 20000456 PARAMETER Experiment Name: At_100uM_BA_P Parameter: Organism Value: A. thaliana
  misc_feature: MA Experiment 20000456 PARAMETER Experiment Name: At_100uM_BA_P Parameter: Plant Line Value: WS
  misc_feature: MA Experiment 20000456 PARAMETER Experiment Name: At_100uM_BA_P Parameter: Timepoint (hr) Value: 6
  misc_feature: MA Experiment 20000456 PARAMETER Experiment Name: At_100uM_BA_P Parameter: Tissue Value: Aerial
  misc_feature: MA Experiment 20000456 PARAMETER Experiment Name: At_100uM_BA_P Parameter: Treatment Value: 100uM BA vs. No Treatment
  misc_feature: MA Experiment ID: 20000573 Result: Up-regulated in Transcription
  misc_feature: MA Experiment 20000573 PARAMETER Experiment Name: At_100uM_ABA_Mutants__P Parameter: Organism Value: A. thaliana
  misc_feature: MA Experiment 20000573 PARAMETER Experiment Name: At_100uM_ABA_Mutants__P Parameter: Plant Line Value: CS22 vs. Ler wt
  misc_feature: MA Experiment 20000573 PARAMETER Experiment Name: At_100uM_ABA_Mutants__P Parameter: Timepoint (hr) Value: N/A
  misc_feature: MA Experiment 20000573 PARAMETER Experiment Name: At_100uM_ABA_Mutants__P Parameter: Tissue Value: Whole Plant
  misc_feature: MA Experiment 20000573 PARAMETER Experiment Name: At_100uM_ABA_Mutants__P Parameter: Treatment Value: None
  misc_feature: MA Experiment ID: 20000574 Result: Up-regulated in Transcription
  misc_feature: MA Experiment 20000574 PARAMETER Experiment Name: At_100uM_ABA_Mutants__P Parameter: Organism Value: A. thaliana
  misc_feature: MA Experiment 20000574 PARAMETER Experiment Name: At_100uM_ABA_Mutants__P Parameter: Plant Line Value: CS23 vs. Ler wt
  misc_feature: MA Experiment 20000574 PARAMETER Experiment Name: At_100uM_ABA_Mutants__P Parameter: Timepoint (hr) Value: N/A
  misc_feature: MA Experiment 20000574 PARAMETER Experiment Name: At_100uM_ABA_Mutants__P Parameter: Tissue Value: Whole Plant
  misc_feature: MA Experiment 20000574 PARAMETER Experiment Name: At_100uM_ABA_Mutants__P Parameter: Treatment Value: None
  misc_feature: MA Experiment ID: 20000709 Result: Up-regulated in Transcription
  misc_feature: MA Experiment 20000709 PARAMETER Experiment Name: At_15mM_NH4NO3_L-to-H_P Parameter: Age (hr) Value: 14
  misc_feature: MA Experiment 20000709 PARAMETER Experiment Name: At_15mM_NH4NO3_L-to-H_P Parameter: Organism Value: A. thaliana
  misc_feature: MA Experiment 20000709 PARAMETER Experiment Name: At_15mM_NH4NO3_L-to-H_P Parameter: Plant Line Value: WS
  misc_feature: MA Experiment 20000709 PARAMETER Experiment Name: At_15mM_NH4NO3_L-to-H_P Parameter: Timepoint (hr) Value: 4
  misc_feature: MA Experiment 20000709 PARAMETER Experiment Name: At_15mM_NH4NO3_L-to-H_P Parameter: Tissue Value: Aerial
  misc_feature: MA Experiment 20000709 PARAMETER Experiment Name: At_15mM_NH4NO3_L-to-H_P Parameter: Treatment Value: 15mM NH4NO3 vs. 30mM Mannitol
  misc_feature: MA Experiment ID: 20001450 Result: Up-regulated in Transcription
  misc_feature: MA Experiment 20001450 PARAMETER Experiment Name: At_Far-red-induction_P Parameter: Age (day) Value: 7
  misc_feature: MA Experiment 20001450 PARAMETER Experiment Name: At_Far-red-induction_P Parameter: Light Value: Far-red vs. White
  misc_feature: MA Experiment 20001450 PARAMETER Experiment Name: At_Far-red-induction_P Parameter: Organism Value: A. thaliana
  misc_feature: MA Experiment 20001450 PARAMETER Experiment Name: At_Far-red-induction_P Parameter: Plant Line Value: Columbia
  misc_feature: MA Experiment 20001450 PARAMETER Experiment Name: At_Far-red-induction_P Parameter: Timepoint (hr) Value: 8
  misc_feature: MA Experiment 20001450 PARAMETER Experiment Name: At_Far-red-induction_P Parameter: Tissue Value: Whole Plant
  misc_feature: MA Experiment ID: 20001451 Result: Up-regulated in Transcription
  misc_feature: MA Experiment 20001451 PARAMETER Experiment Name: At_Far-red-induction_P Parameter: Age (day) Value: 7
  misc_feature: MA Experiment 20001451 PARAMETER Experiment Name: At_Far-red-induction_P Parameter: Light Value: Far-red vs. White
  misc_feature: MA Experiment 20001451 PARAMETER Experiment Name: At_Far-red-induction_P Parameter: Organism Value: A. thaliana
  misc_feature: MA Experiment 20001451 PARAMETER Experiment Name: At_Far-red-induction_P Parameter: Plant Line Value: Columbia
  misc_feature: MA Experiment 20001451 PARAMETER Experiment Name: At_Far-red-induction_P Parameter: Timepoint (hr) Value: 24
  misc_feature: MA Experiment 20001451 PARAMETER Experiment Name: At_Far-red-induction_P Parameter: Tissue Value: Whole Plant
  misc_feature: MA Experiment ID: 20001553 Result: Down-regulated in Transcription
  misc_feature: MA Experiment 20001553 PARAMETER Experiment Name: At_Drought_Soil_Dry_P Parameter: Age (day) Value: 19
  misc_feature: MA Experiment 20001553 PARAMETER Experiment Name: At_Drought_Soil_Dry_P Parameter: Organism Value: A. thaliana
  misc_feature: MA Experiment 20001553 PARAMETER Experiment Name: At_Drought_Soil_Dry_P Parameter: Plant Line Value: WS
  misc_feature: MA Experiment 20001553 PARAMETER Experiment Name: At_Drought_Soil_Dry_P Parameter: Post Timepoint (hr) Value: None
  misc_feature: MA Experiment 20001553 PARAMETER Experiment Name: At_Drought_Soil_Dry_P Parameter: Post-Treatment Value: None
  misc_feature: MA Experiment 20001553 PARAMETER Experiment Name: At_Drought_Soil_Dry_P Parameter: Timepoint (day) Value: 5
  misc_feature: MA Experiment 20001553 PARAMETER Experiment Name: At_Drought_Soil_Dry_P Parameter: Treatment Value: Drought vs. No Drought
  misc_feature: MA Experiment ID: 20001554 Result: Down-regulated in Transcription
  misc_feature: MA Experiment 20001554 PARAMETER Experiment Name: At_Drought_Soil_Dry_P Parameter: Age (day) Value: 21
  misc_feature: MA Experiment 20001554 PARAMETER Experiment Name: At_Drought_Soil_Dry_P Parameter: Organism Value: A. thaliana
  misc_feature: MA Experiment 20001554 PARAMETER Experiment Name: At_Drought_Soil_Dry_P Parameter: Plant Line Value: WS
  misc_feature: MA Experiment 20001554 PARAMETER Experiment Name: At_Drought_Soil_Dry_P Parameter: Post Timepoint (hr) Value: None
  misc_feature: MA Experiment 20001554 PARAMETER Experiment Name: At_Drought_Soil_Dry_P Parameter: Post-Treatment Value: None
  misc_feature: MA Experiment 20001554 PARAMETER Experiment Name: At_Drought_Soil_Dry_P Parameter: Timepoint (day) Value: 7
  misc_feature: MA Experiment 20001554 PARAMETER Experiment Name: At_Drought_Soil_Dry_P Parameter: Treatment Value: Drought vs. No Drought
  misc_feature: MA Experiment ID: 20001555 Result: Down-regulated in Transcription
  misc_feature: MA Experiment 20001555 PARAMETER Experiment Name: At_Drought_Soil_Dry_P Parameter: Age (day) Value: 24
  misc_feature: MA Experiment 20001555 PARAMETER Experiment Name: At_Drought_Soil_Dry_P Parameter: Organism Value: A. thaliana
  misc_feature: MA Experiment 20001555 PARAMETER Experiment Name: At_Drought_Soil_Dry_P Parameter: Plant Line Value: WS
  misc_feature: MA Experiment 20001555 PARAMETER Experiment Name: At_Drought_Soil_Dry_P Parameter: Post Timepoint (hr) Value: None
  misc_feature: MA Experiment 20001555 PARAMETER Experiment Name: At_Drought_Soil_Dry_P Parameter: Post-Treatment Value: None
  misc_feature: MA Experiment 20001555 PARAMETER Experiment Name: At_Drought_Soil_Dry_P Parameter: Timepoint (day) Value: 10
  misc_feature: MA Experiment 20001555 PARAMETER Experiment Name: At_Drought_Soil_Dry_P Parameter: Treatment Value: Drought vs. No Drought
  misc_feature: MA Experiment ID: 20001556 Result: Down-regulated in Transcription
  misc_feature: MA Experiment 20001556 PARAMETER Experiment Name: At_Drought_Soil_Dry_P Parameter: Age (day) Value: 26
  misc_feature: MA Experiment 20001556 PARAMETER Experiment Name: At_Drought_Soil_Dry_P Parameter: Organism Value: A. thaliana
  misc_feature: MA Experiment 20001556 PARAMETER Experiment Name: At_Drought_Soil_Dry_P Parameter: Plant Line Value: WS
  misc_feature: MA Experiment 20001556 PARAMETER Experiment Name: At_Drought_Soil_Dry_P Parameter: Post Timepoint (hr) Value: None
  misc_feature: MA Experiment 20001556 PARAMETER Experiment Name: At_Drought_Soil_Dry_P Parameter: Post-Treatment Value: None
  misc_feature: MA Experiment 20001556 PARAMETER Experiment Name: At_Drought_Soil_Dry_P Parameter: Timepoint (day) Value: 12
  misc_feature: MA Experiment 20001556 PARAMETER Experiment Name: At_Drought_Soil_Dry_P Parameter: Treatment Value: Drought vs. No Drought
  misc_feature: MA Experiment ID: 20001557 Result: Down-regulated in Transcription
  misc_feature: MA Experiment 20001557 PARAMETER Experiment Name: At_Drought_Soil_Dry_P Parameter: Age (day) Value: 27
  misc_feature: MA Experiment 20001557 PARAMETER Experiment Name: At_Drought_Soil_Dry_P Parameter: Organism Value: A. thaliana
  misc_feature: MA Experiment 20001557 PARAMETER Experiment Name: At_Drought_Soil_Dry_P Parameter: Plant Line Value: WS
  misc_feature: MA Experiment 20001557 PARAMETER Experiment Name: At_Drought_Soil_Dry_P Parameter: Post Timepoint (hr) Value: 3
  misc_feature: MA Experiment 20001557 PARAMETER Experiment Name: At_Drought_Soil_Dry_P Parameter: Post-Treatment Value: Re-Water vs. No Drought
  misc_feature: MA Experiment 20001557 PARAMETER Experiment Name: At_Drought_Soil_Dry_P Parameter: Timepoint (day) Value: 13
  misc_feature: MA Experiment 20001557 PARAMETER Experiment Name: At_Drought_Soil_Dry_P Parameter: Treatment Value: Drought vs. No Drought
  misc_feature: MA Experiment ID: 20001558 Result: Up-regulated in Transcription
  misc_feature: MA Experiment 20001558 PARAMETER Experiment Name: At_Drought_Soil_Dry_P Parameter: Age (day) Value: 27
  misc_feature: MA Experiment 20001558 PARAMETER Experiment Name: At_Drought_Soil_Dry_P Parameter: Organism Value: A. thaliana
  misc_feature: MA Experiment 20001558 PARAMETER Experiment Name: At_Drought_Soil_Dry_P Parameter: Plant Line Value: WS
  misc_feature: MA Experiment 20001558 PARAMETER Experiment Name: At_Drought_Soil_Dry_P Parameter: Post Timepoint (hr) Value: 6
  misc_feature: MA Experiment 20001558 PARAMETER Experiment Name: At_Drought_Soil_Dry_P Parameter: Post-Treatment Value: Re-Water vs. No Drought
  misc_feature: MA Experiment 20001558 PARAMETER Experiment Name: At_Drought_Soil_Dry_P Parameter: Timepoint (day) Value: 13
  misc_feature: MA Experiment 20001558 PARAMETER Experiment Name: At_Drought_Soil_Dry_P Parameter: Treatment Value: Drought vs. No Drought
  misc_feature: MA Experiment ID: 20001559 Result: Down-regulated in Transcription
  misc_feature: MA Experiment 20001559 PARAMETER Experiment Name: At_Drought_Soil_Dry_P Parameter: Age (day) Value: 28
  misc_feature: MA Experiment 20001559 PARAMETER Experiment Name: At_Drought_Soil_Dry_P Parameter: Organism Value: A. thaliana
  misc_feature: MA Experiment 20001559 PARAMETER Experiment Name: At_Drought_Soil_Dry_P Parameter: Plant Line Value: WS
  misc_feature: MA Experiment 20001559 PARAMETER Experiment Name: At_Drought_Soil_Dry_P Parameter: Post Timepoint (hr) Value: 29
  misc_feature: MA Experiment 20001559 PARAMETER Experiment Name: At_Drought_Soil_Dry_P Parameter: Post-Treatment Value: Re-Water vs. No Drought
  misc_feature: MA Experiment 20001559 PARAMETER Experiment Name: At_Drought_Soil_Dry_P Parameter: Timepoint (day) Value: 14
  misc_feature: MA Experiment 20001559 PARAMETER Experiment Name: At_Drought_Soil_Dry_P Parameter: Treatment Value: Drought vs. No Drought
  misc_feature: MA Experiment ID: 20001560 Result: Up-regulated in Transcription
  misc_feature: MA Experiment 20001560 PARAMETER Experiment Name: At_Drought_Soil_Dry_P Parameter: Age (day) Value: 28
  misc_feature: MA Experiment 20001560 PARAMETER Experiment Name: At_Drought_Soil_Dry_P Parameter: Organism Value: A. thaliana
  misc_feature: MA Experiment 20001560 PARAMETER Experiment Name: At_Drought_Soil_Dry_P Parameter: Plant Line Value: WS
  misc_feature: MA Experiment 20001560 PARAMETER Experiment Name: At_Drought_Soil_Dry_P Parameter: Post Timepoint (hr) Value: None
  misc_feature: MA Experiment 20001560 PARAMETER Experiment Name: At_Drought_Soil_Dry_P Parameter: Post-Treatment Value: None
  misc_feature: MA Experiment 20001560 PARAMETER Experiment Name: At_Drought_Soil_Dry_P Parameter: Timepoint (day) Value: 14
  misc_feature: MA Experiment 20001560 PARAMETER Experiment Name: At_Drought_Soil_Dry_P Parameter: Treatment Value: Drought vs. No Drought
  misc_feature: MA Experiment ID: 20001757 Result: Up-regulated in Transcription
  misc_feature: MA Experiment 20001757 PARAMETER Experiment Name: At_50mM_NH4NO3_L-to-H_P Parameter: Timepoint (hr) Value: 6
  misc_feature: MA Experiment 20001757 PARAMETER Experiment Name: At_50mM_NH4NO3_L-to-H_P Parameter: Tissue Value: Leaf
  misc_feature: MA Experiment 20001757 PARAMETER Experiment Name: At_50mM_NH4NO3_L-to-H_P Parameter: Treatment Value: 50mM NH4NO3 vs 100mM Mannitol
  misc_feature: MA Experiment ID: 20001772 Result: Up-regulated in Transcription
  misc_feature: MA Experiment 20001772 PARAMETER Experiment Name: At_Far-red-enriched-adult_P Parameter: Age (day) Value: 29
  misc_feature: MA Experiment 20001772 PARAMETER Experiment Name: At_Far-red-enriched-adult_P Parameter: Light Value: Far-red enriched vs. White
  misc_feature: MA Experiment 20001772 PARAMETER Experiment Name: At_Far-red-enriched-adult_P Parameter: Organism Value: A. thaliana
  misc_feature: MA Experiment 20001772 PARAMETER Experiment Name: At_Far-red-enriched-adult_P Parameter: Plant Line Value: Columbia
  misc_feature: MA Experiment 20001772 PARAMETER Experiment Name: At_Far-red-enriched-adult_P Parameter: Timepoint (hr) Value: 24
  misc_feature: MA Experiment 20001772 PARAMETER Experiment Name: At_Far-red-enriched-adult_P Parameter: Tissue Value: Aerial
  misc_feature: MA Experiment ID: 20001774 Result: Up-regulated in Transcription
  misc_feature: MA Experiment 20001774 PARAMETER Experiment Name: At_Far-red-enriched-adult_P Parameter: Age (day) Value: 31
  misc_feature: MA Experiment 20001774 PARAMETER Experiment Name: At_Far-red-enriched-adult_P Parameter: Light Value: Far-red enriched vs. White
  misc_feature: MA Experiment 20001774 PARAMETER Experiment Name: At_Far-red-enriched-adult_P Parameter: Organism Value: A. thaliana
  misc_feature: MA Experiment 20001774 PARAMETER Experiment Name: At_Far-red-enriched-adult_P Parameter: Plant Line Value: Columbia
  misc_feature: MA Experiment 20001774 PARAMETER Experiment Name: At_Far-red-enriched-adult_P Parameter: Timepoint (hr) Value: 72
  misc_feature: MA Experiment 20001774 PARAMETER Experiment Name: At_Far-red-enriched-adult_P Parameter: Tissue Value: Aerial
  misc_feature: MA Experiment ID: 20001904 Result: Down-regulated in Transcription
  misc_feature: MA Experiment 20001904 PARAMETER Experiment Name: At_Drought_Reproduction_P Parameter: Age (day) Value: 37
  misc_feature: MA Experiment 20001904 PARAMETER Experiment Name: At_Drought_Reproduction_P Parameter: Organism Value: A. thaliana
  misc_feature: MA Experiment 20001904 PARAMETER Experiment Name: At_Drought_Reproduction_P Parameter: Plant Line Value: WS
  misc_feature: MA Experiment 20001904 PARAMETER Experiment Name: At_Drought_Reproduction_P Parameter: Timepoint (day) Value: 7
  misc_feature: MA Experiment 20001904 PARAMETER Experiment Name: At_Drought_Reproduction_P Parameter: Tissue Value: Rosettes
  misc_feature: MA Experiment 20001904 PARAMETER Experiment Name: At_Drought_Reproduction_P Parameter: Treatment Value: Drought vs. No Drought
  misc_feature: MA Experiment ID: 20001905 Result: Down-regulated in Transcription
  misc_feature: MA Experiment 20001905 PARAMETER Experiment Name: At_Drought_Reproduction_P Parameter: Age (day) Value: 40
  misc_feature: MA Experiment 20001905 PARAMETER Experiment Name: At_Drought_Reproduction_P Parameter: Organism Value: A. thaliana
  misc_feature: MA Experiment 20001905 PARAMETER Experiment Name: At_Drought_Reproduction_P Parameter: Plant Line Value: WS
  misc_feature: MA Experiment 20001905 PARAMETER Experiment Name: At_Drought_Reproduction_P Parameter: Timepoint (day) Value: 10
  misc_feature: MA Experiment 20001905 PARAMETER Experiment Name: At_Drought_Reproduction_P Parameter: Tissue Value: Rosettes
  misc_feature: MA Experiment 20001905 PARAMETER Experiment Name: At_Drought_Reproduction_P Parameter: Treatment Value: Drought vs. No Drought

SEQ ID NO: 31868 - protein, 98 aa, Arabidopsis thaliana; identical to SEQ ID NO: 28278
  peptide (1)..(98): Ceres Seq. ID no. 12348642
  misc_feature (3)..(98): Pfam Name: Gibberellin regulated protein Pfam Description: Gibberellin regulated protein
  misc_feature (1)..(98): Homolog of NCBI NO: 14625943 NR Description: snakin2 [Solanum tuberosum]
  misc_feature (1)..(98): Homolog of NCBI NO: 14625945 NR Description: snakin2 [Solanum tuberosum]
  misc_feature (1)..(98): Homolog of NCBI NO: 2253442 NR Description: LTCOR11 [Lavatera thuringiaca]
  misc_feature (1)..(98): Homolog of NCBI NO: 3094012 NR Description: cold-regulated LTCOR12 [Lavatera thuringiaca]
  misc_feature (1)..(25): Homolog of NCBI NO: 25313155 NR Description: protein F10A5.6 [imported] - Arabidopsis thaliana
  misc_feature (26)..(98): Homolog of NCBI NO: 25313155 NR Description: protein F10A5.6 [imported] - Arabidopsis thaliana
  misc_feature (1)..(98): Homolog of NCBI NO: 21618022 NR Description: GAST1-like protein [Arabidopsis thaliana]
  misc_feature (1)..(98): Homolog of NCBI NO: 887939 NR Description: GAST1 protein homolog
  misc_feature (1)..(98): Homolog of NCBI NO: 22530936 NR Description: expressed protein [Arabidopsis thaliana]
  misc_feature (1)..(98): Homolog of NCBI NO: 18410924 NR Description: expressed protein

SEQ ID NO: 31869 - DNA, 677 bp, Arabidopsis thaliana; identical to SEQ ID NO: 28279
  misc_feature (1)..(677): Ceres Seq. ID no. 12577603
  misc_feature: MA Experiment ID: 108576 Result: Down-regulated in Transcription
  misc_feature: MA Experiment 108576 PARAMETER Experiment Name: At_42deg_Heat_cDNA_P Parameter: Temperature (deg C) Value: 42 vs. 22
  misc_feature: MA Experiment 108576 PARAMETER Experiment Name: At_42deg_Heat_cDNA_P Parameter: Timepoint (hr) Value: 1
  misc_feature: MA Experiment 108576 PARAMETER Experiment Name: At_42deg_Heat_cDNA_P Parameter: Tissue Value: Aerial
  misc_feature: MA Experiment ID: 108577 Result: Down-regulated in Transcription
  misc_feature: MA Experiment 108577 PARAMETER Experiment Name: At_42deg_Heat_cDNA_P Parameter: Temperature (deg C) Value: 42 vs. 22
  misc_feature: MA Experiment 108577 PARAMETER Experiment Name: At_42deg_Heat_cDNA_P Parameter: Timepoint (hr) Value: 6
  misc_feature: MA Experiment 108577 PARAMETER Experiment Name: At_42deg_Heat_cDNA_P Parameter: Tissue Value: Aerial
  misc_feature: MA Experiment ID: 20000111 Result: Down-regulated in Transcription
  misc_feature: MA Experiment 20000111 PARAMETER Experiment Name: At_42deg_Heat_cDNA_P Parameter: Temperature (deg C) Value: 42 vs. 22
  misc_feature: MA Experiment 20000111 PARAMETER Experiment Name: At_42deg_Heat_cDNA_P Parameter: Timepoint (hr) Value: 6
  misc_feature: MA Experiment 20000111 PARAMETER Experiment Name: At_42deg_Heat_cDNA_P Parameter: Tissue Value: Aerial
  misc_feature: MA Experiment ID: 20000112 Result: Down-regulated in Transcription
  misc_feature: MA Experiment 20000112 PARAMETER Experiment Name: At_42deg_Heat_cDNA_P Parameter: Temperature (deg C) Value: 42 vs. 22
  misc_feature: MA Experiment 20000112 PARAMETER Experiment Name: At_42deg_Heat_cDNA_P Parameter: Timepoint (hr) Value: 2
  misc_feature: MA Experiment 20000112 PARAMETER Experiment Name: At_42deg_Heat_cDNA_P Parameter: Tissue Value: Aerial
  misc_feature: MA Experiment ID: 20000113 Result: Down-regulated in Transcription
  misc_feature: MA Experiment 20000113 PARAMETER Experiment Name: At_42deg_Heat_cDNA_P Parameter: Temperature (deg C) Value: 42 vs. 22
  misc_feature: MA Experiment 20000113 PARAMETER Experiment Name: At_42deg_Heat_cDNA_P Parameter: Timepoint (hr) Value: 8
  misc_feature: MA Experiment 20000113 PARAMETER Experiment Name: At_42deg_Heat_cDNA_P Parameter: Tissue Value: Aerial

SEQ ID NO: 31870 - protein, 164 aa, Arabidopsis thaliana; identical to SEQ ID NO: 28280
  peptide (1)..(164): Ceres Seq. ID no. 12577604
  misc_feature (45)..(163): Pfam Name: Core histone H2A/H2B/H3/H4 Pfam Description: Core histone H2A/H2B/H3/H4
  misc_feature (29)..(164): Homolog of NCBI NO: 37546835 NR Description: similar to histone protein Hist2h3c1 [Homo
  misc_feature (29)..(164): Homolog of NCBI NO: 34858260 NR Description: similar to histone protein Hist2h3c1 [Rattus
  misc_feature (29)..(164): Homolog of NCBI NO: 34858254 NR Description: similar to histone protein Hist2h3c1 [Rattus
  misc_feature (29)..(164): Homolog of NCBI NO: 30061401 NR Description: histone 2, H3ca1 [Mus musculus]
  misc_feature (29)..(164): Homolog of NCBI NO: 7305139 NR Description: histone 1, H3f; histone gene complex 1 [Mus
  misc_feature (20)..(164): Homolog of NCBI NO: 34876396 NR Description: similar to H3 histone family, member I [Rattus
  misc_feature (29)..(164): Homolog of NCBI NO: 2119013 NR Description: histone H3.2 protein - shrew mouse
  misc_feature (21)..(164): Homolog of NCBI NO: 34876364 NR Description: similar to CG31613-PA [Rattus norvegicus]
  misc_feature (29)..(164): Homolog of NCBI NO: 18698662 NR Description: disease-resistent-related protein [Oryza sativa]
  misc_feature (29)..(164): Homolog of NCBI NO: 15236103 NR Description: histone H3.3

SEQ ID NO: 31871 - protein, 136 aa, Arabidopsis thaliana; identical to SEQ ID NO: 26403
  peptide (1)..(136): Ceres Seq. ID no. 12577605
  misc_feature (17)..(135): Pfam Name: Core histone H2A/H2B/H3/H4 Pfam Description: Core histone H2A/H2B/H3/H4
  misc_feature (1)..(136): Homolog of NCBI NO: 37546835 NR Description: similar to histone protein Hist2h3c1 [Homo
  misc_feature (1)..(136): Homolog of NCBI NO: 34858260 NR Description: similar to histone protein Hist2h3c1 [Rattus
  misc_feature (1)..(136): Homolog of NCBI NO: 34858254 NR Description: similar to histone protein Hist2h3c1 [Rattus
  misc_feature (1)..(136): Homolog of NCBI NO: 30061401 NR Description: histone 2, H3ca1 [Mus musculus]
  misc_feature (1)..(136): Homolog of NCBI NO: 7305139 NR Description: histone 1, H3f; histone gene complex 1 [Mus
  misc_feature (1)..(136): Homolog of NCBI NO: 34876396 NR Description: similar to H3 histone family, member I [Rattus
  misc_feature (1)..(136): Homolog of NCBI NO: 2119013 NR Description: histone H3.2 protein - shrew mouse
  misc_feature (1)..(136): Homolog of NCBI NO: 34876364 NR Description: similar to CG31613-PA [Rattus norvegicus]
  misc_feature (1)..(136): Homolog of NCBI NO: 18698662 NR Description: disease-resistent-related protein [Oryza sativa]
  misc_feature (1)..(136): Homolog of NCBI NO: 15236103 NR Description: histone H3.3

SEQ ID NO: 31872 - DNA, 641 bp, Arabidopsis thaliana; identical to SEQ ID NO: 28282
  misc_feature (1)..(641): Ceres Seq. ID no. 12332727
  misc_feature: MA Experiment ID: 108434 Result: Up-regulated in Transcription
  misc_feature: MA Experiment 108434 PARAMETER Experiment Name: At_Root_Tips_cDNA_P Parameter: Tissue Value: Root Tips
  misc_feature: MA Experiment ID: 108462 Result: Down-regulated in Transcription
  misc_feature: MA Experiment 108462 PARAMETER Experiment Name: At_Germinating_Seeds_cDNA_P Parameter: Age (day) Value: 2 vs. 0
  misc_feature: MA Experiment 108462 PARAMETER Experiment Name: At_Germinating_Seeds_cDNA_P Parameter: Tissue Value: Germinating Seeds
  misc_feature: MA Experiment ID: 108463 Result: Down-regulated in Transcription
  misc_feature: MA Experiment 108463 PARAMETER Experiment Name: At_Germinating_Seeds_cDNA_P Parameter: Age (day) Value: 3 vs. 0
  misc_feature: MA Experiment 108463 PARAMETER Experiment Name: At_Germinating_Seeds_cDNA_P Parameter: Tissue Value: Germinating Seeds
  misc_feature: MA Experiment ID: 108464 Result: Down-regulated in Transcription
  misc_feature: MA Experiment 108464 PARAMETER Experiment Name: At_Germinating_Seeds_cDNA_P Parameter: Age (day) Value: 4 vs. 0
  misc_feature: MA Experiment 108464 PARAMETER Experiment Name: At_Germinating_Seeds_cDNA_P Parameter: Tissue Value: Germinating Seeds
  misc_feature: MA Experiment ID: 20000111 Result: Down-regulated in Transcription
  misc_feature: MA Experiment 20000111 PARAMETER Experiment Name: At_42deg_Heat_cDNA_P Parameter: Temperature (deg C) Value: 42 vs. 22
  misc_feature: MA Experiment 20000111 PARAMETER Experiment Name: At_42deg_Heat_cDNA_P Parameter: Timepoint (hr) Value: 6
  misc_feature: MA Experiment 20000111 PARAMETER Experiment Name: At_42deg_Heat_cDNA_P Parameter: Tissue Value: Aerial
  misc_feature: MA Experiment ID: 20000173 Result: Down-regulated in Transcription
  misc_feature: MA Experiment 20000173 PARAMETER Experiment Name: At_42deg_Heat_P Parameter: Age (day) Value: 14
  misc_feature: MA Experiment 20000173 PARAMETER Experiment Name: At_42deg_Heat_P Parameter: Organism Value: A. thaliana
  misc_feature: MA Experiment 20000173 PARAMETER Experiment Name: At_42deg_Heat_P Parameter: Plant Line Value: WS
  misc_feature: MA Experiment 20000173 PARAMETER Experiment Name: At_42deg_Heat_P Parameter: Temperature (deg C) Value: 42 vs. 22
  misc_feature: MA Experiment 20000173 PARAMETER Experiment Name: At_42deg_Heat_P Parameter: Timepoint (hr) Value: 6
  misc_feature: MA Experiment 20000173 PARAMETER Experiment Name: At_42deg_Heat_P Parameter: Tissue Value: Aerial
  misc_feature: MA Experiment ID: 20000184 Result: Down-regulated in Transcription
  misc_feature: MA Experiment 20000184 PARAMETER Experiment Name: At_Shoots__P Parameter: Age (day) Value: 7
  misc_feature: MA Experiment 20000184 PARAMETER Experiment Name: At_Shoots__P Parameter: Tissue Value: Shoots vs. Whole Plant
  misc_feature: MA Experiment ID: 20000227 Result: Up-regulated in Transcription
  misc_feature: MA Experiment 20000227 PARAMETER Experiment Name: At_Root-Tips-vs-Tops_P Parameter: Tissue Value: Root Tips vs. Root Tops
  misc_feature: MA Experiment ID: 20000234 Result: Up-regulated in Transcription
  misc_feature: MA Experiment 20000234 PARAMETER Experiment Name: At_Siliques_P Parameter: Age (day) Value: 21
  misc_feature: MA Experiment 20000234 PARAMETER Experiment Name: At_Siliques_P Parameter: Organism Value: A. thaliana
  misc_feature: MA Experiment 20000234 PARAMETER Experiment Name: At_Siliques_P Parameter: Plant Line Value: WS
  misc_feature: MA Experiment 20000234 PARAMETER Experiment Name: At_Siliques_P Parameter: Tissue Value: Less Than 5mm Siliques vs. Whole Plant
  misc_feature: MA Experiment ID: 20001560 Result: Up-regulated in Transcription
  misc_feature: MA Experiment 20001560 PARAMETER Experiment Name: At_Drought_Soil_Dry_P Parameter: Age (day) Value: 28
  misc_feature: MA Experiment 20001560 PARAMETER Experiment Name: At_Drought_Soil_Dry_P Parameter: Organism Value: A. thaliana
  misc_feature: MA Experiment 20001560 PARAMETER Experiment Name: At_Drought_Soil_Dry_P Parameter: Plant Line Value: WS
  misc_feature: MA Experiment 20001560 PARAMETER Experiment Name: At_Drought_Soil_Dry_P Parameter: Post Timepoint (hr) Value: None
  misc_feature: MA Experiment 20001560 PARAMETER Experiment Name: At_Drought_Soil_Dry_P Parameter: Post-Treatment Value: None
  misc_feature: MA Experiment 20001560 PARAMETER Experiment Name: At_Drought_Soil_Dry_P Parameter: Timepoint (day) Value: 14
  misc_feature: MA Experiment 20001560 PARAMETER Experiment Name: At_Drought_Soil_Dry_P Parameter: Treatment Value: Drought vs. No Drought

SEQ ID NO: 31873 - protein, 156 aa, Arabidopsis thaliana; identical to SEQ ID NO: 28283
  peptide (1)..(156): Ceres Seq. ID no. 12332728
  misc_feature (1)..(156): Homolog of NCBI NO: 18379269 NR Description: expressed protein

SEQ ID NO: 31874 - DNA, 1130 bp, Arabidopsis thaliana; identical to SEQ ID NO: 28284
  misc_feature (1)..(1130): Ceres Seq. ID no. 13491560
  misc_feature: MA Experiment ID: 20000171 Result: Down-regulated in Transcription
  misc_feature: MA Experiment 20000171 PARAMETER Experiment Name: At_42deg_Heat_P Parameter: Age (day) Value: 14
  misc_feature: MA Experiment 20000171 PARAMETER Experiment Name: At_42deg_Heat_P Parameter: Organism Value: A. thaliana
  misc_feature: MA Experiment 20000171 PARAMETER Experiment Name: At_42deg_Heat_P Parameter: Plant Line Value: WS
  misc_feature: MA Experiment 20000171 PARAMETER Experiment Name: At_42deg_Heat_P Parameter: Temperature (deg C) Value: 42 vs. 22
  misc_feature: MA Experiment 20000171 PARAMETER Experiment Name: At_42deg_Heat_P Parameter: Timepoint (hr) Value: 1
  misc_feature: MA Experiment 20000171 PARAMETER Experiment Name: At_42deg_Heat_P Parameter: Tissue Value: Aerial
  misc_feature: MA Experiment ID: 20000173 Result: Down-regulated in Transcription
  misc_feature: MA Experiment 20000173 PARAMETER Experiment Name: At_42deg_Heat_P Parameter: Age (day) Value: 14
  misc_feature: MA Experiment 20000173 PARAMETER Experiment Name: At_42deg_Heat_P Parameter: Organism Value: A. thaliana
  misc_feature: MA Experiment 20000173 PARAMETER Experiment Name: At_42deg_Heat_P Parameter: Plant Line Value: WS
  misc_feature: MA Experiment 20000173 PARAMETER Experiment Name: At_42deg_Heat_P Parameter: Temperature (deg C) Value: 42 vs. 22
  misc_feature: MA Experiment 20000173 PARAMETER Experiment Name: At_42deg_Heat_P Parameter: Timepoint (hr) Value: 6
  misc_feature: MA Experiment 20000173 PARAMETER Experiment Name: At_42deg_Heat_P Parameter: Tissue Value: Aerial
  misc_feature: MA Experiment ID: 20000184 Result: Up-regulated in Transcription
  misc_feature: MA Experiment 20000184 PARAMETER Experiment Name: At_Shoots__P Parameter: Age (day) Value: 7
  misc_feature: MA Experiment 20000184 PARAMETER Experiment Name: At_Shoots__P Parameter: Tissue Value: Shoots vs. Whole Plant
  misc_feature: MA Experiment ID: 20000185 Result: Up-regulated in Transcription
  misc_feature: MA Experiment 20000185 PARAMETER Experiment Name: At_Roots__P Parameter: Age (day) Value: 7 vs. 21
  misc_feature: MA Experiment 20000185 PARAMETER Experiment Name: At_Roots__P Parameter: Organism Value: A. thaliana
  misc_feature: MA Experiment 20000185 PARAMETER Experiment Name: At_Roots__P Parameter: Tissue Value: Roots vs. Whole Plant
  misc_feature: MA Experiment ID: 20000227 Result: Down-regulated in Transcription
  misc_feature: MA Experiment 20000227 PARAMETER Experiment Name: At_Root-Tips-vs-Tops_P Parameter: Tissue Value: Root Tips vs. Root Tops
  misc_feature: MA Experiment ID: 20000234 Result: Up-regulated in Transcription
  misc_feature: MA Experiment 20000234 PARAMETER Experiment Name: At_Siliques_P Parameter: Age (day) Value: 21
  misc_feature: MA Experiment 20000234 PARAMETER Experiment Name: At_Siliques_P Parameter: Organism Value: A. thaliana
  misc_feature: MA Experiment 20000234 PARAMETER Experiment Name: At_Siliques_P Parameter: Plant Line Value: WS
  misc_feature: MA Experiment 20000234 PARAMETER Experiment Name: At_Siliques_P Parameter: Tissue Value: Less Than 5mm Siliques vs. Whole Plant
  misc_feature: MA Experiment ID: 20000265 Result: Up-regulated in Transcription
  misc_feature: MA Experiment 20000265 PARAMETER Experiment Name: At_Open_Flower_P Parameter: Age (day) Value: 21
  misc_feature: MA Experiment 20000265 PARAMETER Experiment Name: At_Open_Flower_P Parameter: Plant Line Value: WS
  misc_feature: MA Experiment 20000265 PARAMETER Experiment Name: At_Open_Flower_P Parameter: Tissue Value: Closed Flower vs. Whole Plant
  misc_feature: MA Experiment ID: 20000286 Result: Up-regulated in Transcription
  misc_feature: MA Experiment 20000286 PARAMETER Experiment Name: At_Open_Flower_P Parameter: Age (day) Value: 21
  misc_feature: MA Experiment 20000286 PARAMETER Experiment Name: At_Open_Flower_P Parameter: Plant Line Value: WS
  misc_feature: MA Experiment 20000286 PARAMETER Experiment Name: At_Open_Flower_P Parameter: Tissue Value: Half Open vs. Whole Plant
  misc_feature: MA Experiment ID: 20000439 Result: Up-regulated in Transcription
  misc_feature: MA Experiment 20000439 PARAMETER Experiment Name: At_Roots__P Parameter: Age (day) Value: 14 vs. 21
  misc_feature: MA Experiment 20000439 PARAMETER Experiment Name: At_Roots__P Parameter: Organism Value: A. thaliana
  misc_feature: MA Experiment 20000439 PARAMETER Experiment Name: At_Roots__P Parameter: Tissue Value: Roots vs. Whole Plant
  misc_feature: MA Experiment ID: 20000794 Result: Down-regulated in Transcription
  misc_feature: MA Experiment 20000794 PARAMETER Experiment Name: At_Petals_P Parameter: Age (day) Value: 23-25 days
  misc_feature: MA Experiment 20000794 PARAMETER Experiment Name: At_Petals_P Parameter: Plant Line Value: WS
  misc_feature: MA Experiment 20000794 PARAMETER Experiment Name: At_Petals_P Parameter: Tissue Value: Petals vs. Whole plant
  misc_feature: MA Experiment ID: 20001557 Result: Up-regulated in Transcription
  misc_feature: MA Experiment 20001557 PARAMETER Experiment Name: At_Drought_Soil_Dry_P Parameter: Age (day) Value: 27
  misc_feature: MA Experiment 20001557 PARAMETER Experiment Name: At_Drought_Soil_Dry_P Parameter: Organism Value: A. thaliana
  misc_feature: MA Experiment 20001557 PARAMETER Experiment Name: At_Drought_Soil_Dry_P Parameter: Plant Line Value: WS
  misc_feature: MA Experiment 20001557 PARAMETER Experiment Name: At_Drought_Soil_Dry_P Parameter: Post Timepoint (hr) Value: 3
  misc_feature: MA Experiment 20001557 PARAMETER Experiment Name: At_Drought_Soil_Dry_P Parameter: Post-Treatment Value: Re-Water vs. No Drought
  misc_feature: MA Experiment 20001557 PARAMETER Experiment Name: At_Drought_Soil_Dry_P Parameter: Timepoint (day) Value: 13
  misc_feature: MA Experiment 20001557 PARAMETER Experiment Name: At_Drought_Soil_Dry_P Parameter: Treatment Value: Drought vs. No Drought
  misc_feature: MA Experiment ID: 20001558 Result: Up-regulated in Transcription
  misc_feature: MA Experiment 20001558 PARAMETER Experiment Name: At_Drought_Soil_Dry_P Parameter: Age (day) Value: 27
  misc_feature: MA Experiment 20001558 PARAMETER Experiment Name: At_Drought_Soil_Dry_P Parameter: Organism Value: A. thaliana
  misc_feature: MA Experiment 20001558 PARAMETER Experiment Name: At_Drought_Soil_Dry_P Parameter: Plant Line Value: WS
  misc_feature: MA Experiment 20001558 PARAMETER Experiment Name: At_Drought_Soil_Dry_P Parameter: Post Timepoint (hr) Value: 6
  misc_feature: MA Experiment 20001558 PARAMETER Experiment Name: At_Drought_Soil_Dry_P Parameter: Post-Treatment Value: Re-Water vs. No Drought
  misc_feature: MA Experiment 20001558 PARAMETER Experiment Name: At_Drought_Soil_Dry_P Parameter: Timepoint (day) Value: 13
  misc_feature: MA Experiment 20001558 PARAMETER Experiment Name: At_Drought_Soil_Dry_P Parameter: Treatment Value: Drought vs. No Drought
  misc_feature: MA Experiment ID: 20001560 Result: Up-regulated in Transcription
  misc_feature: MA Experiment 20001560 PARAMETER Experiment Name: At_Drought_Soil_Dry_P Parameter: Age (day) Value: 28
  misc_feature: MA Experiment 20001560 PARAMETER Experiment Name: At_Drought_Soil_Dry_P Parameter: Organism Value: A. thaliana
  misc_feature: MA Experiment 20001560 PARAMETER Experiment Name: At_Drought_Soil_Dry_P Parameter: Plant Line Value: WS
  misc_feature: MA Experiment 20001560 PARAMETER Experiment Name: At_Drought_Soil_Dry_P Parameter: Post Timepoint (hr) Value: None
  misc_feature: MA Experiment 20001560 PARAMETER Experiment Name: At_Drought_Soil_Dry_P Parameter: Post-Treatment Value: None
  misc_feature: MA Experiment 20001560 PARAMETER Experiment Name: At_Drought_Soil_Dry_P Parameter: Timepoint (day) Value: 14
  misc_feature: MA Experiment 20001560 PARAMETER Experiment Name: At_Drought_Soil_Dry_P Parameter: Treatment Value: Drought vs. No Drought
  misc_feature: MA Experiment ID: 20001904 Result: Up-regulated in Transcription
  misc_feature: MA Experiment 20001904 PARAMETER Experiment Name: At_Drought_Reproduction_P Parameter: Age (day) Value: 37
  misc_feature: MA Experiment 20001904 PARAMETER Experiment Name: At_Drought_Reproduction_P Parameter: Organism Value: A. thaliana
  misc_feature: MA Experiment 20001904 PARAMETER Experiment Name: At_Drought_Reproduction_P Parameter: Plant Line Value: WS
  misc_feature: MA Experiment 20001904 PARAMETER Experiment Name: At_Drought_Reproduction_P Parameter: Timepoint (day) Value: 7
  misc_feature: MA Experiment 20001904 PARAMETER Experiment Name: At_Drought_Reproduction_P Parameter: Tissue Value: Rosettes
  misc_feature: MA Experiment 20001904 PARAMETER Experiment Name: At_Drought_Reproduction_P Parameter: Treatment Value: Drought vs. No Drought
  misc_feature: MA Experiment ID: 20001911 Result: Down-regulated in Transcription
  misc_feature: MA Experiment 20001911 PARAMETER Experiment Name: At_Drought_Reproduction_P Parameter: Age (day) Value: 40
  misc_feature: MA Experiment 20001911 PARAMETER Experiment Name: At_Drought_Reproduction_P Parameter: Organism Value: A. thaliana
  misc_feature: MA Experiment 20001911 PARAMETER Experiment Name: At_Drought_Reproduction_P Parameter: Plant Line Value: WS
  misc_feature: MA Experiment 20001911 PARAMETER Experiment Name: At_Drought_Reproduction_P Parameter: Timepoint (day) Value: 10
  misc_feature: MA Experiment 20001911 PARAMETER Experiment Name: At_Drought_Reproduction_P Parameter: Tissue Value: Flowers
  misc_feature: MA Experiment 20001911 PARAMETER Experiment Name: At_Drought_Reproduction_P Parameter: Treatment Value: Drought vs. No Drought

SEQ ID NO: 31875 - protein, 335 aa, Arabidopsis thaliana; identical to SEQ ID NO: 28285
  peptide (1)..(335): Ceres Seq. ID no. 13491561
  misc_feature (78)..(109): Pfam Name: Carboxylesterase Pfam Description: Carboxylesterase
  misc_feature (10)..(327): Homolog of NCBI NO: 15229905 NR Description: expressed protein [Arabidopsis thaliana]
  misc_feature (10)..(327): Homolog of NCBI NO: 15240483 NR Description: expressed protein [Arabidopsis thaliana]
  misc_feature (33)..(328): Homolog of NCBI NO: 34904758 NR Description: hypothetical protein~predicted by GeneMark.hmm
  misc_feature (9)..(332): Homolog of NCBI NO: 34904772 NR Description: similar to carboxylesterase
  misc_feature (1)..(335): Homolog of NCBI NO: 34904760 NR Description: similar to carboxylesterase
  misc_feature (3)..(335): Homolog of NCBI NO: 34904774 NR Description: similar to carboxylesterase
  misc_feature (3)..(335): Homolog of NCBI NO: 34393714 NR Description: putative esterase [Oryza sativa (japonica
  misc_feature (1)..(327): Homolog of NCBI NO: 34904770 NR Description: similar to carboxylesterase
  misc_feature (1)..(335): Homolog of NCBI NO: 15237783 NR Description: expressed protein [Arabidopsis thaliana]
  misc_feature (1)..(335): Homolog of NCBI NO: 21618039 NR Description: unknown [Arabidopsis thaliana]

SEQ ID NO: 31876 - protein, 309 aa, Arabidopsis thaliana; identical to SEQ ID NO: 28286
  peptide (1)..(309): Ceres Seq. ID no. 13491562
  misc_feature (52)..(83): Pfam Name: Carboxylesterase Pfam Description: Carboxylesterase
  misc_feature (1)..(301): Homolog of NCBI NO: 15229905 NR Description: expressed protein [Arabidopsis thaliana]
  misc_feature (1)..(301): Homolog of NCBI NO: 15240483 NR Description: expressed protein [Arabidopsis thaliana]
  misc_feature (7)..(302): Homolog of NCBI NO: 34904758 NR Description: hypothetical protein~predicted by GeneMark.hmm
  misc_feature (1)..(306): Homolog of NCBI NO: 34904772 NR Description: similar to carboxylesterase
  misc_feature (1)..(309): Homolog of NCBI NO: 34904760 NR Description: similar to carboxylesterase
  misc_feature (1)..(309): Homolog of NCBI NO: 34904774 NR Description: similar to carboxylesterase
  misc_feature (1)..(309): Homolog of NCBI NO: 34393714 NR Description: putative esterase [Oryza sativa (japonica
  misc_feature (1)..(301): Homolog of NCBI NO: 34904770 NR Description: similar to carboxylesterase
  misc_feature (1)..(309): Homolog of NCBI NO: 15237783 NR Description: expressed protein [Arabidopsis thaliana]
  misc_feature (1)..(309): Homolog of NCBI NO: 21618039 NR Description: unknown [Arabidopsis thaliana]

SEQ ID NO: 31877 - DNA, 972 bp, Arabidopsis thaliana; identical to SEQ ID NO: 28287
  misc_feature (1)..(972): Ceres Seq. ID no. 13487354
  misc_feature: MA Experiment ID: 108434 Result: Down-regulated in Transcription
  misc_feature: MA Experiment 108434 PARAMETER Experiment Name: At_Root_Tips_cDNA_P Parameter: Tissue Value: Root Tips
  misc_feature: MA Experiment ID: 108594 Result: Down-regulated in Transcription
  misc_feature: MA Experiment 108594 PARAMETER Experiment Name: At_Ler-rhl_Root_cDNA_P Parameter: Plant Line Value: null
  misc_feature: MA Experiment ID: 108605 Result: Up-regulated in Transcription
  misc_feature: MA Experiment 108605 PARAMETER Experiment Name: At_100uM_ABA_cDNA_P Parameter: Timepoint (hr) Value: 6
  misc_feature: MA Experiment 108605 PARAMETER Experiment Name: At_100uM_ABA_cDNA_P Parameter: Tissue Value: Aerial
  misc_feature: MA Experiment 108605 PARAMETER Experiment Name: At_100uM_ABA_cDNA_P Parameter: Treatment Value: 100uM ABA vs. No Treatment
  misc_feature: MA Experiment ID: 20000111 Result: Down-regulated in Transcription
  misc_feature: MA Experiment 20000111 PARAMETER Experiment Name: At_42deg_Heat_cDNA_P Parameter: Temperature (deg C) Value: 42 vs. 22
  misc_feature: MA Experiment 20000111 PARAMETER Experiment Name: At_42deg_Heat_cDNA_P Parameter: Timepoint (hr) Value: 6
  misc_feature: MA Experiment 20000111 PARAMETER Experiment Name: At_42deg_Heat_cDNA_P Parameter: Tissue Value: Aerial
  misc_feature: MA Experiment ID: 20000184 Result: Down-regulated in Transcription
  misc_feature: MA Experiment 20000184 PARAMETER Experiment Name: At_Shoots__P Parameter: Age (day) Value: 7
  misc_feature: MA Experiment 20000184 PARAMETER Experiment Name: At_Shoots__P Parameter: Tissue Value: Shoots vs. Whole Plant
  misc_feature: MA Experiment ID: 20000227 Result: Down-regulated in Transcription
  misc_feature: MA Experiment 20000227 PARAMETER Experiment Name: At_Root-Tips-vs-Tops_P Parameter: Tissue Value: Root Tips vs. Root Tops
  misc_feature: MA Experiment ID: 20000234 Result: Down-regulated in Transcription
  misc_feature: MA Experiment 20000234 PARAMETER Experiment Name: At_Siliques_P Parameter: Age (day) Value: 21
  misc_feature: MA Experiment 20000234 PARAMETER Experiment Name: At_Siliques_P Parameter: Organism Value: A. thaliana
  misc_feature: MA Experiment 20000234 PARAMETER Experiment Name: At_Siliques_P Parameter: Plant Line Value: WS
  misc_feature: MA Experiment 20000234 PARAMETER Experiment Name: At_Siliques_P Parameter: Tissue Value: Less Than 5mm Siliques vs. Whole Plant
  misc_feature: MA Experiment ID: 20000265 Result: Down-regulated in Transcription
  misc_feature: MA Experiment 20000265 PARAMETER Experiment Name: At_Open_Flower_P Parameter: Age (day) Value: 21
  misc_feature: MA Experiment 20000265 PARAMETER Experiment Name: At_Open_Flower_P Parameter: Plant Line Value: WS
  misc_feature: MA Experiment 20000265 PARAMETER Experiment Name: At_Open_Flower_P Parameter: Tissue Value: Closed Flower vs. Whole Plant
  misc_feature: MA Experiment ID: 20000451 Result: Down-regulated in Transcription
  misc_feature: MA Experiment 20000451 PARAMETER Experiment Name: At_CS6879_Shoots-Roots_P Parameter: Age (day) Value: 14
  misc_feature: MA Experiment 20000451 PARAMETER Experiment Name: At_CS6879_Shoots-Roots_P Parameter: Organism Value: A. thaliana
  misc_feature: MA Experiment 20000451 PARAMETER Experiment Name: At_CS6879_Shoots-Roots_P Parameter: Plant Line Value: CS6879 vs. WS
  misc_feature: MA Experiment 20000451 PARAMETER Experiment Name: At_CS6879_Shoots-Roots_P Parameter: Tissue Value: Roots

SEQ ID NO: 31878 - protein, 244 aa, Arabidopsis thaliana; identical to SEQ ID NO: 28288
  peptide (1)..(244): Ceres Seq. ID no. 13487355
  misc_feature (9)..(77): Pfam Name: RNA recognition motif. (a.k.a. RRM, RBD, or RNP domain) Pfam Description: RNA recognition motif. (a.k.a. RRM, RBD, or RNP
  misc_feature (9)..(240): Homolog of NCBI NO: 18421342 NR Description: RNA recognition motif (RRM)-containing protein
  misc_feature (9)..(244): Homolog of NCBI NO: 38347069 NR Description: OSJNBa0006A01.10 [Oryza sativa (japonica
  misc_feature (9)..(244): Homolog of NCBI NO: 30695063 NR Description: RNA recognition motif (RRM)-containing protein
  misc_feature (9)..(244): Homolog of NCBI NO: 8809670 NR Description: gene_id:MSD23.5~pir||C71447~similar to unknown
  misc_feature (9)..(244): Homolog of NCBI NO: 18414951 NR Description: RNA recognition motif (RRM)-containing protein
  misc_feature (6)..(242): Homolog of NCBI NO: 6714467 NR Description: unknown protein [Arabidopsis thaliana]
  misc_feature (6)..(241): Homolog of NCBI NO: 38344906 NR Description: OSJNBb0079B02.9 [Oryza sativa (japonica
  misc_feature (1)..(239): Homolog of NCBI NO: 25518024 NR Description: F14L17.11 protein - Arabidopsis thaliana
  misc_feature (1)..(244): Homolog of NCBI NO: 21618045 NR Description: unknown [Arabidopsis thaliana]
  misc_feature (1)..(244): Homolog of NCBI NO: 18394102 NR Description: RNA recognition motif (RRM)-containing protein

SEQ ID NO: 31879 - protein, 194 aa, Arabidopsis thaliana; identical to SEQ ID NO: 28289
  peptide (1)..(194): Ceres Seq. ID no. 13487356
  misc_feature (1)..(190): Homolog of NCBI NO: 18421342 NR Description: RNA recognition motif (RRM)-containing protein
  misc_feature (1)..(194): Homolog of NCBI NO: 38347069 NR Description: OSJNBa0006A01.10 [Oryza sativa (japonica
  misc_feature (1)..(194): Homolog of NCBI NO: 30695063 NR Description: RNA recognition motif (RRM)-containing protein
  misc_feature (1)..(194): Homolog of NCBI NO: 8809670 NR Description: gene_id:MSD23.5~pir||C71447~similar to unknown
  misc_feature (1)..(194): Homolog of NCBI NO: 18414951 NR Description: RNA recognition motif (RRM)-containing protein
  misc_feature (1)..(192): Homolog of NCBI NO: 6714467 NR Description: unknown protein [Arabidopsis thaliana]
  misc_feature (1)..(191): Homolog of NCBI NO: 38344906 NR Description: OSJNBb0079B02.9 [Oryza sativa (japonica
  misc_feature (1)..(189): Homolog of NCBI NO: 25518024 NR Description: F14L17.11 protein - Arabidopsis thaliana
  misc_feature (1)..(194): Homolog of NCBI NO: 21618045 NR Description: unknown [Arabidopsis thaliana]
  misc_feature (1)..(194): Homolog of NCBI NO: 18394102 NR Description: RNA recognition motif (RRM)-containing protein

SEQ ID NO: 31880 - DNA, 1504 bp, Arabidopsis thaliana; identical to SEQ ID NO: 24511
  misc_feature (1)..(1504): Ceres Seq. ID no. 13647866
  misc_feature: MA Experiment ID: 108573 Result: Down-regulated in Transcription
  misc_feature: MA Experiment 108573 PARAMETER Experiment Name: At_Drought_cDNA_P Parameter: Timepoint (hr) Value: 6
  misc_feature: MA Experiment 108573 PARAMETER Experiment Name: At_Drought_cDNA_P Parameter: Tissue Value: Aerial
  misc_feature: MA Experiment 108573 PARAMETER Experiment Name: At_Drought_cDNA_P Parameter: Treatment Value: Drought vs. No Drought
  misc_feature: MA Experiment ID: 20000180 Result: Up-regulated in Transcription
  misc_feature: MA Experiment 20000180 PARAMETER Experiment Name: At_Germinating_Seeds_P Parameter: Age (hr) Value: 24 vs. 0
  misc_feature: MA Experiment 20000180 PARAMETER Experiment Name: At_Germinating_Seeds_P Parameter: Tissue Value: Germinating Seeds
  misc_feature: MA Experiment ID: 20000182 Result: Up-regulated in Transcription
  misc_feature: MA Experiment 20000182 PARAMETER Experiment Name: At_2mM_SA_P Parameter: Age (day) Value: 14
  misc_feature: MA Experiment 20000182 PARAMETER Experiment Name: At_2mM_SA_P Parameter: Organism Value: A. thaliana
  misc_feature: MA Experiment 20000182 PARAMETER Experiment Name: At_2mM_SA_P Parameter: Plant Line Value: WS
  misc_feature: MA Experiment 20000182 PARAMETER Experiment Name: At_2mM_SA_P Parameter: Timepoint (hr) Value: 6
  misc_feature: MA Experiment 20000182 PARAMETER Experiment Name: At_2mM_SA_P Parameter: Tissue Value: Aerial
  misc_feature: MA Experiment 20000182 PARAMETER Experiment Name: At_2mM_SA_P Parameter: Treatment Value: 2mM SA vs. No Treatment
  misc_feature: MA Experiment ID: 20000227 Result: Up-regulated in Transcription
  misc_feature: MA Experiment 20000227 PARAMETER Experiment Name: At_Root-Tips-vs-Tops_P Parameter: Tissue Value: Root Tips vs. Root Tops
  misc_feature: MA Experiment ID: 20000234 Result: Up-regulated in Transcription
  misc_feature: MA Experiment 20000234 PARAMETER Experiment Name: At_Siliques_P Parameter: Age (day) Value: 21
  misc_feature: MA Experiment 20000234 PARAMETER Experiment Name: At_Siliques_P Parameter: Organism Value: A. thaliana
  misc_feature: MA Experiment 20000234 PARAMETER Experiment Name: At_Siliques_P Parameter: Plant Line Value: WS
  misc_feature: MA Experiment 20000234 PARAMETER Experiment Name: At_Siliques_P Parameter: Tissue Value: Less Than 5mm Siliques vs. Whole Plant
  misc_feature: MA Experiment ID: 20000495 Result: Up-regulated in Transcription
  misc_feature: MA Experiment 20000495 PARAMETER Experiment Name: At_Guard_Cells_P Parameter: Harvest Date Value: 8/2/2002
  misc_feature: MA Experiment 20000495 PARAMETER Experiment Name: At_Guard_Cells_P Parameter: Organism Value: A. thaliana
  misc_feature: MA Experiment 20000495 PARAMETER Experiment Name: At_Guard_Cells_P Parameter: Tissue Value: Guard Cells vs. Leaves

SEQ ID NO: 31881 - protein, 361 aa, Arabidopsis thaliana; identical to SEQ ID NO: 24512
  peptide (1)..(361): Ceres Seq. ID no. 13647867
  misc_feature (17)..(358): Homolog of NCBI NO: 2501210 NR Description: PUTATIVE DISULFIDE ISOMERASE TIGA PRECURSOR
  misc_feature (10)..(358): Homolog of NCBI NO: 19114496 NR Description: putative protein disulfide isomerase (EC 5.3.4.1)
  misc_feature (165)..(361): Homolog of NCBI NO: 10180029 NR Description: putative protein disulfide-isomerase [Prunus
  misc_feature (13)..(357): Homolog of NCBI NO: 2627440 NR Description: protein disulfide isomerase; PDI; P5-like
  misc_feature (13)..(357): Homolog of NCBI NO: 28829383 NR Description: similar to Dictyostelium discoideum (Slime mold).
  misc_feature (14)..(357): Homolog of NCBI NO: 34897646 NR Description: putative disulfide-isomerase precursor [Oryza
  misc_feature (10)..(357): Homolog of NCBI NO: 34894982 NR Description: putative protein disulfide isomerase
  misc_feature (1)..(357): Homolog of NCBI NO: 7489183 NR Description: probable protein disulfide-isomerase (EC 5.3.4.1)
  misc_feature (1)..(357): Homolog of NCBI NO: 729442 NR Description: PROBABLE PROTEIN DISULFIDE ISOMERASE P5 PRECURSOR
  misc_feature (1)..(361): Homolog of NCBI NO: 15226610 NR Description: protein disulfide isomerase family [Arabidopsis
  misc_feature (17)..(358): Homolog of NCBI NO: 2501210 NR Description: PUTATIVE DISULFIDE ISOMERASE TIGA PRECURSOR
  misc_feature (10)..(358): Homolog of NCBI NO: 19114496 NR Description: putative protein disulfide isomerase (EC 5.3.4.1)
  misc_feature (165)..(361): Homolog of NCBI NO: 10180029 NR Description: putative protein disulfide-isomerase [Prunus
  misc_feature (13)..(357): Homolog of NCBI NO: 2627440 NR Description: protein disulfide isomerase; PDI; P5-like
  misc_feature (13)..(357): Homolog of NCBI NO: 28829383 NR Description: similar to Dictyostelium discoideum (Slime mold).
  misc_feature (14)..(357): Homolog of NCBI NO: 34897646 NR Description: putative disulfide-isomerase precursor [Oryza
  misc_feature (10)..(357): Homolog of NCBI NO: 34894982 NR Description: putative protein disulfide isomerase
  misc_feature (1)..(357): Homolog of NCBI NO: 7489183 NR Description: probable protein disulfide-isomerase (EC 5.3.4.1)
  misc_feature (1)..(357): Homolog of NCBI NO: 729442 NR Description: PROBABLE PROTEIN DISULFIDE ISOMERASE P5 PRECURSOR
  misc_feature (1)..(361): Homolog of NCBI NO: 15226610 NR Description: protein disulfide isomerase family [Arabidopsis

SEQ ID NO: 31882 - DNA, 970 bp, Arabidopsis thaliana; identical to SEQ ID NO: 28292
  misc_feature (1)..(970): Ceres Seq. ID no. 13592472
  misc_feature: MA Experiment ID: 108595 Result: Down-regulated in Transcription
  misc_feature: MA Experiment 108595 PARAMETER Experiment Name: At_Ler-pi_Ovule_cDNA_P Parameter: Plant Line Value: null
  misc_feature: MA Experiment ID: 20000071 Result: Down-regulated in Transcription
  misc_feature: MA Experiment 20000071 PARAMETER Experiment Name: At_100uM_ABA_Mutants_cDNA_P Parameter: Plant Line Value: CS8104
  misc_feature: MA Experiment 20000071 PARAMETER Experiment Name: At_100uM_ABA_Mutants_cDNA_P Parameter: Timepoint (hr) Value: 6
  misc_feature: MA Experiment 20000071 PARAMETER Experiment Name: At_100uM_ABA_Mutants_cDNA_P Parameter: Tissue Value: Aerial
  misc_feature: MA Experiment 20000071 PARAMETER Experiment Name: At_100uM_ABA_Mutants_cDNA_P Parameter: Treatment Value: 100uM ABA vs. No Treatment
  misc_feature: MA Experiment ID: 20000180 Result: Down-regulated in Transcription
  misc_feature: MA Experiment 20000180 PARAMETER Experiment Name: At_Germinating_Seeds_P Parameter: Age (hr) Value: 24 vs. 0
  misc_feature: MA Experiment 20000180 PARAMETER Experiment Name: At_Germinating_Seeds_P Parameter: Tissue Value: Germinating Seeds
  misc_feature: MA Experiment ID: 20000184 Result: Up-regulated in Transcription
  misc_feature: MA Experiment 20000184 PARAMETER Experiment Name: At_Shoots__P Parameter: Age (day) Value: 7
  misc_feature: MA Experiment 20000184 PARAMETER Experiment Name: At_Shoots__P Parameter: Tissue Value: Shoots vs. Whole Plant
  misc_feature: MA Experiment ID: 20000234 Result: Up-regulated in Transcription
  misc_feature: MA Experiment 20000234 PARAMETER Experiment Name: At_Siliques_P Parameter: Age (day) Value: 21
  misc_feature: MA Experiment 20000234 PARAMETER Experiment Name: At_Siliques_P Parameter: Organism Value: A. thaliana
  misc_feature: MA Experiment 20000234 PARAMETER Experiment Name: At_Siliques_P Parameter: Plant Line Value: WS
  misc_feature: MA Experiment 20000234 PARAMETER Experiment Name: At_Siliques_P Parameter: Tissue Value: Less Than 5mm Siliques vs. Whole Plant
  misc_feature: MA Experiment ID: 20001451 Result: Down-regulated in Transcription
  misc_feature: MA Experiment 20001451 PARAMETER Experiment Name: At_Far-red-induction_P Parameter: Age (day) Value: 7
  misc_feature: MA Experiment 20001451 PARAMETER Experiment Name: At_Far-red-induction_P Parameter: Light Value: Far-red vs. White
  misc_feature: MA Experiment 20001451 PARAMETER Experiment Name: At_Far-red-induction_P Parameter: Organism Value: A. thaliana
  misc_feature: MA Experiment 20001451 PARAMETER Experiment Name: At_Far-red-induction_P Parameter: Plant Line Value: Columbia
  misc_feature: MA Experiment 20001451 PARAMETER Experiment Name: At_Far-red-induction_P Parameter: Timepoint (hr) Value: 24
  misc_feature: MA Experiment 20001451 PARAMETER Experiment Name: At_Far-red-induction_P Parameter: Tissue Value: Whole Plant
  misc_feature: MA Experiment ID: 20001557 Result: Up-regulated in Transcription
  misc_feature: MA Experiment 20001557 PARAMETER Experiment Name: At_Drought_Soil_Dry_P Parameter: Age (day) Value: 27
  misc_feature: MA Experiment 20001557 PARAMETER Experiment Name: At_Drought_Soil_Dry_P Parameter: Organism Value: A. thaliana
  misc_feature: MA Experiment 20001557 PARAMETER Experiment Name: At_Drought_Soil_Dry_P Parameter: Plant Line Value: WS
  misc_feature: MA Experiment 20001557 PARAMETER Experiment Name: At_Drought_Soil_Dry_P Parameter: Post Timepoint (hr) Value: 3
  misc_feature: MA Experiment 20001557 PARAMETER Experiment Name: At_Drought_Soil_Dry_P Parameter: Post-Treatment Value: Re-Water vs. No Drought
  misc_feature: MA Experiment 20001557 PARAMETER Experiment Name: At_Drought_Soil_Dry_P Parameter: Timepoint (day) Value: 13
  misc_feature: MA Experiment 20001557 PARAMETER Experiment Name: At_Drought_Soil_Dry_P Parameter: Treatment Value: Drought vs. No Drought
  misc_feature: MA Experiment ID: 20001558 Result: Up-regulated in Transcription
  misc_feature: MA Experiment 20001558 PARAMETER Experiment Name: At_Drought_Soil_Dry_P Parameter: Age (day) Value: 27
  misc_feature: MA Experiment 20001558 PARAMETER Experiment Name: At_Drought_Soil_Dry_P Parameter: Organism Value: A. thaliana
  misc_feature: MA Experiment 20001558 PARAMETER Experiment Name: At_Drought_Soil_Dry_P Parameter: Plant Line Value: WS
  misc_feature: MA Experiment 20001558 PARAMETER Experiment Name: At_Drought_Soil_Dry_P Parameter: Post Timepoint (hr) Value: 6
  misc_feature: MA Experiment 20001558 PARAMETER Experiment Name: At_Drought_Soil_Dry_P Parameter: Post-Treatment Value: Re-Water vs. No Drought
  misc_feature: MA Experiment 20001558 PARAMETER Experiment Name: At_Drought_Soil_Dry_P Parameter: Timepoint (day) Value: 13
  misc_feature: MA Experiment 20001558 PARAMETER Experiment Name: At_Drought_Soil_Dry_P Parameter: Treatment Value: Drought vs. No Drought
  misc_feature: MA Experiment ID: 20001757 Result: Up-regulated in Transcription
  misc_feature: MA Experiment 20001757 PARAMETER Experiment Name: At_50mM_NH4NO3_L-to-H_P Parameter: Timepoint (hr) Value: 6
  misc_feature: MA Experiment 20001757 PARAMETER Experiment Name: At_50mM_NH4NO3_L-to-H_P Parameter: Tissue Value: Leaf
  misc_feature: MA Experiment 20001757 PARAMETER Experiment Name: At_50mM_NH4NO3_L-to-H_P Parameter: Treatment Value: 50mM NH4NO3 vs 100mM Mannitol

SEQ ID NO: 31883 - protein, 249 aa, Arabidopsis thaliana; identical to SEQ ID NO: 28293
  peptide (1)..(249): Ceres Seq. ID no. 13592473
  misc_feature (104)..(188): Pfam Name: Ribosomal protein S3, C-terminal domain Pfam Description: Ribosomal protein S3, C-terminal domain
  misc_feature (104)..(188): Pfam Name: Ribosomal protein S3, C-terminal domain Pfam Description: Ribosomal protein S3, C-terminal domain
  misc_feature (1)..(216): Homolog of NCBI NO: 27735393 NR Description: Similar to ribosomal protein S3 [Xenopus laevis]
  misc_feature (1)..(216): Homolog of NCBI NO: 6755372 NR Description: ribosomal protein S3 [Mus musculus]
  misc_feature (1)..(249): Homolog of NCBI NO: 133940 NR Description: 40S ribosomal protein S3A (S1A)
  misc_feature (1)..(216): Homolog of NCBI NO: 12847921 NR Description: unnamed protein product [Mus musculus]
  misc_feature (1)..(249): Homolog of NCBI NO: 38512247 NR Description: Ribosomal protein S3 [Silurana tropicalis]
  misc_feature (1)..(216): Homolog of NCBI NO: 27735393 NR Description: Similar to ribosomal protein S3 [Xenopus laevis]
  misc_feature (1)..(249): Homolog of NCBI NO: 133940 NR Description: 40S ribosomal protein S3A (S1A)
  misc_feature (1)..(249): Homolog of NCBI NO: 38512247 NR Description: Ribosomal protein S3 [Silurana tropicalis]
  misc_feature (1)..(249): Homolog of NCBI NO: 15232352 NR Description: 40S ribosomal protein S3 (RPS3B) [Arabidopsis
  misc_feature (1)..(247): Homolog of NCBI NO: 15225107 NR Description: 40S ribosomal protein S3 (RPS3A) [Arabidopsis
  misc_feature (1)..(249): Homolog of NCBI NO: 15238533 NR Description: 40S ribosomal protein S3 (RPS3C) [Arabidopsis
  misc_feature (3)..(230): Homolog of NCBI NO: 14192875 NR Description: Putative 40S ribosomal protein; contains
  misc_feature (1)..(225): Homolog of NCBI NO: 22204124 NR Description: putative 40S ribosomal protein S3 [Triticum
  misc_feature (1)..(216): Homolog of NCBI NO: 12847921 NR Description: unnamed protein product [Mus musculus]
  misc_feature (1)..(216): Homolog of NCBI NO: 6755372 NR Description: ribosomal protein S3 [Mus musculus]
  misc_feature (1)..(225): Homolog of NCBI NO: 22204124 NR Description: putative 40S ribosomal protein S3 [Triticum
  misc_feature (3)..(230): Homolog of NCBI NO: 14192875 NR Description: Putative 40S ribosomal protein; contains
  misc_feature (1)..(249): Homolog of NCBI NO: 15238533 NR Description: 40S ribosomal protein S3 (RPS3C) [Arabidopsis
  misc_feature (1)..(247): Homolog of NCBI NO: 15225107 NR Description: 40S ribosomal protein S3 (RPS3A) [Arabidopsis
  misc_feature (1)..(249): Homolog of NCBI NO: 15232352 NR Description: 40S ribosomal protein S3 (RPS3B) [Arabidopsis

SEQ ID NO: 31884 - protein, 206 aa, Arabidopsis thaliana; identical to SEQ ID NO: 28294
  peptide (1)..(206): Ceres Seq. ID no. 13592474
  misc_feature (61)..(145): Pfam Name: Ribosomal protein S3, C-terminal domain Pfam Description: Ribosomal protein S3, C-terminal domain
  misc_feature (61)..(145): Pfam Name: Ribosomal protein S3, C-terminal domain Pfam Description: Ribosomal protein S3, C-terminal domain
  misc_feature (1)..(173): Homolog of NCBI NO: 27735393 NR Description: Similar to ribosomal protein S3 [Xenopus laevis]
  misc_feature (1)..(173): Homolog of NCBI NO: 6755372 NR Description: ribosomal protein S3 [Mus musculus]
  misc_feature (1)..(206): Homolog of NCBI NO: 133940 NR Description: 40S ribosomal protein S3A (S1A)
  misc_feature (1)..(173): Homolog of NCBI NO: 12847921 NR Description: unnamed protein product [Mus musculus]
  misc_feature (1)..(206): Homolog of NCBI NO: 38512247 NR Description: Ribosomal protein S3 [Silurana tropicalis]
  misc_feature (1)..(173): Homolog of NCBI NO: 27735393 NR Description: Similar to ribosomal protein S3 [Xenopus laevis]
  misc_feature (1)..(206): Homolog of NCBI NO: 133940 NR Description: 40S ribosomal protein S3A (S1A)
  misc_feature (1)..(206): Homolog of NCBI NO: 38512247 NR Description: Ribosomal protein S3 [Silurana tropicalis]
  misc_feature (1)..(206): Homolog of NCBI NO: 15232352 NR Description: 40S ribosomal protein S3 (RPS3B) [Arabidopsis
  misc_feature (1)..(204): Homolog of NCBI NO: 15225107 NR Description: 40S ribosomal protein S3 (RPS3A) [Arabidopsis
  misc_feature (1)..(206): Homolog of NCBI NO: 15238533 NR Description: 40S ribosomal protein S3 (RPS3C) [Arabidopsis
  misc_feature (1)..(187): Homolog of NCBI NO: 14192875 NR Description: Putative 40S ribosomal protein; contains
  misc_feature (1)..(182): Homolog of NCBI NO: 22204124 NR Description: putative 40S ribosomal protein S3 [Triticum
  misc_feature (1)..(173): Homolog of NCBI NO: 12847921 NR Description: unnamed protein product [Mus musculus]
  misc_feature (1)..(173): Homolog of NCBI NO: 6755372 NR Description: ribosomal protein S3 [Mus musculus]
  misc_feature (1)..(182): Homolog of NCBI NO: 22204124 NR Description: putative 40S ribosomal protein S3 [Triticum
  misc_feature (1)..(187): Homolog of NCBI NO: 14192875 NR Description: Putative 40S ribosomal protein; contains
  misc_feature (1)..(206): Homolog of NCBI NO: 15238533 NR Description: 40S ribosomal protein S3 (RPS3C) [Arabidopsis
  misc_feature (1)..(204): Homolog of NCBI NO: 15225107 NR Description: 40S ribosomal protein S3 (RPS3A) [Arabidopsis
  misc_feature (1)..(206): Homolog of NCBI NO: 15232352 NR Description: 40S ribosomal protein S3 (RPS3B) [Arabidopsis

SEQ ID NO: 31885 - DNA, 871 bp, Arabidopsis thaliana; identical to SEQ ID NO: 28295
  misc_feature (1)..(871): Ceres Seq. ID no. 12328183
  misc_feature: MA Experiment ID: 108461 Result: Up-regulated in Transcription
  misc_feature: MA Experiment 108461 PARAMETER Experiment Name: At_Germinating_Seeds_cDNA_P Parameter: Age (day) Value: 1 vs. 0
  misc_feature: MA Experiment 108461 PARAMETER Experiment Name: At_Germinating_Seeds_cDNA_P Parameter: Tissue Value: Germinating Seeds
  misc_feature: MA Experiment ID: 108462 Result: Up-regulated in Transcription
  misc_feature: MA Experiment 108462 PARAMETER Experiment Name: At_Germinating_Seeds_cDNA_P Parameter: Age (day) Value: 2 vs. 0
  misc_feature: MA Experiment 108462 PARAMETER Experiment Name: At_Germinating_Seeds_cDNA_P Parameter: Tissue Value: Germinating Seeds
  misc_feature: MA Experiment ID: 108463 Result: Up-regulated in Transcription
  misc_feature: MA Experiment 108463 PARAMETER Experiment Name: At_Germinating_Seeds_cDNA_P Parameter: Age (day) Value: 3 vs. 0
  misc_feature: MA Experiment 108463 PARAMETER Experiment Name: At_Germinating_Seeds_cDNA_P Parameter: Tissue Value: Germinating Seeds
  misc_feature: MA Experiment ID: 108464 Result: Up-regulated in Transcription
  misc_feature: MA Experiment 108464 PARAMETER Experiment Name: At_Germinating_Seeds_cDNA_P Parameter: Age (day) Value: 4 vs. 0
  misc_feature: MA Experiment 108464 PARAMETER Experiment Name: At_Germinating_Seeds_cDNA_P Parameter: Tissue Value: Germinating Seeds
  misc_feature: MA Experiment ID: 108488 Result: Down-regulated in Transcription
  misc_feature: MA Experiment ID: 108489 Result: Up-regulated in Transcription
  misc_feature: MA Experiment ID: 108573 Result: Up-regulated in Transcription
  misc_feature: MA Experiment 108573 PARAMETER Experiment Name: At_Drought_cDNA_P Parameter: Timepoint (hr) Value: 6
  misc_feature: MA Experiment 108573 PARAMETER Experiment Name: At_Drought_cDNA_P Parameter: Tissue Value: Aerial
  misc_feature: MA Experiment 108573 PARAMETER Experiment Name: At_Drought_cDNA_P Parameter: Treatment Value: Drought vs. No Drought
  misc_feature: MA Experiment ID: 108579 Result: Up-regulated in Transcription
  misc_feature: MA Experiment 108579 PARAMETER Experiment Name: At_4deg_Cold_cDNA_P Parameter: Temperature (deg C) Value: 4 vs. 22
  misc_feature: MA Experiment 108579 PARAMETER Experiment Name: At_4deg_Cold_cDNA_P Parameter: Timepoint (hr) Value: 6
  misc_feature: MA Experiment 108579 PARAMETER Experiment Name: At_4deg_Cold_cDNA_P Parameter: Tissue Value: Aerial
  misc_feature: MA Experiment ID: 108594 Result: Down-regulated in Transcription
  misc_feature: MA Experiment 108594 PARAMETER Experiment Name: At_Ler-rhl_Root_cDNA_P Parameter: Plant Line Value: null
  misc_feature: MA Experiment ID: 20000111 Result: Down-regulated in Transcription
  misc_feature: MA Experiment 20000111 PARAMETER Experiment Name: At_42deg_Heat_cDNA_P Parameter: Temperature (deg C) Value: 42 vs. 22
  misc_feature: MA Experiment 20000111 PARAMETER Experiment Name: At_42deg_Heat_cDNA_P Parameter: Timepoint (hr) Value: 6
  misc_feature: MA Experiment 20000111 PARAMETER Experiment Name: At_42deg_Heat_cDNA_P Parameter: Tissue Value: Aerial
  misc_feature: MA Experiment ID: 20000113 Result: Down-regulated in Transcription
  misc_feature: MA Experiment 20000113 PARAMETER Experiment Name: At_42deg_Heat_cDNA_P Parameter: Temperature (deg C) Value: 42 vs. 22
  misc_feature: MA Experiment 20000113 PARAMETER Experiment Name: At_42deg_Heat_cDNA_P Parameter: Timepoint (hr) Value: 8
  misc_feature: MA Experiment 20000113 PARAMETER Experiment Name: At_42deg_Heat_cDNA_P Parameter: Tissue Value: Aerial
  misc_feature: MA Experiment ID: 20000173 Result: Down-regulated in Transcription
  misc_feature: MA Experiment 20000173 PARAMETER Experiment Name: At_42deg_Heat_P Parameter: Age (day) Value: 14
  misc_feature: MA Experiment 20000173 PARAMETER Experiment Name: At_42deg_Heat_P Parameter: Organism Value: A. thaliana
  misc_feature: MA Experiment 20000173 PARAMETER Experiment Name: At_42deg_Heat_P Parameter: Plant Line Value: WS
  misc_feature: MA Experiment 20000173 PARAMETER Experiment Name: At_42deg_Heat_P Parameter: Temperature (deg C) Value: 42 vs. 22
  misc_feature: MA Experiment 20000173 PARAMETER Experiment Name: At_42deg_Heat_P Parameter: Timepoint (hr) Value: 6
  misc_feature: MA Experiment 20000173 PARAMETER Experiment Name: At_42deg_Heat_P Parameter: Tissue Value: Aerial
  misc_feature: MA Experiment ID: 20000182 Result: Down-regulated in Transcription
  misc_feature: MA Experiment 20000182 PARAMETER Experiment Name: At_2mM_SA_P Parameter: Age (day) Value: 14
  misc_feature: MA Experiment 20000182 PARAMETER Experiment Name: At_2mM_SA_P Parameter: Organism Value: A. thaliana
  misc_feature: MA Experiment 20000182 PARAMETER Experiment Name: At_2mM_SA_P Parameter: Plant Line Value: WS
  misc_feature: MA Experiment 20000182 PARAMETER Experiment Name: At_2mM_SA_P Parameter: Timepoint (hr) Value: 6
  misc_feature: MA Experiment 20000182 PARAMETER Experiment Name: At_2mM_SA_P Parameter: Tissue Value: Aerial
  misc_feature: MA Experiment 20000182 PARAMETER Experiment Name: At_2mM_SA_P Parameter: Treatment Value: 2mM SA vs. No Treatment
  misc_feature: MA Experiment ID: 20000184 Result: Down-regulated in Transcription
  misc_feature: MA Experiment 20000184 PARAMETER Experiment Name: At_Shoots__P Parameter: Age (day) Value: 7
  misc_feature: MA Experiment 20000184 PARAMETER Experiment Name: At_Shoots__P Parameter: Tissue Value: Shoots vs. Whole Plant
  misc_feature: MA Experiment ID: 20000264 Result: Up-regulated in Transcription
  misc_feature: MA Experiment 20000264 PARAMETER Experiment Name: At_Open_Flower_P Parameter: Age (day) Value: 21
  misc_feature: MA Experiment 20000264 PARAMETER Experiment Name: At_Open_Flower_P Parameter: Plant Line Value: WS
  misc_feature: MA Experiment 20000264 PARAMETER Experiment Name: At_Open_Flower_P Parameter: Tissue Value: Open Flower vs. Whole Plant
  misc_feature: MA Experiment ID: 20000438 Result: Down-regulated in Transcription
  misc_feature: MA Experiment 20000438 PARAMETER Experiment Name: At_Shoots__P Parameter: Age (day) Value: 14
  misc_feature: MA Experiment 20000438 PARAMETER Experiment Name: At_Shoots__P Parameter: Tissue Value: Shoots vs. Whole Plant
  misc_feature: MA Experiment ID: 20000794 Result: Up-regulated in Transcription
  misc_feature: MA Experiment 20000794 PARAMETER Experiment Name: At_Petals_P Parameter: Age (day) Value: 23-25 days
  misc_feature: MA Experiment 20000794 PARAMETER Experiment Name: At_Petals_P Parameter: Plant Line Value: WS
  misc_feature: MA Experiment 20000794 PARAMETER Experiment Name: At_Petals_P Parameter: Tissue Value: Petals vs. Whole plant
  misc_feature: MA Experiment ID: 20001757 Result: Down-regulated in Transcription
  misc_feature: MA Experiment 20001757 PARAMETER Experiment Name: At_50mM_NH4NO3_L-to-H_P Parameter: Timepoint (hr) Value: 6
  misc_feature: MA Experiment 20001757 PARAMETER Experiment Name: At_50mM_NH4NO3_L-to-H_P Parameter: Tissue Value: Leaf
  misc_feature: MA Experiment 20001757 PARAMETER Experiment Name: At_50mM_NH4NO3_L-to-H_P Parameter: Treatment Value: 50mM NH4NO3 vs 100mM Mannitol
  misc_feature: MA Experiment ID: 20001904 Result: Up-regulated in Transcription
  misc_feature: MA Experiment 20001904 PARAMETER Experiment Name: At_Drought_Reproduction_P Parameter: Age (day) Value: 37
  misc_feature: MA Experiment 20001904 PARAMETER Experiment Name: At_Drought_Reproduction_P Parameter: Organism Value: A. thaliana
  misc_feature: MA Experiment 20001904 PARAMETER Experiment Name: At_Drought_Reproduction_P Parameter: Plant Line Value: WS
  misc_feature: MA Experiment 20001904 PARAMETER Experiment Name: At_Drought_Reproduction_P Parameter: Timepoint (day) Value: 7
  misc_feature: MA Experiment 20001904 PARAMETER Experiment Name: At_Drought_Reproduction_P Parameter: Tissue Value: Rosettes
  misc_feature: MA Experiment 20001904 PARAMETER Experiment Name: At_Drought_Reproduction_P Parameter: Treatment Value: Drought vs. No Drought
  misc_feature: MA Experiment ID: 20001910 Result: Down-regulated in Transcription
  misc_feature: MA Experiment 20001910 PARAMETER Experiment Name: At_Drought_Reproduction_P Parameter: Age (day) Value: 37
  misc_feature: MA Experiment 20001910 PARAMETER Experiment Name: At_Drought_Reproduction_P Parameter: Organism Value: A. thaliana
  misc_feature: MA Experiment 20001910 PARAMETER Experiment Name: At_Drought_Reproduction_P Parameter: Plant Line Value: WS
  misc_feature: MA Experiment 20001910 PARAMETER Experiment Name: At_Drought_Reproduction_P Parameter: Timepoint (day) Value: 7
  misc_feature: MA Experiment 20001910 PARAMETER Experiment Name: At_Drought_Reproduction_P Parameter: Tissue Value: Flowers
  misc_feature: MA Experiment 20001910 PARAMETER Experiment Name: At_Drought_Reproduction_P Parameter: Treatment Value: Drought vs. No Drought

SEQ ID NO: 31886 - protein, 222 aa, Arabidopsis thaliana; identical to SEQ ID NO: 28296
  peptide (1)..(222): Ceres Seq. ID no. 12328184
  misc_feature (22)..(211): Pfam Name: Ribonuclease T2 family Pfam Description: Ribonuclease T2 family
  misc_feature (3)..(222): Homolog of NCBI NO: 7768564 NR Description: RNase [Nicotiana tabacum]
  misc_feature (3)..(222): Homolog of NCBI NO: 7435266 NR Description: ribonuclease M5 (EC 3.1.-.-) precursor,
  misc_feature (17)..(222): Homolog of NCBI NO: 21555182 NR Description: ribonuclease, RNS1 [Arabidopsis thaliana]
  misc_feature (17)..(222): Homolog of NCBI NO: 15227068 NR Description: ribonuclease, RNS1
  misc_feature (5)..(222): Homolog of NCBI NO: 9081845 NR Description: S-like ribonuclease [Prunus dulcis]
  misc_feature (7)..(222): Homolog of NCBI NO: 3860325 NR Description: ribonuclease T2 [Cicer arietinum]
  misc_feature (5)..(222): Homolog of NCBI NO: 9957752 NR Description: S-like ribonuclease [Prunus dulcis]
  misc_feature (5)..(222): Homolog of NCBI NO: 2118017 NR Description: ribonuclease non-S (EC 3.1.-.-) precursor -
  misc_feature (7)..(222): Homolog of NCBI NO: 18394085 NR Description: ribonuclease; protein id: At1g14220.1
  misc_feature (1)..(222): Homolog of NCBI NO: 18396065 NR Description: ribonuclease, RNS3

SEQ ID NO: 31887 - protein, 136 aa, Arabidopsis thaliana; identical to SEQ ID NO: 28297
  peptide (1)..(136): Ceres Seq. ID no. 12328185
  misc_feature (1)..(125): Pfam Name: Ribonuclease T2 family Pfam Description: Ribonuclease T2 family
  misc_feature (1)..(136): Homolog of NCBI NO: 7768564 NR Description: RNase [Nicotiana tabacum]
  misc_feature (1)..(136): Homolog of NCBI NO: 7435266 NR Description: ribonuclease M5 (EC 3.1.-.-) precursor,
  misc_feature (1)..(136): Homolog of NCBI NO: 21555182 NR Description: ribonuclease, RNS1 [Arabidopsis thaliana]
  misc_feature (1)..(136): Homolog of NCBI NO: 15227068 NR Description: ribonuclease, RNS1
  misc_feature (1)..(136): Homolog of NCBI NO: 9081845 NR Description: S-like ribonuclease [Prunus dulcis]
  misc_feature (1)..(136): Homolog of NCBI NO: 3860325 NR Description: ribonuclease T2 [Cicer arietinum]
  misc_feature (1)..(136): Homolog of NCBI NO: 9957752 NR Description: S-like ribonuclease [Prunus dulcis]
  misc_feature (1)..(136): Homolog of NCBI NO: 2118017 NR Description: ribonuclease non-S (EC 3.1.-.-) precursor -
  misc_feature (1)..(136): Homolog of NCBI NO: 18394085 NR Description: ribonuclease; protein id: At1g14220.1
  misc_feature (1)..(136): Homolog of NCBI NO: 18396065 NR Description: ribonuclease, RNS3

SEQ ID NO: 31888 - protein, 118 aa, Arabidopsis thaliana; identical to SEQ ID NO: 28298
  peptide (1)..(118): Ceres Seq. ID no. 12328186
  misc_feature (1)..(107): Pfam Name: Ribonuclease T2 family Pfam Description: Ribonuclease T2 family
  misc_feature (1)..(118): Homolog of NCBI NO: 7768564 NR Description: RNase [Nicotiana tabacum]
  misc_feature (1)..(118): Homolog of NCBI NO: 7435266 NR Description: ribonuclease M5 (EC 3.1.-.-) precursor,
  misc_feature (1)..(118): Homolog of NCBI NO: 21555182 NR Description: ribonuclease, RNS1 [Arabidopsis thaliana]
  misc_feature (1)..(118): Homolog of NCBI NO: 15227068 NR Description: ribonuclease, RNS1
  misc_feature (1)..(118): Homolog of NCBI NO: 9081845 NR Description: S-like ribonuclease [Prunus dulcis]
  misc_feature (1)..(118): Homolog of NCBI NO: 3860325 NR Description: ribonuclease T2 [Cicer arietinum]
  misc_feature (1)..(118): Homolog of NCBI NO: 9957752 NR Description: S-like ribonuclease [Prunus dulcis]
  misc_feature (1)..(118): Homolog of NCBI NO: 2118017 NR Description: ribonuclease non-S (EC 3.1.-.-) precursor -
  misc_feature (1)..(118): Homolog of NCBI NO: 18394085 NR Description: ribonuclease; protein id: At1g14220.1
  misc_feature (1)..(118): Homolog of NCBI NO: 18396065 NR Description: ribonuclease, RNS3

SEQ ID NO: 31889 - DNA, 629 bp, Arabidopsis thaliana; identical to SEQ ID NO: 28299
  misc_feature (1)..(629): Ceres Seq. ID no. 12680276
  misc_feature: MA Experiment ID: 108435 Result: Down-regulated in Transcription
  misc_feature: MA Experiment 108435 PARAMETER Experiment Name: At_stm_Mutants_cDNA_P Parameter: Plant Line Value: wt Landsburg vs stm
  misc_feature: MA Experiment 108435 PARAMETER Experiment Name: At_stm_Mutants_cDNA_P Parameter: Tissue Value: Shoot Apical Meristem Region
  misc_feature: MA Experiment ID: 108461 Result: Up-regulated in Transcription
  misc_feature: MA Experiment 108461 PARAMETER Experiment Name: At_Germinating_Seeds_cDNA_P Parameter: Age (day) Value: 1 vs. 0
  misc_feature: MA Experiment 108461 PARAMETER Experiment Name: At_Germinating_Seeds_cDNA_P Parameter: Tissue Value: Germinating Seeds
  misc_feature: MA Experiment ID: 108462 Result: Up-regulated in Transcription
  misc_feature: MA Experiment 108462 PARAMETER Experiment Name: At_Germinating_Seeds_cDNA_P Parameter: Age (day) Value: 2 vs. 0
  misc_feature: MA Experiment 108462 PARAMETER Experiment Name: At_Germinating_Seeds_cDNA_P Parameter: Tissue Value: Germinating Seeds
  misc_feature: MA Experiment ID: 108463 Result: Up-regulated in Transcription
  misc_feature: MA Experiment 108463 PARAMETER Experiment Name: At_Germinating_Seeds_cDNA_P Parameter: Age (day) Value: 3 vs. 0
  misc_feature: MA Experiment 108463 PARAMETER Experiment Name: At_Germinating_Seeds_cDNA_P Parameter: Tissue Value: Germinating Seeds
  misc_feature: MA Experiment ID: 108464 Result: Up-regulated in Transcription
  misc_feature: MA Experiment 108464 PARAMETER Experiment Name: At_Germinating_Seeds_cDNA_P Parameter: Age (day) Value: 4 vs. 0
  misc_feature: MA Experiment 108464 PARAMETER Experiment Name: At_Germinating_Seeds_cDNA_P Parameter: Tissue Value: Germinating Seeds
  misc_feature: MA Experiment ID: 108488 Result: Up-regulated in Transcription
  misc_feature: MA Experiment ID: 108489 Result: Down-regulated in Transcription
  misc_feature: MA Experiment ID: 108594 Result: Down-regulated in Transcription
  misc_feature: MA Experiment 108594 PARAMETER Experiment Name: At_Ler-rhl_Root_cDNA_P Parameter: Plant Line Value: null
  misc_feature: MA Experiment ID: 108595 Result: Down-regulated in Transcription
  misc_feature: MA Experiment 108595 PARAMETER Experiment Name: At_Ler-pi_Ovule_cDNA_P Parameter: Plant Line Value: null
  misc_feature: MA Experiment ID: 20000184 Result: Up-regulated in Transcription
  misc_feature: MA Experiment 20000184 PARAMETER Experiment Name: At_Shoots__P Parameter: Age (day) Value: 7
  misc_feature: MA Experiment 20000184 PARAMETER Experiment Name: At_Shoots__P Parameter: Tissue Value: Shoots vs. Whole Plant
  misc_feature: MA Experiment ID: 20000224 Result: Down-regulated in Transcription
  misc_feature: MA Experiment ID: 20000438 Result: Up-regulated in Transcription
  misc_feature: MA Experiment 20000438 PARAMETER Experiment Name: At_Shoots__P Parameter: Age (day) Value: 14
  misc_feature: MA Experiment 20000438 PARAMETER Experiment Name: At_Shoots__P Parameter: Tissue Value: Shoots vs. Whole Plant
  misc_feature: MA Experiment ID: 20000495 Result: Down-regulated in Transcription
  misc_feature: MA Experiment 20000495 PARAMETER Experiment Name: At_Guard_Cells_P Parameter: Harvest Date Value: 8/2/2002
  misc_feature: MA Experiment 20000495 PARAMETER Experiment Name: At_Guard_Cells_P Parameter: Organism Value: A. thaliana
  misc_feature: MA Experiment 20000495 PARAMETER Experiment Name: At_Guard_Cells_P Parameter: Tissue Value: Guard Cells vs. Leaves

SEQ ID NO: 31890 - protein, 145 aa, Arabidopsis thaliana; identical to SEQ ID NO: 28300
  peptide (1)..(145): Ceres Seq. ID no. 12680277
  misc_feature (6)..(145): Pfam Name: Photosystem I reaction centre subunit VI Pfam Description: Photosystem I reaction centre subunit VI
  misc_feature (6)..(145): Pfam Name: Photosystem I reaction centre subunit VI Pfam Description: Photosystem I reaction centre subunit VI
  misc_feature (1)..(145): Homolog of NCBI NO: 445929 NR Description: photosystem I:SUBUNIT=PS I-H
  misc_feature (1)..(145): Homolog of NCBI NO: 445928 NR Description: photosystem I:SUBUNIT=PS I-H
  misc_feature (1)..(145): Homolog of NCBI NO: 7443140 NR Description: photosystem I psaH precursor - wood tobacco
  misc_feature (1)..(145): Homolog of NCBI NO: 7443139 NR Description: photosystem I protein psaH precursor - wood
  misc_feature (1)..(145): Homolog of NCBI NO: 131199 NR Description: Photosystem I reaction center subunit VI,
  misc_feature (1)..(145): Homolog of NCBI NO: 445929 NR Description: photosystem I:SUBUNIT=PS I-H
  misc_feature (1)..(145): Homolog of NCBI NO: 7443140 NR Description: photosystem I psaH precursor - wood tobacco
  misc_feature (1)..(145): Homolog of NCBI NO: 131199 NR Description: Photosystem I reaction center subunit VI,
  misc_feature (1)..(145): Homolog of NCBI NO: 15233291 NR Description: photosystem I subunit VI precursor
  misc_feature (1)..(145): Homolog of NCBI NO: 15218186 NR Description: photosystem I subunit VI precursor
  misc_feature (1)..(145): Homolog of NCBI NO: 3914442 NR Description: Photosystem I reaction center subunit VI,
  misc_feature (1)..(145): Homolog of NCBI NO: 7443138 NR Description: photosystem I protein psaH precursor - wood
  misc_feature (1)..(145): Homolog of NCBI NO: 33520419 NR Description: photosystem I psaH protein [Trifolium pratense]
  misc_feature (1)..(145): Homolog of NCBI NO: 7443139 NR Description: photosystem I protein psaH precursor - wood
  misc_feature (1)..(145): Homolog of NCBI NO: 445928 NR Description: photosystem I:SUBUNIT=PS I-H
  misc_feature (1)..(145): Homolog of NCBI NO: 33520419 NR Description: photosystem I psaH protein [Trifolium pratense]
  misc_feature (1)..(145): Homolog of NCBI NO: 7443138 NR Description: photosystem I protein psaH precursor - wood
  misc_feature (1)..(145): Homolog of NCBI NO: 3914442 NR Description: Photosystem I reaction center subunit VI,
  misc_feature (1)..(145): Homolog of NCBI NO: 15218186 NR Description: photosystem I subunit VI precursor
  misc_feature (1)..(145): Homolog of NCBI NO: 15233291 NR Description: photosystem I subunit VI precursor

SEQ ID NO: 31891 - DNA, 1292 bp, Arabidopsis thaliana; identical to SEQ ID NO: 28301
  misc_feature (1)..(1292): Ceres Seq. ID no. 12715029
  misc_feature: MA Experiment ID: 108434 Result: Down-regulated in Transcription
  misc_feature: MA Experiment 108434 PARAMETER Experiment Name: At_Root_Tips_cDNA_P Parameter: Tissue Value: Root Tips
  misc_feature: MA Experiment ID: 108461 Result: Up-regulated in Transcription
  misc_feature: MA Experiment 108461 PARAMETER Experiment Name: At_Germinating_Seeds_cDNA_P Parameter: Age (day) Value: 1 vs. 0
  misc_feature: MA Experiment 108461 PARAMETER Experiment Name: At_Germinating_Seeds_cDNA_P Parameter: Tissue Value: Germinating Seeds
  misc_feature: MA Experiment ID: 108462 Result: Up-regulated in Transcription
  misc_feature: MA Experiment 108462 PARAMETER Experiment Name: At_Germinating_Seeds_cDNA_P Parameter: Age (day) Value: 2 vs. 0
  misc_feature: MA Experiment 108462 PARAMETER Experiment Name: At_Germinating_Seeds_cDNA_P Parameter: Tissue Value: Germinating Seeds
  misc_feature: MA Experiment ID: 108463 Result: Up-regulated in Transcription
  misc_feature: MA Experiment 108463 PARAMETER Experiment Name: At_Germinating_Seeds_cDNA_P Parameter: Age (day) Value: 3 vs. 0
  misc_feature: MA Experiment 108463 PARAMETER Experiment Name: At_Germinating_Seeds_cDNA_P Parameter: Tissue Value: Germinating Seeds
  misc_feature: MA Experiment ID: 108464 Result: Up-regulated in Transcription
  misc_feature: MA Experiment 108464 PARAMETER Experiment Name: At_Germinating_Seeds_cDNA_P Parameter: Age (day) Value: 4 vs. 0
  misc_feature: MA Experiment 108464 PARAMETER Experiment Name: At_Germinating_Seeds_cDNA_P Parameter: Tissue Value: Germinating Seeds
  misc_feature: MA Experiment ID: 108561 Result: Up-regulated in Transcription
  misc_feature: MA Experiment 108561 PARAMETER Experiment Name: At_100uM_ABA_cDNA_P Parameter: Timepoint (hr) Value: 6
  misc_feature: MA Experiment 108561 PARAMETER Experiment Name: At_100uM_ABA_cDNA_P Parameter: Tissue Value: Aerial
  misc_feature: MA Experiment 108561 PARAMETER Experiment Name: At_100uM_ABA_cDNA_P Parameter: Treatment Value: 100uM ABA vs. No Treatment
  misc_feature: MA Experiment ID: 108569 Result: Up-regulated in Transcription
  misc_feature: MA Experiment 108569 PARAMETER Experiment Name: At_0.001%_MeJA__cDNA_P Parameter: Timepoint (hr) Value: 6
  misc_feature: MA Experiment 108569 PARAMETER Experiment Name: At_0.001%_MeJA__cDNA_P Parameter: Tissue Value: Aerial
  misc_feature: MA Experiment 108569 PARAMETER Experiment Name: At_0.001%_MeJA__cDNA_P Parameter: Treatment Value: 0.001% MeJA vs. No Treatment
  misc_feature: MA Experiment ID: 108573 Result: Up-regulated in Transcription
  misc_feature: MA Experiment 108573 PARAMETER Experiment Name: At_Drought_cDNA_P Parameter: Timepoint (hr) Value: 6
  misc_feature: MA Experiment 108573 PARAMETER Experiment Name: At_Drought_cDNA_P Parameter: Tissue Value: Aerial
  misc_feature: MA Experiment 108573 PARAMETER Experiment Name: At_Drought_cDNA_P Parameter: Treatment Value: Drought vs. No Drought
  misc_feature: MA Experiment ID: 108574 Result: Up-regulated in Transcription
  misc_feature: MA Experiment 108574 PARAMETER Experiment Name: At_Wounding__cDNA_P Parameter: Timepoint (hr) Value: 1
  misc_feature: MA Experiment 108574 PARAMETER Experiment Name: At_Wounding__cDNA_P Parameter: Tissue Value: Aerial
  misc_feature: MA Experiment 108574 PARAMETER Experiment Name: At_Wounding__cDNA_P Parameter: Treatment Value: Wounding vs. No Wounding
  misc_feature: MA Experiment ID: 108577 Result: Up-regulated in Transcription
  misc_feature: MA Experiment 108577 PARAMETER Experiment Name: At_42deg_Heat_cDNA_P Parameter: Temperature (deg C) Value: 42 vs. 22
  misc_feature: MA Experiment 108577 PARAMETER Experiment Name: At_42deg_Heat_cDNA_P Parameter: Timepoint (hr) Value: 6
  misc_feature: MA Experiment 108577 PARAMETER Experiment Name: At_42deg_Heat_cDNA_P Parameter: Tissue Value: Aerial
  misc_feature: MA Experiment ID: 108585 Result: Up-regulated in Transcription
  misc_feature: MA Experiment 108585 PARAMETER Experiment Name: At_5mM_NaNP_cDNA_P Parameter: Timepoint (hr) Value: 6
  misc_feature: MA Experiment 108585 PARAMETER Experiment Name: At_5mM_NaNP_cDNA_P Parameter: Tissue Value: Aerial
  misc_feature: MA Experiment 108585 PARAMETER Experiment Name: At_5mM_NaNP_cDNA_P Parameter: Treatment Value: null
  misc_feature: MA Experiment ID: 108605 Result: Up-regulated in Transcription
  misc_feature: MA Experiment 108605 PARAMETER Experiment Name: At_100uM_ABA_cDNA_P Parameter: Timepoint (hr) Value: 6
  misc_feature: MA Experiment 108605 PARAMETER Experiment Name: At_100uM_ABA_cDNA_P Parameter: Tissue Value: Aerial
  misc_feature: MA Experiment 108605 PARAMETER Experiment Name: At_100uM_ABA_cDNA_P Parameter: Treatment Value: 100uM ABA vs. No Treatment
  misc_feature: MA Experiment ID: 108607 Result: Up-regulated in Transcription
  misc_feature: MA Experiment 108607 PARAMETER Experiment Name: At_100uM_ABA_cDNA_P Parameter: Timepoint (hr) Value: 4
  misc_feature: MA Experiment 108607 PARAMETER Experiment Name: At_100uM_ABA_cDNA_P Parameter: Tissue Value: Aerial
  misc_feature: MA Experiment 108607 PARAMETER Experiment Name: At_100uM_ABA_cDNA_P Parameter: Treatment Value: 100uM ABA vs. No Treatment
  misc_feature: MA Experiment ID: 108608 Result: Up-regulated in Transcription
  misc_feature: MA Experiment 108608 PARAMETER Experiment Name: At_100uM_ABA_cDNA_P Parameter: Timepoint (hr) Value: 1
  misc_feature: MA Experiment 108608 PARAMETER Experiment Name: At_100uM_ABA_cDNA_P Parameter: Tissue Value: Aerial
  misc_feature: MA Experiment 108608 PARAMETER Experiment Name: At_100uM_ABA_cDNA_P Parameter: Treatment Value: 100uM ABA vs. No Treatment
  misc_feature: MA Experiment ID: 108609 Result: Up-regulated in Transcription
  misc_feature: MA Experiment 108609 PARAMETER Experiment Name: At_100uM_ABA_cDNA_P Parameter: Timepoint (hr) Value: 24
  misc_feature: MA Experiment 108609 PARAMETER Experiment Name: At_100uM_ABA_cDNA_P Parameter: Tissue Value: Aerial
  misc_feature: MA Experiment 108609 PARAMETER Experiment Name: At_100uM_ABA_cDNA_P Parameter: Treatment Value: 100uM ABA vs. No Treatment
  misc_feature: MA Experiment ID: 108668 Result: Up-regulated in Transcription
  misc_feature: MA Experiment 108668 PARAMETER Experiment Name: At_2mM_SA_cDNA_P Parameter: Plant Line Value: WS
  misc_feature: MA Experiment 108668 PARAMETER Experiment Name: At_2mM_SA_cDNA_P Parameter: Timepoint (hr) Value: 6
  misc_feature: MA Experiment 108668 PARAMETER Experiment Name: At_2mM_SA_cDNA_P Parameter: Treatment Value: 2mM SA vs. No Treatment
  misc_feature: MA Experiment ID: 20000069 Result: Up-regulated in Transcription
  misc_feature: MA Experiment 20000069 PARAMETER Experiment Name: At_100uM_ABA_Mutants_cDNA_P Parameter: Plant Line Value: CS23
  misc_feature: MA Experiment 20000069 PARAMETER Experiment Name: At_100uM_ABA_Mutants_cDNA_P Parameter: Timepoint (hr) Value: 6
  misc_feature: MA Experiment 20000069 PARAMETER Experiment Name: At_100uM_ABA_Mutants_cDNA_P Parameter: Tissue Value: Aerial
  misc_feature: MA Experiment 20000069 PARAMETER Experiment Name: At_100uM_ABA_Mutants_cDNA_P Parameter: Treatment Value: 100uM ABA vs. No Treatment
  misc_feature: MA Experiment ID: 20000070 Result: Up-regulated in Transcription
  misc_feature: MA Experiment 20000070 PARAMETER Experiment Name: At_100uM_ABA_Mutants_cDNA_P Parameter: Plant Line Value: CS24
  misc_feature: MA Experiment 20000070 PARAMETER Experiment Name: At_100uM_ABA_Mutants_cDNA_P Parameter: Timepoint (hr) Value: 6
  misc_feature: MA Experiment 20000070 PARAMETER Experiment Name: At_100uM_ABA_Mutants_cDNA_P Parameter: Tissue Value: Aerial
  misc_feature: MA Experiment 20000070 PARAMETER Experiment Name: At_100uM_ABA_Mutants_cDNA_P Parameter: Treatment Value: 100uM ABA vs. No Treatment
  misc_feature: MA Experiment ID: 20000071 Result: Up-regulated in Transcription
  misc_feature: MA Experiment 20000071 PARAMETER Experiment Name: At_100uM_ABA_Mutants_cDNA_P Parameter: Plant Line Value: CS8104
  misc_feature: MA Experiment 20000071 PARAMETER Experiment Name: At_100uM_ABA_Mutants_cDNA_P Parameter: Timepoint (hr) Value: 6
  misc_feature: MA Experiment 20000071 PARAMETER Experiment Name: At_100uM_ABA_Mutants_cDNA_P Parameter: Tissue Value: Aerial
  misc_feature: MA Experiment 20000071 PARAMETER Experiment Name: At_100uM_ABA_Mutants_cDNA_P Parameter: Treatment Value: 100uM ABA vs. No Treatment
  misc_feature: MA Experiment ID: 20000072 Result: Up-regulated in Transcription
  misc_feature: MA Experiment 20000072 PARAMETER Experiment Name: At_100uM_ABA_Mutants_cDNA_P Parameter: Plant Line Value: CS8105
  misc_feature: MA Experiment 20000072 PARAMETER Experiment Name: At_100uM_ABA_Mutants_cDNA_P Parameter: Timepoint (hr) Value: 6
  misc_feature: MA Experiment 20000072 PARAMETER Experiment Name: At_100uM_ABA_Mutants_cDNA_P Parameter: Tissue Value: Aerial
  misc_feature: MA Experiment 20000072 PARAMETER Experiment Name: At_100uM_ABA_Mutants_cDNA_P Parameter: Treatment Value: 100uM ABA vs. No Treatment
  misc_feature: MA Experiment ID: 20000086 Result: Up-regulated in Transcription
  misc_feature: MA Experiment 20000086 PARAMETER Experiment Name: At_100uM_ABA_Mutants_cDNA_P Parameter: Plant Line Value: CS22
  misc_feature: MA Experiment 20000086 PARAMETER Experiment Name: At_100uM_ABA_Mutants_cDNA_P Parameter: Timepoint (hr) Value: 6
  misc_feature: MA Experiment 20000086 PARAMETER Experiment Name: At_100uM_ABA_Mutants_cDNA_P Parameter: Tissue Value: Aerial
  misc_feature: MA Experiment 20000086 PARAMETER Experiment Name: At_100uM_ABA_Mutants_cDNA_P Parameter: Treatment Value: 100uM ABA vs. No Treatment
  misc_feature: MA Experiment ID: 20000087 Result: Up-regulated in Transcription
  misc_feature: MA Experiment 20000087 PARAMETER Experiment Name: At_100uM_ABA_Mutants_cDNA_P Parameter: Plant Line Value: WS
  misc_feature: MA Experiment 20000087 PARAMETER Experiment Name: At_100uM_ABA_Mutants_cDNA_P Parameter: Timepoint (hr) Value: 6
  misc_feature: MA Experiment 20000087 PARAMETER Experiment Name: At_100uM_ABA_Mutants_cDNA_P Parameter: Tissue Value: Aerial
  misc_feature: MA Experiment 20000087 PARAMETER Experiment Name: At_100uM_ABA_Mutants_cDNA_P Parameter: Treatment Value: 100uM ABA vs. No Treatment
  misc_feature: MA Experiment ID: 20000088 Result: Up-regulated in Transcription
  misc_feature: MA Experiment 20000088 PARAMETER Experiment Name: At_100uM_ABA_Mutants_cDNA_P Parameter: Plant Line Value: Landsberg
  misc_feature: MA Experiment 20000088 PARAMETER Experiment Name: At_100uM_ABA_Mutants_cDNA_P Parameter: Timepoint (hr) Value: 6
  misc_feature: MA Experiment 20000088 PARAMETER Experiment Name: At_100uM_ABA_Mutants_cDNA_P Parameter: Tissue Value: Aerial
  misc_feature: MA Experiment 20000088 PARAMETER Experiment Name: At_100uM_ABA_Mutants_cDNA_P Parameter: Treatment Value: 100uM ABA vs. No Treatment
  misc_feature: MA Experiment ID: 20000089 Result: Up-regulated in Transcription
  misc_feature: MA Experiment ID: 20000093 Result: Up-regulated in Transcription
  misc_feature: MA Experiment 20000093 PARAMETER Experiment Name: At_42deg_Heat_cDNA_P Parameter: Temperature (deg C) Value: 42 vs. 22
  misc_feature: MA Experiment 20000093 PARAMETER Experiment Name: At_42deg_Heat_cDNA_P Parameter: Timepoint (hr) Value: 0.5
  misc_feature: MA Experiment 20000093 PARAMETER Experiment Name: At_42deg_Heat_cDNA_P Parameter: Tissue Value: Aerial
  misc_feature: MA Experiment ID: 20000111 Result: Up-regulated in Transcription
  misc_feature: MA Experiment 20000111 PARAMETER Experiment Name: At_42deg_Heat_cDNA_P Parameter: Temperature (deg C) Value: 42 vs. 22
  misc_feature: MA Experiment 20000111 PARAMETER Experiment Name: At_42deg_Heat_cDNA_P Parameter: Timepoint (hr) Value: 6
  misc_feature: MA Experiment 20000111 PARAMETER Experiment Name: At_42deg_Heat_cDNA_P Parameter: Tissue Value: Aerial
  misc_feature: MA Experiment ID: 20000112 Result: Up-regulated in Transcription
  misc_feature: MA Experiment 20000112 PARAMETER Experiment Name: At_42deg_Heat_cDNA_P Parameter: Temperature (deg C) Value: 42 vs. 22
  misc_feature: MA Experiment 20000112 PARAMETER Experiment Name: At_42deg_Heat_cDNA_P Parameter: Timepoint (hr) Value: 2
  misc_feature: MA Experiment 20000112 PARAMETER Experiment Name: At_42deg_Heat_cDNA_P Parameter: Tissue Value: Aerial
  misc_feature: MA Experiment ID: 20000117 Result: Up-regulated in Transcription
  misc_feature: MA Experiment 20000117 PARAMETER Experiment Name: At_100uM_ABA_Mutants_cDNA_P Parameter: Plant Line Value: Columbia
  misc_feature: MA Experiment 20000117 PARAMETER Experiment Name: At_100uM_ABA_Mutants_cDNA_P Parameter: Timepoint (hr) Value: 6
  misc_feature: MA Experiment 20000117 PARAMETER Experiment Name: At_100uM_ABA_Mutants_cDNA_P Parameter: Tissue Value: Aerial
  misc_feature: MA Experiment 20000117 PARAMETER Experiment Name: At_100uM_ABA_Mutants_cDNA_P Parameter: Treatment Value: 100uM ABA vs. No Treatment
  misc_feature: MA Experiment ID: 20000144 Result: Up-regulated in Transcription
  misc_feature: MA Experiment 20000144 PARAMETER Experiment Name: At_42deg_Heat_cDNA_P Parameter: Temperature (deg C) Value: 42 vs. 22
  misc_feature: MA Experiment 20000144 PARAMETER Experiment Name: At_42deg_Heat_cDNA_P Parameter: Timepoint (hr) Value: 1
  misc_feature: MA Experiment 20000144 PARAMETER Experiment Name: At_42deg_Heat_cDNA_P Parameter: Tissue Value: Aerial
  misc_feature: MA Experiment ID: 20000166 Result: Up-regulated in Transcription
  misc_feature: MA Experiment 20000166 PARAMETER Experiment Name: At_100uM_ABA_P Parameter: Age (day) Value: 14
  misc_feature: MA Experiment 20000166 PARAMETER Experiment Name: At_100uM_ABA_P Parameter: Organism Value: A. thaliana
  misc_feature: MA Experiment 20000166 PARAMETER Experiment Name: At_100uM_ABA_P Parameter: Plant Line Value: WS
  misc_feature: MA Experiment 20000166 PARAMETER Experiment Name: At_100uM_ABA_P Parameter: Timepoint (hr) Value: 1
  misc_feature: MA Experiment 20000166 PARAMETER Experiment Name: At_100uM_ABA_P Parameter: Tissue Value: Aerial
  misc_feature: MA Experiment 20000166 PARAMETER Experiment Name: At_100uM_ABA_P Parameter: Treatment Value: 100uM ABA vs. No Treatment
  misc_feature: MA Experiment ID: 20000169 Result: Up-regulated in Transcription
  misc_feature: MA Experiment 20000169 PARAMETER Experiment Name: At_100uM_ABA_P Parameter: Age (day) Value: 14
  misc_feature: MA Experiment 20000169 PARAMETER Experiment Name: At_100uM_ABA_P Parameter: Organism Value: A. thaliana
  misc_feature: MA Experiment 20000169 PARAMETER Experiment Name: At_100uM_ABA_P Parameter: Plant Line Value: WS
  misc_feature: MA Experiment 20000169 PARAMETER Experiment Name: At_100uM_ABA_P Parameter: Timepoint (hr) Value: 6
  misc_feature: MA Experiment 20000169 PARAMETER Experiment Name: At_100uM_ABA_P Parameter: Tissue Value: Aerial
  misc_feature: MA Experiment 20000169 PARAMETER Experiment Name: At_100uM_ABA_P Parameter: Treatment Value: 100uM ABA vs. No Treatment
  misc_feature: MA Experiment ID: 20000182 Result: Up-regulated in Transcription
  misc_feature: MA Experiment 20000182 PARAMETER Experiment Name: At_2mM_SA_P Parameter: Age (day) Value: 14
  misc_feature: MA Experiment 20000182 PARAMETER Experiment Name: At_2mM_SA_P Parameter: Organism Value: A. thaliana
  misc_feature: MA Experiment 20000182 PARAMETER Experiment Name: At_2mM_SA_P Parameter: Plant Line Value: WS
  misc_feature: MA Experiment 20000182 PARAMETER Experiment Name: At_2mM_SA_P Parameter: Timepoint (hr) Value: 6
  misc_feature: MA Experiment 20000182 PARAMETER Experiment Name: At_2mM_SA_P Parameter: Tissue Value: Aerial
  misc_feature: MA Experiment 20000182 PARAMETER Experiment Name: At_2mM_SA_P Parameter: Treatment Value: 2mM SA vs. No Treatment
  misc_feature: MA Experiment ID: 20000224 Result: Up-regulated in Transcription
  misc_feature: MA Experiment ID: 20000234 Result: Down-regulated in Transcription
  misc_feature: MA Experiment 20000234 PARAMETER Experiment Name: At_Siliques_P Parameter: Age (day) Value: 21
  misc_feature: MA Experiment 20000234 PARAMETER Experiment Name: At_Siliques_P Parameter: Organism Value: A. thaliana
  misc_feature: MA Experiment 20000234 PARAMETER Experiment Name: At_Siliques_P Parameter: Plant Line Value: WS
  misc_feature: MA Experiment 20000234 PARAMETER Experiment Name: At_Siliques_P Parameter: Tissue Value: Less Than 5mm Siliques vs. Whole Plant
  misc_feature: MA Experiment ID: 20000264 Result: Down-regulated in Transcription
  misc_feature: MA Experiment 20000264 PARAMETER Experiment Name: At_Open_Flower_P Parameter: Age (day) Value: 21
  misc_feature: MA Experiment 20000264 PARAMETER Experiment Name: At_Open_Flower_P Parameter: Plant Line Value: WS
  misc_feature: MA Experiment 20000264 PARAMETER Experiment Name: At_Open_Flower_P Parameter: Tissue Value: Open Flower vs. Whole Plant
  misc_feature: MA Experiment ID: 20000267 Result: Up-regulated in Transcription
  misc_feature: MA Experiment 20000267 PARAMETER Experiment Name: At_Drought_P Parameter: Age (day) Value: 7
  misc_feature: MA Experiment 20000267 PARAMETER Experiment Name: At_Drought_P Parameter: Organism Value: A. thaliana
  misc_feature: MA Experiment 20000267 PARAMETER Experiment Name: At_Drought_P Parameter: Plant Line Value: WS
  misc_feature: MA Experiment 20000267 PARAMETER Experiment Name: At_Drought_P Parameter: Timepoint (hr) Value: 6
  misc_feature: MA Experiment 20000267 PARAMETER Experiment Name: At_Drought_P Parameter: Tissue Value: Whole Plant
  misc_feature: MA Experiment 20000267 PARAMETER Experiment Name: At_Drought_P Parameter: Treatment Value: Drought vs. No Drought
  misc_feature: MA Experiment ID: 20000268 Result: Up-regulated in Transcription
  misc_feature: MA Experiment 20000268 PARAMETER Experiment Name: At_100mM_NaCl__P Parameter: Age (day) Value: 14
  misc_feature: MA Experiment 20000268 PARAMETER Experiment Name: At_100mM_NaCl__P Parameter: Organism Value: A. thaliana
  misc_feature: MA Experiment 20000268 PARAMETER Experiment Name: At_100mM_NaCl__P Parameter: Plant Line Value: WS
  misc_feature: MA Experiment 20000268 PARAMETER Experiment Name: At_100mM_NaCl__P Parameter: Timepoint (hr) Value: 6
  misc_feature: MA Experiment 20000268 PARAMETER Experiment Name: At_100mM_NaCl__P Parameter: Tissue Value: Whole Plant
  misc_feature: MA Experiment 20000268 PARAMETER Experiment Name: At_100mM_NaCl__P Parameter: Treatment Value: 100mM NaCl vs. No Treatment
  misc_feature: MA Experiment ID: 20000436 Result: Up-regulated in Transcription
  misc_feature: MA Experiment 20000436 PARAMETER Experiment Name: At_Drought_P Parameter: Age (day) Value: 7
  misc_feature: MA Experiment 20000436 PARAMETER Experiment Name: At_Drought_P Parameter: Organism Value: A. thaliana
  misc_feature: MA Experiment 20000436 PARAMETER Experiment Name: At_Drought_P Parameter: Plant Line Value: WS
  misc_feature: MA Experiment 20000436 PARAMETER Experiment Name: At_Drought_P Parameter: Timepoint (hr) Value: 12
  misc_feature: MA Experiment 20000436 PARAMETER Experiment Name: At_Drought_P Parameter: Tissue Value: Whole Plant
  misc_feature: MA Experiment 20000436 PARAMETER Experiment Name: At_Drought_P Parameter: Treatment Value: Drought vs. No Drought
  misc_feature: MA Experiment ID: 20000438 Result: Down-regulated in Transcription
  misc_feature: MA Experiment 20000438 PARAMETER Experiment Name: At_Shoots__P Parameter: Age (day) Value: 14
  misc_feature: MA Experiment 20000438 PARAMETER Experiment Name: At_Shoots__P Parameter: Tissue Value: Shoots vs. Whole Plant
  misc_feature: MA Experiment ID: 20000453 Result: Up-regulated in Transcription
  misc_feature: MA Experiment 20000453 PARAMETER Experiment Name: At_100uM_ABA_P Parameter: Age (day) Value: 15
  misc_feature: MA Experiment 20000453 PARAMETER Experiment Name: At_100uM_ABA_P Parameter: Organism Value: A. thaliana
  misc_feature: MA Experiment 20000453 PARAMETER Experiment Name: At_100uM_ABA_P Parameter: Plant Line Value: WS
  misc_feature: MA Experiment 20000453 PARAMETER Experiment Name: At_100uM_ABA_P Parameter: Timepoint (hr) Value: 24
  misc_feature: MA Experiment 20000453 PARAMETER Experiment Name: At_100uM_ABA_P Parameter: Tissue Value: Aerial
  misc_feature: MA Experiment 20000453 PARAMETER Experiment Name: At_100uM_ABA_P Parameter: Treatment Value: 100uM ABA vs. No Treatment
  misc_feature: MA Experiment ID: 20000455 Result: Up-regulated in Transcription
  misc_feature: MA Experiment 20000455 PARAMETER Experiment Name: At_100uM_ABA_P Parameter: Age (day) Value: 16
  misc_feature: MA Experiment 20000455 PARAMETER Experiment Name: At_100uM_ABA_P Parameter: Organism Value: A. thaliana
  misc_feature: MA Experiment 20000455 PARAMETER Experiment Name: At_100uM_ABA_P Parameter: Plant Line Value: WS
  misc_feature: MA Experiment 20000455 PARAMETER Experiment Name: At_100uM_ABA_P Parameter: Timepoint (hr) Value: 48
  misc_feature: MA Experiment 20000455 PARAMETER Experiment Name: At_100uM_ABA_P Parameter: Tissue Value: Aerial
  misc_feature: MA Experiment 20000455 PARAMETER Experiment Name: At_100uM_ABA_P Parameter: Treatment Value: 100uM ABA vs. No Treatment
  misc_feature: MA Experiment ID: 20000506 Result: Up-regulated in Transcription
  misc_feature: MA Experiment 20000506 PARAMETER Experiment Name: At_Wounding_P Parameter: Organism Value: A. thaliana
  misc_feature: MA Experiment 20000506 PARAMETER Experiment Name: At_Wounding_P Parameter: Plant Line Value: WS
  misc_feature: MA Experiment 20000506 PARAMETER Experiment Name: At_Wounding_P Parameter: Timepoint (hr) Value: 6
  misc_feature: MA Experiment 20000506 PARAMETER Experiment Name: At_Wounding_P Parameter: Tissue Value: Aerial
  misc_feature: MA Experiment 20000506 PARAMETER Experiment Name: At_Wounding_P Parameter: Treatment Value: Wounding vs. No Wounding
  misc_feature: MA Experiment ID: 20000527 Result: Down-regulated in Transcription
  misc_feature: MA Experiment 20000527 PARAMETER Experiment Name: At_10percent_PEG_P Parameter: Age (day) Value: 20
  misc_feature: MA Experiment 20000527 PARAMETER Experiment Name: At_10percent_PEG_P Parameter: Organism Value: A. thaliana
  misc_feature: MA Experiment 20000527 PARAMETER Experiment Name: At_10percent_PEG_P Parameter: Plant Line Value: WS
  misc_feature: MA Experiment 20000527 PARAMETER Experiment Name: At_10percent_PEG_P Parameter: Timepoint (day) Value: 20
  misc_feature: MA Experiment 20000527 PARAMETER Experiment Name: At_10percent_PEG_P Parameter: Tissue Value: Whole Plant
  misc_feature: MA Experiment 20000527 PARAMETER Experiment Name: At_10percent_PEG_P Parameter: Treatment Value: 10percent PEG vs. No Treatment
  misc_feature: MA Experiment ID: 20001554 Result: Up-regulated in Transcription
  misc_feature: MA Experiment 20001554 PARAMETER Experiment Name: At_Drought_Soil_Dry_P Parameter: Age (day) Value: 21
  misc_feature: MA Experiment 20001554 PARAMETER Experiment Name: At_Drought_Soil_Dry_P Parameter: Organism Value: A. thaliana
  misc_feature: MA Experiment 20001554 PARAMETER Experiment Name: At_Drought_Soil_Dry_P Parameter: Plant Line Value: WS
  misc_feature: MA Experiment 20001554 PARAMETER Experiment Name: At_Drought_Soil_Dry_P Parameter: Post Timepoint (hr) Value: None
  misc_feature: MA Experiment 20001554 PARAMETER Experiment Name: At_Drought_Soil_Dry_P Parameter: Post-Treatment Value: None
  misc_feature: MA Experiment 20001554 PARAMETER Experiment Name: At_Drought_Soil_Dry_P Parameter: Timepoint (day) Value: 7
  misc_feature: MA Experiment 20001554 PARAMETER Experiment Name: At_Drought_Soil_Dry_P Parameter: Treatment Value: Drought vs. No Drought
  misc_feature: MA Experiment ID: 20001555 Result: Up-regulated in Transcription
  misc_feature: MA Experiment 20001555 PARAMETER Experiment Name: At_Drought_Soil_Dry_P Parameter: Age (day) Value: 24
  misc_feature: MA Experiment 20001555 PARAMETER Experiment Name: At_Drought_Soil_Dry_P Parameter: Organism Value: A. thaliana
  misc_feature: MA Experiment 20001555 PARAMETER Experiment Name: At_Drought_Soil_Dry_P Parameter: Plant Line Value: WS
  misc_feature: MA Experiment 20001555 PARAMETER Experiment Name: At_Drought_Soil_Dry_P Parameter: Post Timepoint (hr) Value: None
  misc_feature: MA Experiment 20001555 PARAMETER Experiment Name: At_Drought_Soil_Dry_P Parameter: Post-Treatment Value: None
  misc_feature: MA Experiment 20001555 PARAMETER Experiment Name: At_Drought_Soil_Dry_P Parameter: Timepoint (day) Value: 10
  misc_feature: MA Experiment 20001555 PARAMETER Experiment Name: At_Drought_Soil_Dry_P Parameter: Treatment Value: Drought vs. No Drought
  misc_feature: MA Experiment ID: 20001757 Result: Down-regulated in Transcription
  misc_feature: MA Experiment 20001757 PARAMETER Experiment Name: At_50mM_NH4NO3_L-to-H_P Parameter: Timepoint (hr) Value: 6
  misc_feature: MA Experiment 20001757 PARAMETER Experiment Name: At_50mM_NH4NO3_L-to-H_P Parameter: Tissue Value: Leaf
  misc_feature: MA Experiment 20001757 PARAMETER Experiment Name: At_50mM_NH4NO3_L-to-H_P Parameter: Treatment Value: 50mM NH4NO3 vs 100mM Mannitol
  misc_feature: MA Experiment ID: 20001904 Result: Up-regulated in Transcription
  misc_feature: MA Experiment 20001904 PARAMETER Experiment Name: At_Drought_Reproduction_P Parameter: Age (day) Value: 37
  misc_feature: MA Experiment 20001904 PARAMETER Experiment Name: At_Drought_Reproduction_P Parameter: Organism Value: A. thaliana
  misc_feature: MA Experiment 20001904 PARAMETER Experiment Name: At_Drought_Reproduction_P Parameter: Plant Line Value: WS
  misc_feature: MA Experiment 20001904 PARAMETER Experiment Name: At_Drought_Reproduction_P Parameter: Timepoint (day) Value: 7
  misc_feature: MA Experiment 20001904 PARAMETER Experiment Name: At_Drought_Reproduction_P Parameter: Tissue Value: Rosettes
  misc_feature: MA Experiment 20001904 PARAMETER Experiment Name: At_Drought_Reproduction_P Parameter: Treatment Value: Drought vs. No Drought
  misc_feature: MA Experiment ID: 20001911 Result: Up-regulated in Transcription
  misc_feature: MA Experiment 20001911 PARAMETER Experiment Name: At_Drought_Reproduction_P Parameter: Age (day) Value: 40
  misc_feature: MA Experiment 20001911 PARAMETER Experiment Name: At_Drought_Reproduction_P Parameter: Organism Value: A. thaliana
  misc_feature: MA Experiment 20001911 PARAMETER Experiment Name: At_Drought_Reproduction_P Parameter: Plant Line Value: WS
  misc_feature: MA Experiment 20001911 PARAMETER Experiment Name: At_Drought_Reproduction_P Parameter: Timepoint (day) Value: 10
  misc_feature: MA Experiment 20001911 PARAMETER Experiment Name: At_Drought_Reproduction_P Parameter: Tissue Value: Flowers
  misc_feature: MA Experiment 20001911 PARAMETER Experiment Name: At_Drought_Reproduction_P Parameter: Treatment Value: Drought vs. No Drought

SEQ ID NO: 31892 - protein, 357 aa, Arabidopsis thaliana; identical to SEQ ID NO: 23719
  peptide (1)..(357): Ceres Seq. ID no. 12715030
  misc_feature (1)..(356): Homolog of NCBI NO: 231676 NR Description: Cinnamyl-alcohol dehydrogenase (CAD)
  misc_feature (1)..(355): Homolog of NCBI NO: 629510 NR Description: cinnamyl-alcohol dehydrogenase (EC 1.1.1.195) CAD
  misc_feature (1)..(355): Homolog of NCBI NO: 7239226 NR Description: cinnamyl alcohol dehydrogenase; CAD [Populus
  misc_feature (1)..(355): Homolog of NCBI NO: 9998899 NR Description: cinnamyl alcohol dehydrogenase
  misc_feature (1)..(355): Homolog of NCBI NO: 1168734 NR Description: Cinnamyl-alcohol dehydrogenase (CAD)
  misc_feature (1)..(355): Homolog of NCBI NO: 21593794 NR Description: cinnamyl alcohol dehydrogenase [Arabidopsis
  misc_feature (1)..(355): Homolog of NCBI NO: 15230382 NR Description: cinnamyl alcohol dehydrogenase
  misc_feature (1)..(356): Homolog of NCBI NO: 1168727 NR Description: Cinnamyl-alcohol dehydrogenase 1 (CAD)
  misc_feature (1)..(356): Homolog of NCBI NO: 231675 NR Description: Cinnamyl-alcohol dehydrogenase (CAD)
  misc_feature (1)..(357): Homolog of NCBI NO: 15235295 NR Description: cinnamyl alcohol dehydrogenase - like protein

SEQ ID NO: 31893 - protein, 354 aa, Arabidopsis thaliana; identical to SEQ ID NO: 23720
  peptide (1)..(354): Ceres Seq. ID no. 12715031
  misc_feature (1)..(353): Homolog of NCBI NO: 231676 NR Description: Cinnamyl-alcohol dehydrogenase (CAD)
  misc_feature (1)..(352): Homolog of NCBI NO: 629510 NR Description: cinnamyl-alcohol dehydrogenase (EC 1.1.1.195) CAD
  misc_feature (1)..(352): Homolog of NCBI NO: 7239226 NR Description: cinnamyl alcohol dehydrogenase; CAD [Populus
  misc_feature (1)..(352): Homolog of NCBI NO: 9998899 NR Description: cinnamyl alcohol dehydrogenase
  misc_feature (1)..(352): Homolog of NCBI NO: 1168734 NR Description: Cinnamyl-alcohol dehydrogenase (CAD)
  misc_feature (1)..(352): Homolog of NCBI NO: 21593794 NR Description: cinnamyl alcohol dehydrogenase [Arabidopsis
  misc_feature (1)..(352): Homolog of NCBI NO: 15230382 NR Description: cinnamyl alcohol dehydrogenase
  misc_feature (1)..(353): Homolog of NCBI NO: 1168727 NR Description: Cinnamyl-alcohol dehydrogenase 1 (CAD)
  misc_feature (1)..(353): Homolog of NCBI NO: 231675 NR Description: Cinnamyl-alcohol dehydrogenase (CAD)
  misc_feature (1)..(354): Homolog of NCBI NO: 15235295 NR Description: cinnamyl alcohol dehydrogenase - like protein

SEQ ID NO: 31894 - protein, 298 aa, Arabidopsis thaliana; identical to SEQ ID NO: 23721
  peptide (1)..(298): Ceres Seq. ID no. 12715032
  misc_feature (1)..(297): Homolog of NCBI NO: 231676 NR Description: Cinnamyl-alcohol dehydrogenase (CAD)
  misc_feature (1)..(296): Homolog of NCBI NO: 629510 NR Description: cinnamyl-alcohol dehydrogenase (EC 1.1.1.195) CAD
  misc_feature (1)..(296): Homolog of NCBI NO: 7239226 NR Description: cinnamyl alcohol dehydrogenase; CAD [Populus
  misc_feature (1)..(296): Homolog of NCBI NO: 9998899 NR Description: cinnamyl alcohol dehydrogenase
  misc_feature (1)..(296): Homolog of NCBI NO: 1168734 NR Description: Cinnamyl-alcohol dehydrogenase (CAD)
  misc_feature (1)..(296): Homolog of NCBI NO: 21593794 NR Description: cinnamyl alcohol dehydrogenase [Arabidopsis
  misc_feature (1)..(296): Homolog of NCBI NO: 15230382 NR Description: cinnamyl alcohol dehydrogenase
  misc_feature (1)..(297): Homolog of NCBI NO: 1168727 NR Description: Cinnamyl-alcohol dehydrogenase 1 (CAD)
  misc_feature (1)..(297): Homolog of NCBI NO: 231675 NR Description: Cinnamyl-alcohol dehydrogenase (CAD)
  misc_feature (1)..(298): Homolog of NCBI NO: 15235295 NR Description: cinnamyl alcohol dehydrogenase - like protein

SEQ ID NO: 31895 - DNA, 2508 bp, Arabidopsis thaliana; identical to SEQ ID NO: 28305
  misc_feature (1)..(2508): Ceres Seq. ID no. 12482871
  misc_feature: MA Experiment ID: 108433 Result: Down-regulated in Transcription
  misc_feature: MA Experiment 108433 PARAMETER Experiment Name: At_rhl_Mutant2_cDNA_P Parameter: Age (day) Value: 7
  misc_feature: MA Experiment 108433 PARAMETER Experiment Name: At_rhl_Mutant2_cDNA_P Parameter: Organism Value: A. thaliana
  misc_feature: MA Experiment 108433 PARAMETER Experiment Name: At_rhl_Mutant2_cDNA_P Parameter: Plant Line Value: rhl Mutant vs. wt landsburg
  misc_feature: MA Experiment 108433 PARAMETER Experiment Name: At_rhl_Mutant2_cDNA_P Parameter: Tissue Value: Roots
  misc_feature: MA Experiment ID: 108434 Result: Down-regulated in Transcription
  misc_feature: MA Experiment 108434 PARAMETER Experiment Name: At_Root_Tips_cDNA_P Parameter: Tissue Value: Root Tips
  misc_feature: MA Experiment ID: 108488 Result: Down-regulated in Transcription
  misc_feature: MA Experiment ID: 108573 Result: Up-regulated in Transcription
  misc_feature: MA Experiment 108573 PARAMETER Experiment Name: At_Drought_cDNA_P Parameter: Timepoint (hr) Value: 6
  misc_feature: MA Experiment 108573 PARAMETER Experiment Name: At_Drought_cDNA_P Parameter: Tissue Value: Aerial
  misc_feature: MA Experiment 108573 PARAMETER Experiment Name: At_Drought_cDNA_P Parameter: Treatment Value: Drought vs. No Drought
  misc_feature: MA Experiment ID: 108577 Result: Down-regulated in Transcription
  misc_feature: MA Experiment 108577 PARAMETER Experiment Name: At_42deg_Heat_cDNA_P Parameter: Temperature (deg C) Value: 42 vs. 22
  misc_feature: MA Experiment 108577 PARAMETER Experiment Name: At_42deg_Heat_cDNA_P Parameter: Timepoint (hr) Value: 6
  misc_feature: MA Experiment 108577 PARAMETER Experiment Name: At_42deg_Heat_cDNA_P Parameter: Tissue Value: Aerial
  misc_feature: MA Experiment ID: 108585 Result: Up-regulated in Transcription
  misc_feature: MA Experiment 108585 PARAMETER Experiment Name: At_5mM_NaNP_cDNA_P Parameter: Timepoint (hr) Value: 6
  misc_feature: MA Experiment 108585 PARAMETER Experiment Name: At_5mM_NaNP_cDNA_P Parameter: Tissue Value: Aerial
  misc_feature: MA Experiment 108585 PARAMETER Experiment Name: At_5mM_NaNP_cDNA_P Parameter: Treatment Value: null
  misc_feature: MA Experiment ID: 108594 Result: Up-regulated in Transcription
  misc_feature: MA Experiment 108594 PARAMETER Experiment Name: At_Ler-rhl_Root_cDNA_P Parameter: Plant Line Value: null
  misc_feature: MA Experiment ID: 108595 Result: Up-regulated in Transcription
  misc_feature: MA Experiment 108595 PARAMETER Experiment Name: At_Ler-pi_Ovule_cDNA_P Parameter: Plant Line Value: null
  misc_feature: MA Experiment ID: 20000030 Result: Down-regulated in Transcription
  misc_feature: MA Experiment 20000030 PARAMETER Experiment Name: At_CS6630_Roots_cDNA_P Parameter: Plant Line Value: CS6630 vs. WS
  misc_feature: MA Experiment 20000030 PARAMETER Experiment Name: At_CS6630_Roots_cDNA_P Parameter: Tissue Value: Roots
  misc_feature: MA Experiment ID: 20000068 Result: Down-regulated in Transcription
  misc_feature: MA Experiment ID: 20000071 Result: Up-regulated in Transcription
  misc_feature: MA Experiment 20000071 PARAMETER Experiment Name: At_100uM_ABA_Mutants_cDNA_P Parameter: Plant Line Value: CS8104
  misc_feature: MA Experiment 20000071 PARAMETER Experiment Name: At_100uM_ABA_Mutants_cDNA_P Parameter: Timepoint (hr) Value: 6
  misc_feature: MA Experiment 20000071 PARAMETER Experiment Name: At_100uM_ABA_Mutants_cDNA_P Parameter: Tissue Value: Aerial
  misc_feature: MA Experiment 20000071 PARAMETER Experiment Name: At_100uM_ABA_Mutants_cDNA_P Parameter: Treatment Value: 100uM ABA vs. No Treatment
  misc_feature: MA Experiment ID: 20000087 Result: Up-regulated in Transcription
  misc_feature: MA Experiment 20000087 PARAMETER Experiment Name: At_100uM_ABA_Mutants_cDNA_P Parameter: Plant Line Value: WS
  misc_feature: MA Experiment 20000087 PARAMETER Experiment Name: At_100uM_ABA_Mutants_cDNA_P Parameter: Timepoint (hr) Value: 6
  misc_feature: MA Experiment 20000087 PARAMETER Experiment Name: At_100uM_ABA_Mutants_cDNA_P Parameter: Tissue Value: Aerial
  misc_feature: MA Experiment 20000087 PARAMETER Experiment Name: At_100uM_ABA_Mutants_cDNA_P Parameter: Treatment Value: 100uM ABA vs. No Treatment
  misc_feature: MA Experiment ID: 20000113 Result: Down-regulated in Transcription
  misc_feature: MA Experiment 20000113 PARAMETER Experiment Name: At_42deg_Heat_cDNA_P Parameter: Temperature (deg C) Value: 42 vs. 22
  misc_feature: MA Experiment 20000113 PARAMETER Experiment Name: At_42deg_Heat_cDNA_P Parameter: Timepoint (hr) Value: 8
  misc_feature: MA Experiment 20000113 PARAMETER Experiment Name: At_42deg_Heat_cDNA_P Parameter: Tissue Value: Aerial
  misc_feature: MA Experiment ID: 20000185 Result: Up-regulated in Transcription
  misc_feature: MA Experiment 20000185 PARAMETER Experiment Name: At_Roots__P Parameter: Age (day) Value: 7 vs. 21
  misc_feature: MA Experiment 20000185 PARAMETER Experiment Name: At_Roots__P Parameter: Organism Value: A. thaliana
  misc_feature: MA Experiment 20000185 PARAMETER Experiment Name: At_Roots__P Parameter: Tissue Value: Roots vs. Whole Plant
  misc_feature: MA Experiment ID: 20000227 Result: Down-regulated in Transcription
  misc_feature: MA Experiment 20000227 PARAMETER Experiment Name: At_Root-Tips-vs-Tops_P Parameter: Tissue Value: Root Tips vs. Root Tops
  misc_feature: MA Experiment ID: 20000264 Result: Up-regulated in Transcription
  misc_feature: MA Experiment 20000264 PARAMETER Experiment Name: At_Open_Flower_P Parameter: Age (day) Value: 21
  misc_feature: MA Experiment 20000264 PARAMETER Experiment Name: At_Open_Flower_P Parameter: Plant Line Value: WS
  misc_feature: MA Experiment 20000264 PARAMETER Experiment Name: At_Open_Flower_P Parameter: Tissue Value: Open Flower vs. Whole Plant
  misc_feature: MA Experiment ID: 20000495 Result: Down-regulated in Transcription
  misc_feature: MA Experiment 20000495 PARAMETER Experiment Name: At_Guard_Cells_P Parameter: Harvest Date Value: 8/2/2002
  misc_feature: MA Experiment 20000495 PARAMETER Experiment Name: At_Guard_Cells_P Parameter: Organism Value: A. thaliana
  misc_feature: MA Experiment 20000495 PARAMETER Experiment Name: At_Guard_Cells_P Parameter: Tissue Value: Guard Cells vs. Leaves
  misc_feature: MA Experiment ID: 20000794 Result: Up-regulated in Transcription
  misc_feature: MA Experiment 20000794 PARAMETER Experiment Name: At_Petals_P Parameter: Age (day) Value: 23-25 days
  misc_feature: MA Experiment 20000794 PARAMETER Experiment Name: At_Petals_P Parameter: Plant Line Value: WS
  misc_feature: MA Experiment 20000794 PARAMETER Experiment Name: At_Petals_P Parameter: Tissue Value: Petals vs. Whole plant
  misc_feature: MA Experiment ID: 20001451 Result: Up-regulated in Transcription
  misc_feature: MA Experiment 20001451 PARAMETER Experiment Name: At_Far-red-induction_P Parameter: Age (day) Value: 7
  misc_feature: MA Experiment 20001451 PARAMETER Experiment Name: At_Far-red-induction_P Parameter: Light Value: Far-red vs. White
  misc_feature: MA Experiment 20001451 PARAMETER Experiment Name: At_Far-red-induction_P Parameter: Organism Value: A. thaliana
  misc_feature: MA Experiment 20001451 PARAMETER Experiment Name: At_Far-red-induction_P Parameter: Plant Line Value: Columbia
  misc_feature: MA Experiment 20001451 PARAMETER Experiment Name: At_Far-red-induction_P Parameter: Timepoint (hr) Value: 24
  misc_feature: MA Experiment 20001451 PARAMETER Experiment Name: At_Far-red-induction_P Parameter: Tissue Value: Whole Plant
  misc_feature: MA Experiment ID: 20001903 Result: Up-regulated in Transcription
  misc_feature: MA Experiment 20001903 PARAMETER Experiment Name: At_Drought_Reproduction_P Parameter: Age (day) Value: 35
  misc_feature: MA Experiment 20001903 PARAMETER Experiment Name: At_Drought_Reproduction_P Parameter: Organism Value: A. thaliana
  misc_feature: MA Experiment 20001903 PARAMETER Experiment Name: At_Drought_Reproduction_P Parameter: Plant Line Value: WS
  misc_feature: MA Experiment 20001903 PARAMETER Experiment Name: At_Drought_Reproduction_P Parameter: Timepoint (day) Value: 5
  misc_feature: MA Experiment 20001903 PARAMETER Experiment Name: At_Drought_Reproduction_P Parameter: Tissue Value: Rosettes
  misc_feature: MA Experiment 20001903 PARAMETER Experiment Name: At_Drought_Reproduction_P Parameter: Treatment Value: Drought vs. No Drought
  misc_feature: MA Experiment ID: 20001905 Result: Up-regulated in Transcription
  misc_feature: MA Experiment 20001905 PARAMETER Experiment Name: At_Drought_Reproduction_P Parameter: Age (day) Value: 40
  misc_feature: MA Experiment 20001905 PARAMETER Experiment Name: At_Drought_Reproduction_P Parameter: Organism Value: A. thaliana
  misc_feature: MA Experiment 20001905 PARAMETER Experiment Name: At_Drought_Reproduction_P Parameter: Plant Line Value: WS
  misc_feature: MA Experiment 20001905 PARAMETER Experiment Name: At_Drought_Reproduction_P Parameter: Timepoint (day) Value: 10
  misc_feature: MA Experiment 20001905 PARAMETER Experiment Name: At_Drought_Reproduction_P Parameter: Tissue Value: Rosettes
  misc_feature: MA Experiment 20001905 PARAMETER Experiment Name: At_Drought_Reproduction_P Parameter: Treatment Value: Drought vs. No Drought

SEQ ID NO: 31896 - protein, 461 aa, Arabidopsis thaliana; identical to SEQ ID NO: 28306
  peptide (1)..(461): Ceres Seq. ID no. 12482872
  misc_feature (4)..(283): Pfam Name: Protein kinase domain Pfam Description: Protein kinase domain
  misc_feature (1)..(293): Homolog of NCBI NO: 34897492 NR Description: putative protein kinase [Oryza sativa (japonica
  misc_feature (263)..(410): Homolog of NCBI NO: 34897960 NR Description: serine/threonine-protein kinase Mak (male germ
  misc_feature (4)..(239): Homolog of NCBI NO: 34897960 NR Description: serine/threonine-protein kinase Mak (male germ
  misc_feature (1)..(414): Homolog of NCBI NO: 27948450 NR Description: GAMYB-binding protein [Hordeum vulgare subsp.
  misc_feature (1)..(284): Homolog of NCBI NO: 7488272 NR Description: protein kinase homolog T18B16.80 - Arabidopsis
  misc_feature (1)..(461): Homolog of NCBI NO: 9758733 NR Description: serine/threonine-protein kinase Mak (male germ
  misc_feature (1)..(461): Homolog of NCBI NO: 18422554 NR Description: serine/threonine-protein kinase Mak (male germ
  misc_feature (1)..(461): Homolog of NCBI NO: 15450860 NR Description: serine/threonine-protein kinase Mak (male germ
  misc_feature (1)..(461): Homolog of NCBI NO: 30684655 NR Description: protein kinase, putative [Arabidopsis thaliana]
  misc_feature (1)..(461): Homolog of NCBI NO: 18415242 NR Description: kinase-like protein

SEQ ID NO: 31897 - protein, 427 aa, Arabidopsis thaliana; identical to SEQ ID NO: 28307
  peptide (1)..(427): Ceres Seq. ID no. 12482873
  misc_feature (1)..(249): Pfam Name: Protein kinase domain Pfam Description: Protein kinase domain
  misc_feature (1)..(259): Homolog of NCBI NO: 34897492 NR Description: putative protein kinase [Oryza sativa (japonica
  misc_feature (229)..(376): Homolog of NCBI NO: 34897960 NR Description: serine/threonine-protein kinase Mak (male germ
  misc_feature (1)..(205): Homolog of NCBI NO: 34897960 NR Description: serine/threonine-protein kinase Mak (male germ
  misc_feature (1)..(380): Homolog of NCBI NO: 27948450 NR Description: GAMYB-binding protein [Hordeum vulgare subsp.
  misc_feature (1)..(250): Homolog of NCBI NO: 7488272 NR Description: protein kinase homolog T18B16.80 - Arabidopsis
  misc_feature (1)..(427): Homolog of NCBI NO: 9758733 NR Description: serine/threonine-protein kinase Mak (male germ
  misc_feature (1)..(427): Homolog of NCBI NO: 18422554 NR Description: serine/threonine-protein kinase Mak (male germ
  misc_feature (1)..(427): Homolog of NCBI NO: 15450860 NR Description: serine/threonine-protein kinase Mak (male germ
  misc_feature (1)..(427): Homolog of NCBI NO: 30684655 NR Description: protein kinase, putative [Arabidopsis thaliana]
  misc_feature (1)..(427): Homolog of NCBI NO: 18415242 NR Description: kinase-like protein

SEQ ID NO: 31898 - protein, 405 aa, Arabidopsis thaliana; identical to SEQ ID NO: 28308
  peptide (1)..(405): Ceres Seq. ID no. 12482874
  misc_feature (1)..(227): Pfam Name: Protein kinase domain Pfam Description: Protein kinase domain
  misc_feature (1)..(237): Homolog of NCBI NO: 34897492 NR Description: putative protein kinase [Oryza sativa (japonica
  misc_feature (207)..(354): Homolog of NCBI NO: 34897960 NR Description: serine/threonine-protein kinase Mak (male germ
  misc_feature (1)..(183): Homolog of NCBI NO: 34897960 NR Description: serine/threonine-protein kinase Mak (male germ
  misc_feature (1)..(358): Homolog of NCBI NO: 27948450 NR Description: GAMYB-binding protein [Hordeum vulgare subsp.
  misc_feature (1)..(228): Homolog of NCBI NO: 7488272 NR Description: protein kinase homolog T18B16.80 - Arabidopsis
  misc_feature (1)..(405): Homolog of NCBI NO: 9758733 NR Description: serine/threonine-protein kinase Mak (male germ
  misc_feature (1)..(405): Homolog of NCBI NO: 18422554 NR Description: serine/threonine-protein kinase Mak (male germ
  misc_feature (1)..(405): Homolog of NCBI NO: 15450860 NR Description: serine/threonine-protein kinase Mak (male germ
  misc_feature (1)..(405): Homolog of NCBI NO: 30684655 NR Description: protein kinase, putative [Arabidopsis thaliana]
  misc_feature (1)..(405): Homolog of NCBI NO: 18415242 NR Description: kinase-like protein

SEQ ID NO: 31899 - DNA, 512 bp, Arabidopsis thaliana; identical to SEQ ID NO: 28309
  misc_feature (1)..(512): Ceres Seq. ID no. 12603514
  misc_feature: MA Experiment ID: 20000307 Result: Up-regulated in Transcription
  misc_feature: MA Experiment 20000307 PARAMETER Experiment Name: At_Germinating_Seeds_Sub_P Parameter: Age (hr) Value: 24 vs. 0
  misc_feature: MA Experiment 20000307 PARAMETER Experiment Name: At_Germinating_Seeds_Sub_P Parameter: Organism Value: A. thaliana
  misc_feature: MA Experiment 20000307 PARAMETER Experiment Name: At_Germinating_Seeds_Sub_P Parameter: Plant Line Value: WS
  misc_feature: MA Experiment 20000307 PARAMETER Experiment Name: At_Germinating_Seeds_Sub_P Parameter: Tissue Value: Germinating Seeds

SEQ ID NO: 31900 - protein, 110 aa, Arabidopsis thaliana; identical to SEQ ID NO: 28310
  peptide (1)..(110): Ceres Seq. ID no. 12603515
  misc_feature (35)..(109): Pfam Name: Cytochrome oxidase c subunit VIb Pfam Description: Cytochrome oxidase c subunit VIb
  misc_feature (38)..(108): Homolog of NCBI NO: 38048151 NR Description: similar to Drosophila melanogaster CG14235
  misc_feature (36)..(110): Homolog of NCBI NO: 22204116 NR Description: putative cytochrome c oxidase subunit [Triticum
  misc_feature (36)..(110): Homolog of NCBI NO: 9967162 NR Description: cytochrome c oxidase subunit 6b
  misc_feature (36)..(110): Homolog of NCBI NO: 34906824 NR Description: putative cytochrome c oxidase subunit 6b-1
  misc_feature (35)..(110): Homolog of NCBI NO: 21554378 NR Description: cytochrome c oxidase subunit, putative
  misc_feature (35)..(110): Homolog of NCBI NO: 15219886 NR Description: cytochrome c oxidase subunit, putative
  misc_feature (36)..(110): Homolog of NCBI NO: 4586449 NR Description: cytochrome c oxidase subunit 6b-1
  misc_feature (33)..(110): Homolog of NCBI NO: 15234375 NR Description: putative protein; protein id: At4g28060.1
  misc_feature (33)..(110): Homolog of NCBI NO: 21592329 NR Description: cytochrome c oxidase subunit 6b [Arabidopsis
  misc_feature (33)..(110): Homolog of NCBI NO: 18424030 NR Description: Expressed protein

SEQ ID NO: 31901 - protein, 78 aa, Arabidopsis thaliana; identical to SEQ ID NO: 28311
  peptide (1)..(78): Ceres Seq. ID no. 12603516
  misc_feature (3)..(77): Pfam Name: Cytochrome oxidase c subunit VIb Pfam Description: Cytochrome oxidase c subunit VIb
  misc_feature (6)..(76): Homolog of NCBI NO: 38048151 NR Description: similar to Drosophila melanogaster CG14235
  misc_feature (4)..(78): Homolog of NCBI NO: 22204116 NR Description: putative cytochrome c oxidase subunit [Triticum
  misc_feature (4)..(78): Homolog of NCBI NO: 9967162 NR Description: cytochrome c oxidase subunit 6b
  misc_feature (4)..(78): Homolog of NCBI NO: 34906824 NR Description: putative cytochrome c oxidase subunit 6b-1
  misc_feature (3)..(78): Homolog of NCBI NO: 21554378 NR Description: cytochrome c oxidase subunit, putative
  misc_feature (3)..(78): Homolog of NCBI NO: 15219886 NR Description: cytochrome c oxidase subunit, putative
  misc_feature (4)..(78): Homolog of NCBI NO: 4586449 NR Description: cytochrome c oxidase subunit 6b-1
  misc_feature (1)..(78): Homolog of NCBI NO: 15234375 NR Description: putative protein; protein id: At4g28060.1
  misc_feature (1)..(78): Homolog of NCBI NO: 21592329 NR Description: cytochrome c oxidase subunit 6b [Arabidopsis
  misc_feature (1)..(78): Homolog of NCBI NO: 18424030 NR Description: Expressed protein

SEQ ID NO: 31902 - DNA, 899 bp, Arabidopsis thaliana; identical to SEQ ID NO: 28312
  misc_feature (1)..(899): Ceres Seq. ID no. 12420741
  misc_feature: MA Experiment ID: 108464 Result: Up-regulated in Transcription
  misc_feature: MA Experiment 108464 PARAMETER Experiment Name: At_Germinating_Seeds_cDNA_P Parameter: Age (day) Value: 4 vs. 0
  misc_feature: MA Experiment 108464 PARAMETER Experiment Name: At_Germinating_Seeds_cDNA_P Parameter: Tissue Value: Germinating Seeds
  misc_feature: MA Experiment ID: 108595 Result: Down-regulated in Transcription
  misc_feature: MA Experiment 108595 PARAMETER Experiment Name: At_Ler-pi_Ovule_cDNA_P Parameter: Plant Line Value: null
  misc_feature: MA Experiment ID: 108668 Result: Up-regulated in Transcription
  misc_feature: MA Experiment 108668 PARAMETER Experiment Name: At_2mM_SA_cDNA_P Parameter: Plant Line Value: WS
  misc_feature: MA Experiment 108668 PARAMETER Experiment Name: At_2mM_SA_cDNA_P Parameter: Timepoint (hr) Value: 6
  misc_feature: MA Experiment 108668 PARAMETER Experiment Name: At_2mM_SA_cDNA_P Parameter: Treatment Value: 2mM SA vs. No Treatment
  misc_feature: MA Experiment ID: 20000069 Result: Up-regulated in Transcription
  misc_feature: MA Experiment 20000069 PARAMETER Experiment Name: At_100uM_ABA_Mutants_cDNA_P Parameter: Plant Line Value: CS23
  misc_feature: MA Experiment 20000069 PARAMETER Experiment Name: At_100uM_ABA_Mutants_cDNA_P Parameter: Timepoint (hr) Value: 6
  misc_feature: MA Experiment 20000069 PARAMETER Experiment Name: At_100uM_ABA_Mutants_cDNA_P Parameter: Tissue Value: Aerial
  misc_feature: MA Experiment 20000069 PARAMETER Experiment Name: At_100uM_ABA_Mutants_cDNA_P Parameter: Treatment Value: 100uM ABA vs. No Treatment
  misc_feature: MA Experiment ID: 20000090 Result: Up-regulated in Transcription
  misc_feature: MA Experiment ID: 20000113 Result: Up-regulated in Transcription
  misc_feature: MA Experiment 20000113 PARAMETER Experiment Name: At_42deg_Heat_cDNA_P Parameter: Temperature (deg C) Value: 42 vs. 22
  misc_feature: MA Experiment 20000113 PARAMETER Experiment Name: At_42deg_Heat_cDNA_P Parameter: Timepoint (hr) Value: 8
  misc_feature: MA Experiment 20000113 PARAMETER Experiment Name: At_42deg_Heat_cDNA_P Parameter: Tissue Value: Aerial
  misc_feature: MA Experiment ID: 20000173 Result: Up-regulated in Transcription
  misc_feature: MA Experiment 20000173 PARAMETER Experiment Name: At_42deg_Heat_P Parameter: Age (day) Value: 14
  misc_feature: MA Experiment 20000173 PARAMETER Experiment Name: At_42deg_Heat_P Parameter: Organism Value: A. thaliana
  misc_feature: MA Experiment 20000173 PARAMETER Experiment Name: At_42deg_Heat_P Parameter: Plant Line Value: WS
  misc_feature: MA Experiment 20000173 PARAMETER Experiment Name: At_42deg_Heat_P Parameter: Temperature (deg C) Value: 42 vs. 22
  misc_feature: MA Experiment 20000173 PARAMETER Experiment Name: At_42deg_Heat_P Parameter: Timepoint (hr) Value: 6
  misc_feature: MA Experiment 20000173 PARAMETER Experiment Name: At_42deg_Heat_P Parameter: Tissue Value: Aerial
  misc_feature: MA Experiment ID: 20000182 Result: Up-regulated in Transcription
  misc_feature: MA Experiment 20000182 PARAMETER Experiment Name: At_2mM_SA_P Parameter: Age (day) Value: 14
  misc_feature: MA Experiment 20000182 PARAMETER Experiment Name: At_2mM_SA_P Parameter: Organism Value: A. thaliana
  misc_feature: MA Experiment 20000182 PARAMETER Experiment Name: At_2mM_SA_P Parameter: Plant Line Value: WS
  misc_feature: MA Experiment 20000182 PARAMETER Experiment Name: At_2mM_SA_P Parameter: Timepoint (hr) Value: 6
  misc_feature: MA Experiment 20000182 PARAMETER Experiment Name: At_2mM_SA_P Parameter: Tissue Value: Aerial
  misc_feature: MA Experiment 20000182 PARAMETER Experiment Name: At_2mM_SA_P Parameter: Treatment Value: 2mM SA vs. No Treatment
  misc_feature: MA Experiment ID: 20000184 Result: Down-regulated in Transcription
  misc_feature: MA Experiment 20000184 PARAMETER Experiment Name: At_Shoots__P Parameter: Age (day) Value: 7
  misc_feature: MA Experiment 20000184 PARAMETER Experiment Name: At_Shoots__P Parameter: Tissue Value: Shoots vs. Whole Plant
  misc_feature: MA Experiment ID: 20000224 Result: Up-regulated in Transcription
  misc_feature: MA Experiment ID: 20000234 Result: Down-regulated in Transcription
  misc_feature: MA Experiment 20000234 PARAMETER Experiment Name: At_Siliques_P Parameter: Age (day) Value: 21
  misc_feature: MA Experiment 20000234 PARAMETER Experiment Name: At_Siliques_P Parameter: Organism Value: A. thaliana
  misc_feature: MA Experiment 20000234 PARAMETER Experiment Name: At_Siliques_P Parameter: Plant Line Value: WS
  misc_feature: MA Experiment 20000234 PARAMETER Experiment Name: At_Siliques_P Parameter: Tissue Value: Less Than 5mm Siliques vs. Whole Plant
  misc_feature: MA Experiment ID: 20000264 Result: Down-regulated in Transcription
  misc_feature: MA Experiment 20000264 PARAMETER Experiment Name: At_Open_Flower_P Parameter: Age (day) Value: 21
  misc_feature: MA Experiment 20000264 PARAMETER Experiment Name: At_Open_Flower_P Parameter: Plant Line Value: WS
  misc_feature: MA Experiment 20000264 PARAMETER Experiment Name: At_Open_Flower_P Parameter: Tissue Value: Open Flower vs. Whole Plant
  misc_feature: MA Experiment ID: 20000265 Result: Down-regulated in Transcription
  misc_feature: MA Experiment 20000265 PARAMETER Experiment Name: At_Open_Flower_P Parameter: Age (day) Value: 21
  misc_feature: MA Experiment 20000265 PARAMETER Experiment Name: At_Open_Flower_P Parameter: Plant Line Value: WS
  misc_feature: MA Experiment 20000265 PARAMETER Experiment Name: At_Open_Flower_P Parameter: Tissue Value: Closed Flower vs. Whole Plant
  misc_feature: MA Experiment ID: 20000286 Result: Down-regulated in Transcription
  misc_feature: MA Experiment 20000286 PARAMETER Experiment Name: At_Open_Flower_P Parameter: Age (day) Value: 21
  misc_feature: MA Experiment 20000286 PARAMETER Experiment Name: At_Open_Flower_P Parameter: Plant Line Value: WS
  misc_feature: MA Experiment 20000286 PARAMETER Experiment Name: At_Open_Flower_P Parameter: Tissue Value: Half Open vs. Whole Plant
  misc_feature: MA Experiment ID: 20001558 Result: Down-regulated in Transcription
  misc_feature: MA Experiment 20001558 PARAMETER Experiment Name: At_Drought_Soil_Dry_P Parameter: Age (day) Value: 27
  misc_feature: MA Experiment 20001558 PARAMETER Experiment Name: At_Drought_Soil_Dry_P Parameter: Organism Value: A. thaliana
  misc_feature: MA Experiment 20001558 PARAMETER Experiment Name: At_Drought_Soil_Dry_P Parameter: Plant Line Value: WS
  misc_feature: MA Experiment 20001558 PARAMETER Experiment Name: At_Drought_Soil_Dry_P Parameter: Post Timepoint (hr) Value: 6
  misc_feature: MA Experiment 20001558 PARAMETER Experiment Name: At_Drought_Soil_Dry_P Parameter: Post-Treatment Value: Re-Water vs. No Drought
  misc_feature: MA Experiment 20001558 PARAMETER Experiment Name: At_Drought_Soil_Dry_P Parameter: Timepoint (day) Value: 13
  misc_feature: MA Experiment 20001558 PARAMETER Experiment Name: At_Drought_Soil_Dry_P Parameter: Treatment Value: Drought vs. No Drought

SEQ ID NO: 31903 - protein, 250 aa, Arabidopsis thaliana; identical to SEQ ID NO: 28313
  peptide (1)..(250): Ceres Seq. ID no. 12420742
  misc_feature (29)..(114): Pfam Name: RNA recognition motif. (a.k.a. RRM, RBD, or RNP domain) Pfam Description: RNA recognition motif. (a.k.a. RRM, RBD, or RNP
  misc_feature (1)..(127): Homolog of NCBI NO: 34896588 NR Description: putative RNA-binding protein [Oryza sativa]
  misc_feature (1)..(121): Homolog of NCBI NO: 6449448 NR Description: RNA-binding protein homolog [Brassica napus]
  misc_feature (3)..(222): Homolog of NCBI NO: 34394175 NR Description: putative RNA-binding protein homolog
  misc_feature (3)..(210): Homolog of NCBI NO: 18406414 NR Description: VirF-interacting protein FIP1
  misc_feature (3)..(210): Homolog of NCBI NO: 15724224 NR Description: At2g43970/F6E13.10 [Arabidopsis thaliana]
  misc_feature (1)..(236): Homolog of NCBI NO: 34909652 NR Description: RNA-binding protein-like [Oryza sativa (japonica
  misc_feature (1)..(236): Homolog of NCBI NO: 15230287 NR Description: RNA-binding protein, putative; protein id:
  misc_feature (1)..(250): Homolog of NCBI NO: 30694922 NR Description: RNA recognition motif (RRM)-containing protein
  misc_feature (1)..(250): Homolog of NCBI NO: 10177706 NR Description: contains similarity to RNA-binding
  misc_feature (1)..(250): Homolog of NCBI NO: 30694926 NR Description: RNA recognition motif (RRM)-containing protein

SEQ ID NO: 31904 - protein, 135 aa, Arabidopsis thaliana; identical to SEQ ID NO: 28314
  peptide (1)..(135): Ceres Seq. ID no. 12420743

SEQ ID NO: 31905 - protein, 129 aa, Arabidopsis thaliana; identical to SEQ ID NO: 28315
  peptide (1)..(129): Ceres Seq. ID no. 12420744

SEQ ID NO: 31906 - DNA, 813 bp, Arabidopsis thaliana; identical to SEQ ID NO: 28316
  misc_feature (1)..(813): Ceres Seq. ID no. 12420563
  misc_feature: MA Experiment ID: 108434 Result: Up-regulated in Transcription
  misc_feature: MA Experiment 108434 PARAMETER Experiment Name: At_Root_Tips_cDNA_P Parameter: Tissue Value: Root Tips
  misc_feature: MA Experiment ID: 108435 Result: Up-regulated in Transcription
  misc_feature: MA Experiment 108435 PARAMETER Experiment Name: At_stm_Mutants_cDNA_P Parameter: Plant Line Value: wt Landsburg vs stm
  misc_feature: MA Experiment 108435 PARAMETER Experiment Name: At_stm_Mutants_cDNA_P Parameter: Tissue Value: Shoot Apical Meristem Region
  misc_feature: MA Experiment ID: 108461 Result: Up-regulated in Transcription
  misc_feature: MA Experiment 108461 PARAMETER Experiment Name: At_Germinating_Seeds_cDNA_P Parameter: Age (day) Value: 1 vs. 0
  misc_feature: MA Experiment 108461 PARAMETER Experiment Name: At_Germinating_Seeds_cDNA_P Parameter: Tissue Value: Germinating Seeds
  misc_feature: MA Experiment ID: 108462 Result: Up-regulated in Transcription
  misc_feature: MA Experiment 108462 PARAMETER Experiment Name: At_Germinating_Seeds_cDNA_P Parameter: Age (day) Value: 2 vs. 0
  misc_feature: MA Experiment 108462 PARAMETER Experiment Name: At_Germinating_Seeds_cDNA_P Parameter: Tissue Value: Germinating Seeds
  misc_feature: MA Experiment ID: 108561 Result: Down-regulated in Transcription
  misc_feature: MA Experiment 108561 PARAMETER Experiment Name: At_100uM_ABA_cDNA_P Parameter: Timepoint (hr) Value: 6
  misc_feature: MA Experiment 108561 PARAMETER Experiment Name: At_100uM_ABA_cDNA_P Parameter: Tissue Value: Aerial
  misc_feature: MA Experiment 108561 PARAMETER Experiment Name: At_100uM_ABA_cDNA_P Parameter: Treatment Value: 100uM ABA vs. No Treatment
  misc_feature: MA Experiment ID: 20000069 Result: Down-regulated in Transcription
  misc_feature: MA Experiment 20000069 PARAMETER Experiment Name: At_100uM_ABA_Mutants_cDNA_P Parameter: Plant Line Value: CS23
  misc_feature: MA Experiment 20000069 PARAMETER Experiment Name: At_100uM_ABA_Mutants_cDNA_P Parameter: Timepoint (hr) Value: 6
  misc_feature: MA Experiment 20000069 PARAMETER Experiment Name: At_100uM_ABA_Mutants_cDNA_P Parameter: Tissue Value: Aerial
  misc_feature: MA Experiment 20000069 PARAMETER Experiment Name: At_100uM_ABA_Mutants_cDNA_P Parameter: Treatment Value: 100uM ABA vs. No Treatment
  misc_feature: MA Experiment ID: 20000070 Result: Down-regulated in Transcription
  misc_feature: MA Experiment 20000070 PARAMETER Experiment Name: At_100uM_ABA_Mutants_cDNA_P Parameter: Plant Line Value: CS24
  misc_feature: MA Experiment 20000070 PARAMETER Experiment Name: At_100uM_ABA_Mutants_cDNA_P Parameter: Timepoint (hr) Value: 6
  misc_feature: MA Experiment 20000070 PARAMETER Experiment Name: At_100uM_ABA_Mutants_cDNA_P Parameter: Tissue Value: Aerial
  misc_feature: MA Experiment 20000070 PARAMETER Experiment Name: At_100uM_ABA_Mutants_cDNA_P Parameter: Treatment Value: 100uM ABA vs. No Treatment
  misc_feature: MA Experiment ID: 20000071 Result: Down-regulated in Transcription
  misc_feature: MA Experiment 20000071 PARAMETER Experiment Name: At_100uM_ABA_Mutants_cDNA_P Parameter: Plant Line Value: CS8104
  misc_feature: MA Experiment 20000071 PARAMETER Experiment Name: At_100uM_ABA_Mutants_cDNA_P Parameter: Timepoint (hr) Value: 6
  misc_feature: MA Experiment 20000071 PARAMETER Experiment Name: At_100uM_ABA_Mutants_cDNA_P Parameter: Tissue Value: Aerial
  misc_feature: MA Experiment 20000071 PARAMETER Experiment Name: At_100uM_ABA_Mutants_cDNA_P Parameter: Treatment Value: 100uM ABA vs. No Treatment
  misc_feature: MA Experiment ID: 20000072 Result: Down-regulated in Transcription
  misc_feature: MA Experiment 20000072 PARAMETER Experiment Name: At_100uM_ABA_Mutants_cDNA_P Parameter: Plant Line Value: CS8105
  misc_feature: MA Experiment 20000072 PARAMETER Experiment Name: At_100uM_ABA_Mutants_cDNA_P Parameter: Timepoint (hr) Value: 6
  misc_feature: MA Experiment 20000072 PARAMETER Experiment Name: At_100uM_ABA_Mutants_cDNA_P Parameter: Tissue Value: Aerial
  misc_feature: MA Experiment 20000072 PARAMETER Experiment Name: At_100uM_ABA_Mutants_cDNA_P Parameter: Treatment Value: 100uM ABA vs. No Treatment
  misc_feature: MA Experiment ID: 20000089 Result: Down-regulated in Transcription
  misc_feature: MA Experiment ID: 20000112 Result: Down-regulated in Transcription
  misc_feature: MA Experiment 20000112 PARAMETER Experiment Name: At_42deg_Heat_cDNA_P Parameter: Temperature (deg C) Value: 42 vs. 22
  misc_feature: MA Experiment 20000112 PARAMETER Experiment Name: At_42deg_Heat_cDNA_P Parameter: Timepoint (hr) Value: 2
  misc_feature: MA Experiment 20000112 PARAMETER Experiment Name: At_42deg_Heat_cDNA_P Parameter: Tissue Value: Aerial
  misc_feature: MA Experiment ID: 20000113 Result: Down-regulated in Transcription
  misc_feature: MA Experiment 20000113 PARAMETER Experiment Name: At_42deg_Heat_cDNA_P Parameter: Temperature (deg C) Value: 42 vs. 22
  misc_feature: MA Experiment 20000113 PARAMETER Experiment Name: At_42deg_Heat_cDNA_P Parameter: Timepoint (hr) Value: 8
  misc_feature: MA Experiment 20000113 PARAMETER Experiment Name: At_42deg_Heat_cDNA_P Parameter: Tissue Value: Aerial
  misc_feature: MA Experiment ID: 20000117 Result: Down-regulated in Transcription
  misc_feature: MA Experiment 20000117 PARAMETER Experiment Name: At_100uM_ABA_Mutants_cDNA_P Parameter: Plant Line Value: Columbia
  misc_feature: MA Experiment 20000117 PARAMETER Experiment Name: At_100uM_ABA_Mutants_cDNA_P Parameter: Timepoint (hr) Value: 6
  misc_feature: MA Experiment 20000117 PARAMETER Experiment Name: At_100uM_ABA_Mutants_cDNA_P Parameter: Tissue Value: Aerial
  misc_feature: MA Experiment 20000117 PARAMETER Experiment Name: At_100uM_ABA_Mutants_cDNA_P Parameter: Treatment Value: 100uM ABA vs. No Treatment
  misc_feature: MA Experiment ID: 20000180 Result: Up-regulated in Transcription
  misc_feature: MA Experiment 20000180 PARAMETER Experiment Name: At_Germinating_Seeds_P Parameter: Age (hr) Value: 24 vs. 0
  misc_feature: MA Experiment 20000180 PARAMETER Experiment Name: At_Germinating_Seeds_P Parameter: Tissue Value: Germinating Seeds
  misc_feature: MA Experiment ID: 20000184 Result: Up-regulated in Transcription
  misc_feature: MA Experiment 20000184 PARAMETER Experiment Name: At_Shoots__P Parameter: Age (day) Value: 7
  misc_feature: MA Experiment 20000184 PARAMETER Experiment Name: At_Shoots__P Parameter: Tissue Value: Shoots vs. Whole Plant
  misc_feature: MA Experiment ID: 20000235 Result: Up-regulated in Transcription
  misc_feature: MA Experiment 20000235 PARAMETER Experiment Name: At_Siliques_P Parameter: Age (day) Value: 21
  misc_feature: MA Experiment 20000235 PARAMETER Experiment Name: At_Siliques_P Parameter: Organism Value: A. thaliana
  misc_feature: MA Experiment 20000235 PARAMETER Experiment Name: At_Siliques_P Parameter: Plant Line Value: WS
  misc_feature: MA Experiment 20000235 PARAMETER Experiment Name: At_Siliques_P Parameter: Tissue Value: 5-10mm Siliques vs. Whole Plant
  misc_feature: MA Experiment ID: 20000437 Result: Down-regulated in Transcription
  misc_feature: MA Experiment 20000437 PARAMETER Experiment Name: At_Drought_P Parameter: Age (day) Value: 8
  misc_feature: MA Experiment 20000437 PARAMETER Experiment Name: At_Drought_P Parameter: Organism Value: A. thaliana
  misc_feature: MA Experiment 20000437 PARAMETER Experiment Name: At_Drought_P Parameter: Plant Line Value: WS
  misc_feature: MA Experiment 20000437 PARAMETER Experiment Name: At_Drought_P Parameter: Timepoint (hr) Value: 24
  misc_feature: MA Experiment 20000437 PARAMETER Experiment Name: At_Drought_P Parameter: Tissue Value: Whole Plant
  misc_feature: MA Experiment 20000437 PARAMETER Experiment Name: At_Drought_P Parameter: Treatment Value: Drought vs. No Drought
  misc_feature: MA Experiment ID: 20000495 Result: Up-regulated in Transcription
  misc_feature: MA Experiment 20000495 PARAMETER Experiment Name: At_Guard_Cells_P Parameter: Harvest Date Value: 8/2/2002
  misc_feature: MA Experiment 20000495 PARAMETER Experiment Name: At_Guard_Cells_P Parameter: Organism Value: A. thaliana
  misc_feature: MA Experiment 20000495 PARAMETER Experiment Name: At_Guard_Cells_P Parameter: Tissue Value: Guard Cells vs. Leaves
  misc_feature: MA Experiment ID: 20001248 Result: Down-regulated in Transcription
  misc_feature: MA Experiment 20001248 PARAMETER Experiment Name: At_Far-red-induction_P Parameter: Age (day) Value: 7
  misc_feature: MA Experiment 20001248 PARAMETER Experiment Name: At_Far-red-induction_P Parameter: Light Value: Far-red vs. White
  misc_feature: MA Experiment 20001248 PARAMETER Experiment Name: At_Far-red-induction_P Parameter: Organism Value: A. thaliana
  misc_feature: MA Experiment 20001248 PARAMETER Experiment Name: At_Far-red-induction_P Parameter: Plant Line Value: Columbia
  misc_feature: MA Experiment 20001248 PARAMETER Experiment Name: At_Far-red-induction_P Parameter: Timepoint (hr) Value: 4
  misc_feature: MA Experiment 20001248 PARAMETER Experiment Name: At_Far-red-induction_P Parameter: Tissue Value: Whole Plant

SEQ ID NO: 31907 - protein, 193 aa, Arabidopsis thaliana; identical to SEQ ID NO: 28317
  peptide (1)..(193): Ceres Seq. ID no. 12420564
  misc_feature (3)..(94): Pfam Name: Fasciclin domain Pfam Description: Fasciclin domain
  misc_feature (1)..(126): Homolog of NCBI NO: 29836527 NR Description: putative pollen surface protein [Gossypium
  misc_feature (1)..(126): Homolog of NCBI NO: 29836525 NR Description: putative pollen surface protein [Gossypium
  misc_feature (1)..(126): Homolog of NCBI NO: 29836533 NR Description: putative pollen surface protein [Gossypioides
  misc_feature (3)..(168): Homolog of NCBI NO: 38424037 NR Description: putative fasciclin-like arabinogalactan-protein
  misc_feature (1)..(126): Homolog of NCBI NO: 29836529 NR Description: putative pollen surface protein [Gossypium
  misc_feature (3)..(151): Homolog of NCBI NO: 15235459 NR Description: fasciclin-like arabinogalactan-protein (FLA2)
  misc_feature (3)..(151): Homolog of NCBI NO: 13377778 NR Description: fasciclin-like arabinogalactan-protein 2
  misc_feature (3)..(151): Homolog of NCBI NO: 21593810 NR Description: putative pollen surface protein [Arabidopsis
  misc_feature (1)..(193): Homolog of NCBI NO: 21618321 NR Description: unknown [Arabidopsis thaliana]
  misc_feature (1)..(193): Homolog of NCBI NO: 15240570 NR Description: fasciclin-like arabinogalactan-protein (FLA1)

SEQ ID NO: 31908 - protein, 164 aa, Arabidopsis thaliana; identical to SEQ ID NO: 28318
  peptide (1)..(164): Ceres Seq. ID no. 12420565
  misc_feature (1)..(65): Pfam Name: Fasciclin domain Pfam Description: Fasciclin domain
  misc_feature (1)..(97): Homolog of NCBI NO: 29836527 NR Description: putative pollen surface protein [Gossypium
  misc_feature (1)..(97): Homolog of NCBI NO: 29836525 NR Description: putative pollen surface protein [Gossypium
  misc_feature (1)..(97): Homolog of NCBI NO: 29836533 NR Description: putative pollen surface protein [Gossypioides
  misc_feature (1)..(139): Homolog of NCBI NO: 38424037 NR Description: putative fasciclin-like arabinogalactan-protein
  misc_feature (1)..(97): Homolog of NCBI NO: 29836529 NR Description: putative pollen surface protein [Gossypium
  misc_feature (1)..(122): Homolog of NCBI NO: 15235459 NR Description: fasciclin-like arabinogalactan-protein (FLA2)
  misc_feature (1)..(122): Homolog of NCBI NO: 13377778 NR Description: fasciclin-like arabinogalactan-protein 2
  misc_feature (1)..(122): Homolog of NCBI NO: 21593810 NR Description: putative pollen surface protein [Arabidopsis
  misc_feature (1)..(164): Homolog of NCBI NO: 21618321 NR Description: unknown [Arabidopsis thaliana]
  misc_feature (1)..(164): Homolog of NCBI NO: 15240570 NR Description: fasciclin-like arabinogalactan-protein (FLA1)

SEQ ID NO: 31909 - protein, 162 aa, Arabidopsis thaliana; identical to SEQ ID NO: 28319
  peptide (1)..(162): Ceres Seq. ID no. 12420566
  misc_feature (1)..(63): Pfam Name: Fasciclin domain Pfam Description: Fasciclin domain
  misc_feature (1)..(95): Homolog of NCBI NO: 29836527 NR Description: putative pollen surface protein [Gossypium
  misc_feature (1)..(95): Homolog of NCBI NO: 29836525 NR Description: putative pollen surface protein [Gossypium
  misc_feature (1)..(95): Homolog of NCBI NO: 29836533 NR Description: putative pollen surface protein [Gossypioides
  misc_feature (1)..(137): Homolog of NCBI NO: 38424037 NR Description: putative fasciclin-like arabinogalactan-protein
  misc_feature (1)..(95): Homolog of NCBI NO: 29836529 NR Description: putative pollen surface protein [Gossypium
  misc_feature (1)..(120): Homolog of NCBI NO: 15235459 NR Description: fasciclin-like arabinogalactan-protein (FLA2)
  misc_feature (1)..(120): Homolog of NCBI NO: 13377778 NR Description: fasciclin-like arabinogalactan-protein 2
  misc_feature (1)..(120): Homolog of NCBI NO: 21593810 NR Description: putative pollen surface protein [Arabidopsis
  misc_feature (1)..(162): Homolog of NCBI NO: 21618321 NR Description: unknown [Arabidopsis thaliana]
  misc_feature (1)..(162): Homolog of NCBI NO: 15240570 NR Description: fasciclin-like arabinogalactan-protein (FLA1)

SEQ ID NO: 31910 - DNA, 787 bp, Arabidopsis thaliana; identical to SEQ ID NO: 28320
  misc_feature (1)..(787): Ceres Seq. ID no. 12340441
  misc_feature: MA Experiment ID: 108434 Result: Down-regulated in Transcription
  misc_feature: MA Experiment 108434 PARAMETER Experiment Name: At_Root_Tips_cDNA_P Parameter: Tissue Value: Root Tips
  misc_feature: MA Experiment ID: 108462 Result: Down-regulated in Transcription
  misc_feature: MA Experiment 108462 PARAMETER Experiment Name: At_Germinating_Seeds_cDNA_P Parameter: Age (day) Value: 2 vs. 0
  misc_feature: MA Experiment 108462 PARAMETER Experiment Name: At_Germinating_Seeds_cDNA_P Parameter: Tissue Value: Germinating Seeds
  misc_feature: MA Experiment ID: 108488 Result: Up-regulated in Transcription
  misc_feature: MA Experiment ID: 108501 Result: Up-regulated in Transcription
  misc_feature: MA Experiment 108501 PARAMETER Experiment Name: At_ap2_floral_buds_cDNA_P Parameter: Plant Line Value: ap2 (Ler.)
  misc_feature: MA Experiment 108501 PARAMETER Experiment Name: At_ap2_floral_buds_cDNA_P Parameter: Tissue Value: Closed Flower
  misc_feature: MA Experiment ID: 108561 Result: Down-regulated in Transcription
  misc_feature: MA Experiment 108561 PARAMETER Experiment Name: At_100uM_ABA_cDNA_P Parameter: Timepoint (hr) Value: 6
  misc_feature: MA Experiment 108561 PARAMETER Experiment Name: At_100uM_ABA_cDNA_P Parameter: Tissue Value: Aerial
  misc_feature: MA Experiment 108561 PARAMETER Experiment Name: At_100uM_ABA_cDNA_P Parameter: Treatment Value: 100uM ABA vs. No Treatment
  misc_feature: MA Experiment ID: 108573 Result: Down-regulated in Transcription
  misc_feature: MA Experiment 108573 PARAMETER Experiment Name: At_Drought_cDNA_P Parameter: Timepoint (hr) Value: 6
  misc_feature: MA Experiment 108573 PARAMETER Experiment Name: At_Drought_cDNA_P Parameter: Tissue Value: Aerial
  misc_feature: MA Experiment 108573 PARAMETER Experiment Name: At_Drought_cDNA_P Parameter: Treatment Value: Drought vs. No Drought
  misc_feature: MA Experiment ID: 108574 Result: Up-regulated in Transcription
  misc_feature: MA Experiment 108574 PARAMETER Experiment Name: At_Wounding__cDNA_P Parameter: Timepoint (hr) Value: 1
  misc_feature: MA Experiment 108574 PARAMETER Experiment Name: At_Wounding__cDNA_P Parameter: Tissue Value: Aerial
  misc_feature: MA Experiment 108574 PARAMETER Experiment Name: At_Wounding__cDNA_P Parameter: Treatment Value: Wounding vs. No Wounding
  misc_feature: MA Experiment ID: 108579 Result: Up-regulated in Transcription
  misc_feature: MA Experiment 108579 PARAMETER Experiment Name: At_4deg_Cold_cDNA_P Parameter: Temperature (deg C) Value: 4 vs. 22
  misc_feature: MA Experiment 108579 PARAMETER Experiment Name: At_4deg_Cold_cDNA_P Parameter: Timepoint (hr) Value: 6
  misc_feature: MA Experiment 108579 PARAMETER Experiment Name: At_4deg_Cold_cDNA_P Parameter: Tissue Value: Aerial
  misc_feature: MA Experiment ID: 108585 Result: Down-regulated in Transcription
  misc_feature: MA Experiment 108585 PARAMETER Experiment Name: At_5mM_NaNP_cDNA_P Parameter: Timepoint (hr) Value: 6
  misc_feature: MA Experiment 108585 PARAMETER Experiment Name: At_5mM_NaNP_cDNA_P Parameter: Tissue Value: Aerial
  misc_feature: MA Experiment 108585 PARAMETER Experiment Name: At_5mM_NaNP_cDNA_P Parameter: Treatment Value: null
  misc_feature: MA Experiment ID: 108605 Result: Down-regulated in Transcription
  misc_feature: MA Experiment 108605 PARAMETER Experiment Name: At_100uM_ABA_cDNA_P Parameter: Timepoint (hr) Value: 6
  misc_feature: MA Experiment 108605 PARAMETER Experiment Name: At_100uM_ABA_cDNA_P Parameter: Tissue Value: Aerial
  misc_feature: MA Experiment 108605 PARAMETER Experiment Name: At_100uM_ABA_cDNA_P Parameter: Treatment Value: 100uM ABA vs. No Treatment
  misc_feature: MA Experiment ID: 108607 Result: Down-regulated in Transcription
  misc_feature: MA Experiment 108607 PARAMETER Experiment Name: At_100uM_ABA_cDNA_P Parameter: Timepoint (hr) Value: 4
  misc_feature: MA Experiment 108607 PARAMETER Experiment Name: At_100uM_ABA_cDNA_P Parameter: Tissue Value: Aerial
  misc_feature: MA Experiment 108607 PARAMETER Experiment Name: At_100uM_ABA_cDNA_P Parameter: Treatment Value: 100uM ABA vs. No Treatment
  misc_feature: MA Experiment ID: 108668 Result: Down-regulated in Transcription
  misc_feature: MA Experiment 108668 PARAMETER Experiment Name: At_2mM_SA_cDNA_P Parameter: Plant Line Value: WS
  misc_feature: MA Experiment 108668 PARAMETER Experiment Name: At_2mM_SA_cDNA_P Parameter: Timepoint (hr) Value: 6
  misc_feature: MA Experiment 108668 PARAMETER Experiment Name: At_2mM_SA_cDNA_P Parameter: Treatment Value: 2mM SA vs. No Treatment
  misc_feature: MA Experiment ID: 20000069 Result: Up-regulated in Transcription
  misc_feature: MA Experiment 20000069 PARAMETER Experiment Name: At_100uM_ABA_Mutants_cDNA_P Parameter: Plant Line Value: CS23
  misc_feature: MA Experiment 20000069 PARAMETER Experiment Name: At_100uM_ABA_Mutants_cDNA_P Parameter: Timepoint (hr) Value: 6
  misc_feature: MA Experiment 20000069 PARAMETER Experiment Name: At_100uM_ABA_Mutants_cDNA_P Parameter: Tissue Value: Aerial
  misc_feature: MA Experiment 20000069 PARAMETER Experiment Name: At_100uM_ABA_Mutants_cDNA_P Parameter: Treatment Value: 100uM ABA vs. No Treatment
  misc_feature: MA Experiment ID: 20000070 Result: Up-regulated in Transcription
  misc_feature: MA Experiment 20000070 PARAMETER Experiment Name: At_100uM_ABA_Mutants_cDNA_P Parameter: Plant Line Value: CS24
  misc_feature: MA Experiment 20000070 PARAMETER Experiment Name: At_100uM_ABA_Mutants_cDNA_P Parameter: Timepoint (hr) Value: 6
  misc_feature: MA Experiment 20000070 PARAMETER Experiment Name: At_100uM_ABA_Mutants_cDNA_P Parameter: Tissue Value: Aerial
  misc_feature: MA Experiment 20000070 PARAMETER Experiment Name: At_100uM_ABA_Mutants_cDNA_P Parameter: Treatment Value: 100uM ABA vs. No Treatment
  misc_feature: MA Experiment ID: 20000071 Result: Up-regulated in Transcription
  misc_feature: MA Experiment 20000071 PARAMETER Experiment Name: At_100uM_ABA_Mutants_cDNA_P Parameter: Plant Line Value: CS8104
  misc_feature: MA Experiment 20000071 PARAMETER Experiment Name: At_100uM_ABA_Mutants_cDNA_P Parameter: Timepoint (hr) Value: 6
  misc_feature: MA Experiment 20000071 PARAMETER Experiment Name: At_100uM_ABA_Mutants_cDNA_P Parameter: Tissue Value: Aerial
  misc_feature: MA Experiment 20000071 PARAMETER Experiment Name: At_100uM_ABA_Mutants_cDNA_P Parameter: Treatment Value: 100uM ABA vs. No Treatment
  misc_feature: MA Experiment ID: 20000072 Result: Up-regulated in Transcription
  misc_feature: MA Experiment 20000072 PARAMETER Experiment Name: At_100uM_ABA_Mutants_cDNA_P Parameter: Plant Line Value: CS8105
  misc_feature: MA Experiment 20000072 PARAMETER Experiment Name: At_100uM_ABA_Mutants_cDNA_P Parameter: Timepoint (hr) Value: 6
  misc_feature: MA Experiment 20000072 PARAMETER Experiment Name: At_100uM_ABA_Mutants_cDNA_P Parameter: Tissue Value: Aerial
  misc_feature: MA Experiment 20000072 PARAMETER Experiment Name: At_100uM_ABA_Mutants_cDNA_P Parameter: Treatment Value: 100uM ABA vs. No Treatment
  misc_feature: MA Experiment ID: 20000086 Result: Up-regulated in Transcription
  misc_feature: MA Experiment 20000086 PARAMETER Experiment Name: At_100uM_ABA_Mutants_cDNA_P Parameter: Plant Line Value: CS22
  misc_feature: MA Experiment 20000086 PARAMETER Experiment Name: At_100uM_ABA_Mutants_cDNA_P Parameter: Timepoint (hr) Value: 6
  misc_feature: MA Experiment 20000086 PARAMETER Experiment Name: At_100uM_ABA_Mutants_cDNA_P Parameter: Tissue Value: Aerial
  misc_feature: MA Experiment 20000086 PARAMETER Experiment Name: At_100uM_ABA_Mutants_cDNA_P Parameter: Treatment Value: 100uM ABA vs. No Treatment
  misc_feature: MA Experiment ID: 20000087 Result: Up-regulated in Transcription
  misc_feature: MA Experiment 20000087 PARAMETER Experiment Name: At_100uM_ABA_Mutants_cDNA_P Parameter: Plant Line Value: WS
  misc_feature: MA Experiment 20000087 PARAMETER Experiment Name: At_100uM_ABA_Mutants_cDNA_P Parameter: Timepoint (hr) Value: 6
  misc_feature: MA Experiment 20000087 PARAMETER Experiment Name: At_100uM_ABA_Mutants_cDNA_P Parameter: Tissue Value: Aerial
  misc_feature: MA Experiment 20000087 PARAMETER Experiment Name: At_100uM_ABA_Mutants_cDNA_P Parameter: Treatment Value: 100uM ABA vs. No Treatment
  misc_feature: MA Experiment ID: 20000088 Result: Up-regulated in Transcription
  misc_feature: MA Experiment 20000088 PARAMETER Experiment Name: At_100uM_ABA_Mutants_cDNA_P Parameter: Plant Line Value: Landsberg
  misc_feature: MA Experiment 20000088 PARAMETER Experiment Name: At_100uM_ABA_Mutants_cDNA_P Parameter: Timepoint (hr) Value: 6
  misc_feature: MA Experiment 20000088 PARAMETER Experiment Name: At_100uM_ABA_Mutants_cDNA_P Parameter: Tissue Value: Aerial
  misc_feature: MA Experiment 20000088 PARAMETER Experiment Name: At_100uM_ABA_Mutants_cDNA_P Parameter: Treatment Value: 100uM ABA vs. No Treatment
  misc_feature: MA Experiment ID: 20000089 Result: Up-regulated in Transcription
  misc_feature: MA Experiment ID: 20000090 Result: Up-regulated in Transcription
  misc_feature: MA Experiment ID: 20000117 Result: Up-regulated in Transcription
  misc_feature: MA Experiment 20000117 PARAMETER Experiment Name: At_100uM_ABA_Mutants_cDNA_P Parameter: Plant Line Value: Columbia
  misc_feature: MA Experiment 20000117 PARAMETER Experiment Name: At_100uM_ABA_Mutants_cDNA_P Parameter: Timepoint (hr) Value: 6
  misc_feature: MA Experiment 20000117 PARAMETER Experiment Name: At_100uM_ABA_Mutants_cDNA_P Parameter: Tissue Value: Aerial
  misc_feature: MA Experiment 20000117 PARAMETER Experiment Name: At_100uM_ABA_Mutants_cDNA_P Parameter: Treatment Value: 100uM ABA vs. No Treatment
  misc_feature: MA Experiment ID: 20000169 Result: Down-regulated in Transcription
  misc_feature: MA Experiment 20000169 PARAMETER Experiment Name: At_100uM_ABA_P Parameter: Age (day) Value: 14
  misc_feature: MA Experiment 20000169 PARAMETER Experiment Name: At_100uM_ABA_P Parameter: Organism Value: A. thaliana
  misc_feature: MA Experiment 20000169 PARAMETER Experiment Name: At_100uM_ABA_P Parameter: Plant Line Value: WS
  misc_feature: MA Experiment 20000169 PARAMETER Experiment Name: At_100uM_ABA_P Parameter: Timepoint (hr) Value: 6
  misc_feature: MA Experiment 20000169 PARAMETER Experiment Name: At_100uM_ABA_P Parameter: Tissue Value: Aerial
  misc_feature: MA Experiment 20000169 PARAMETER Experiment Name: At_100uM_ABA_P Parameter: Treatment Value: 100uM ABA vs. No Treatment
  misc_feature: MA Experiment ID: 20000171 Result: Down-regulated in Transcription
  misc_feature: MA Experiment 20000171 PARAMETER Experiment Name: At_42deg_Heat_P Parameter: Age (day) Value: 14
  misc_feature: MA Experiment 20000171 PARAMETER Experiment Name: At_42deg_Heat_P Parameter: Organism Value: A. thaliana
  misc_feature: MA Experiment 20000171 PARAMETER Experiment Name: At_42deg_Heat_P Parameter: Plant Line Value: WS
  misc_feature: MA Experiment 20000171 PARAMETER Experiment Name: At_42deg_Heat_P Parameter: Temperature (deg C) Value: 42 vs. 22
  misc_feature: MA Experiment 20000171 PARAMETER Experiment Name: At_42deg_Heat_P Parameter: Timepoint (hr) Value: 1
  misc_feature: MA Experiment 20000171 PARAMETER Experiment Name: At_42deg_Heat_P Parameter: Tissue Value: Aerial
  misc_feature: MA Experiment ID: 20000179 Result: Down-regulated in Transcription
  misc_feature: MA Experiment 20000179 PARAMETER Experiment Name: At_Germinating_Seeds_P Parameter: Age (hr) Value: 6 vs. 0
  misc_feature: MA Experiment 20000179 PARAMETER Experiment Name: At_Germinating_Seeds_P Parameter: Tissue Value: Germinating Seeds
  misc_feature: MA Experiment ID: 20000182 Result: Down-regulated in Transcription
  misc_feature: MA Experiment 20000182 PARAMETER Experiment Name: At_2mM_SA_P Parameter: Age (day) Value: 14
  misc_feature: MA Experiment 20000182 PARAMETER Experiment Name: At_2mM_SA_P Parameter: Organism Value: A. thaliana
  misc_feature: MA Experiment 20000182 PARAMETER Experiment Name: At_2mM_SA_P Parameter: Plant Line Value: WS
  misc_feature: MA Experiment 20000182 PARAMETER Experiment Name: At_2mM_SA_P Parameter: Timepoint (hr) Value: 6
  misc_feature: MA Experiment 20000182 PARAMETER Experiment Name: At_2mM_SA_P Parameter: Tissue Value: Aerial
  misc_feature: MA Experiment 20000182 PARAMETER Experiment Name: At_2mM_SA_P Parameter: Treatment Value: 2mM SA vs. No Treatment
  misc_feature: MA Experiment ID: 20000211 Result: Up-regulated in Transcription
  misc_feature: MA Experiment 20000211 PARAMETER Experiment Name: At_0.001percent_MeJA__P Parameter: Age (day) Value: 14
  misc_feature: MA Experiment 20000211 PARAMETER Experiment Name: At_0.001percent_MeJA__P Parameter: Organism Value: A. thaliana
  misc_feature: MA Experiment 20000211 PARAMETER Experiment Name: At_0.001percent_MeJA__P Parameter: Plant Line Value: WS
  misc_feature: MA Experiment 20000211 PARAMETER Experiment Name: At_0.001percent_MeJA__P Parameter: Timepoint (hr) Value: 1
  misc_feature: MA Experiment 20000211 PARAMETER Experiment Name: At_0.001percent_MeJA__P Parameter: Tissue Value: Aerial
  misc_feature: MA Experiment 20000211 PARAMETER Experiment Name: At_0.001percent_MeJA__P Parameter: Treatment Value: 0.001percent MeJA vs. No Treatment
  misc_feature: MA Experiment ID: 20000214 Result: Up-regulated in Transcription
  misc_feature: MA Experiment 20000214 PARAMETER Experiment Name: At_4deg_Cold_P Parameter: Timepoint (hr) Value: 6
  misc_feature: MA Experiment ID: 20000227 Result: Down-regulated in Transcription
  misc_feature: MA Experiment 20000227 PARAMETER Experiment Name: At_Root-Tips-vs-Tops_P Parameter: Tissue Value: Root Tips vs. Root Tops
  misc_feature: MA Experiment ID: 20000437 Result: Down-regulated in Transcription
  misc_feature: MA Experiment 20000437 PARAMETER Experiment Name: At_Drought_P Parameter: Age (day) Value: 8
  misc_feature: MA Experiment 20000437 PARAMETER Experiment Name: At_Drought_P Parameter: Organism Value: A. thaliana
  misc_feature: MA Experiment 20000437 PARAMETER Experiment Name: At_Drought_P Parameter: Plant Line Value: WS
  misc_feature: MA Experiment 20000437 PARAMETER Experiment Name: At_Drought_P Parameter: Timepoint (hr) Value: 24
  misc_feature: MA Experiment 20000437 PARAMETER Experiment Name: At_Drought_P Parameter: Tissue Value: Whole Plant
  misc_feature: MA Experiment 20000437 PARAMETER Experiment Name: At_Drought_P Parameter: Treatment Value: Drought vs. No Drought
  misc_feature: MA Experiment ID: 20001560 Result: Down-regulated in Transcription
  misc_feature: MA Experiment 20001560 PARAMETER Experiment Name: At_Drought_Soil_Dry_P Parameter: Age (day) Value: 28
  misc_feature: MA Experiment 20001560 PARAMETER Experiment Name: At_Drought_Soil_Dry_P Parameter: Organism Value: A. thaliana
  misc_feature: MA Experiment 20001560 PARAMETER Experiment Name: At_Drought_Soil_Dry_P Parameter: Plant Line Value: WS
  misc_feature: MA Experiment 20001560 PARAMETER Experiment Name: At_Drought_Soil_Dry_P Parameter: Post Timepoint (hr) Value: None
  misc_feature: MA Experiment 20001560 PARAMETER Experiment Name: At_Drought_Soil_Dry_P Parameter: Post-Treatment Value: None
  misc_feature: MA Experiment 20001560 PARAMETER Experiment Name: At_Drought_Soil_Dry_P Parameter: Timepoint (day) Value: 14
  misc_feature: MA Experiment 20001560 PARAMETER Experiment Name: At_Drought_Soil_Dry_P Parameter: Treatment Value: Drought vs. No Drought
  misc_feature: MA Experiment ID: 20001757 Result: Up-regulated in Transcription
  misc_feature: MA Experiment 20001757 PARAMETER Experiment Name: At_50mM_NH4NO3_L-to-H_P Parameter: Timepoint (hr) Value: 6
  misc_feature: MA Experiment 20001757 PARAMETER Experiment Name: At_50mM_NH4NO3_L-to-H_P Parameter: Tissue Value: Leaf
  misc_feature: MA Experiment 20001757 PARAMETER Experiment Name: At_50mM_NH4NO3_L-to-H_P Parameter: Treatment Value: 50mM NH4NO3 vs 100mM Mannitol
  misc_feature: MA Experiment ID: 20001904 Result: Down-regulated in Transcription
  misc_feature: MA Experiment 20001904 PARAMETER Experiment Name: At_Drought_Reproduction_P Parameter: Age (day) Value: 37
  misc_feature: MA Experiment 20001904 PARAMETER Experiment Name: At_Drought_Reproduction_P Parameter: Organism Value: A. thaliana
  misc_feature: MA Experiment 20001904 PARAMETER Experiment Name: At_Drought_Reproduction_P Parameter: Plant Line Value: WS
  misc_feature: MA Experiment 20001904 PARAMETER Experiment Name: At_Drought_Reproduction_P Parameter: Timepoint (day) Value: 7
  misc_feature: MA Experiment 20001904 PARAMETER Experiment Name: At_Drought_Reproduction_P Parameter: Tissue Value: Rosettes
  misc_feature: MA Experiment 20001904 PARAMETER Experiment Name: At_Drought_Reproduction_P Parameter: Treatment Value: Drought vs. No Drought
  misc_feature: MA Experiment ID: 20001905 Result: Down-regulated in Transcription
  misc_feature: MA Experiment 20001905 PARAMETER Experiment Name: At_Drought_Reproduction_P Parameter: Age (day) Value: 40
  misc_feature: MA Experiment 20001905 PARAMETER Experiment Name: At_Drought_Reproduction_P Parameter: Organism Value: A. thaliana
  misc_feature: MA Experiment 20001905 PARAMETER Experiment Name: At_Drought_Reproduction_P Parameter: Plant Line Value: WS
  misc_feature: MA Experiment 20001905 PARAMETER Experiment Name: At_Drought_Reproduction_P Parameter: Timepoint (day) Value: 10
  misc_feature: MA Experiment 20001905 PARAMETER Experiment Name: At_Drought_Reproduction_P Parameter: Tissue Value: Rosettes
  misc_feature: MA Experiment 20001905 PARAMETER Experiment Name: At_Drought_Reproduction_P Parameter: Treatment Value: Drought vs. No Drought
  misc_feature: MA Experiment ID: 20001906 Result: Down-regulated in Transcription
  misc_feature: MA Experiment 20001906 PARAMETER Experiment Name: At_Drought_Reproduction_P Parameter: Age (day) Value: 35
  misc_feature: MA Experiment 20001906 PARAMETER Experiment Name: At_Drought_Reproduction_P Parameter: Organism Value: A. thaliana
  misc_feature: MA Experiment 20001906 PARAMETER Experiment Name: At_Drought_Reproduction_P Parameter: Plant Line Value: WS
  misc_feature: MA Experiment 20001906 PARAMETER Experiment Name: At_Drought_Reproduction_P Parameter: Timepoint (day) Value: 5
  misc_feature: MA Experiment 20001906 PARAMETER Experiment Name: At_Drought_Reproduction_P Parameter: Tissue Value: Siliques
  misc_feature: MA Experiment 20001906 PARAMETER Experiment Name: At_Drought_Reproduction_P Parameter: Treatment Value: Drought vs. No Drought
  misc_feature: MA Experiment ID: 20001908 Result: Down-regulated in Transcription
  misc_feature: MA Experiment 20001908 PARAMETER Experiment Name: At_Drought_Reproduction_P Parameter: Age (day) Value: 40
  misc_feature: MA Experiment 20001908 PARAMETER Experiment Name: At_Drought_Reproduction_P Parameter: Organism Value: A. thaliana
  misc_feature: MA Experiment 20001908 PARAMETER Experiment Name: At_Drought_Reproduction_P Parameter: Plant Line Value: WS
  misc_feature: MA Experiment 20001908 PARAMETER Experiment Name: At_Drought_Reproduction_P Parameter: Timepoint (day) Value: 10
  misc_feature: MA Experiment 20001908 PARAMETER Experiment Name: At_Drought_Reproduction_P Parameter: Tissue Value: Siliques
  misc_feature: MA Experiment 20001908 PARAMETER Experiment Name: At_Drought_Reproduction_P Parameter: Treatment Value: Drought vs. No Drought

SEQ ID NO: 31911 - protein, 207 aa, Arabidopsis thaliana; identical to SEQ ID NO: 28321
  peptide (1)..(207): Ceres Seq. ID no. 12340442
  misc_feature (26)..(204): Homolog of NCBI NO: 21555297 NR Description: unknown [Arabidopsis thaliana]
  misc_feature (21)..(204): Homolog of NCBI NO: 15234547 NR Description: putative protein
  misc_feature (15)..(204): Homolog of NCBI NO: 112717 NR Description: 21 KD PROTEIN PRECURSOR (1.2 PROTEIN)
  misc_feature (6)..(207): Homolog of NCBI NO: 15234982 NR Description: putative protein
  misc_feature (36)..(204): Homolog of NCBI NO: 7488727 NR Description: 21K protein precursor - alfalfa
  misc_feature (6)..(204): Homolog of NCBI NO: 7406663 NR Description: putative ripening-related protein [Vitis vinifera]
  misc_feature (6)..(207): Homolog of NCBI NO: 15232790 NR Description: putative protein; protein id: At3g47380.1
  misc_feature (55)..(207): Homolog of NCBI NO: 11127599 NR Description: DC 1.2 homolog [Arabidopsis thaliana]
  misc_feature (6)..(207): Homolog of NCBI NO: 15241799 NR Description: ripening-related protein - like
  misc_feature (6)..(207): Homolog of NCBI NO: 21618088 NR Description: ripening-related protein-like [Arabidopsis

SEQ ID NO: 31912 - protein, 202 aa, Arabidopsis thaliana; identical to SEQ ID NO: 28322
  peptide (1)..(202): Ceres Seq. ID no. 12340443
  misc_feature (21)..(199): Homolog of NCBI NO: 21555297 NR Description: unknown [Arabidopsis thaliana]
  misc_feature (16)..(199): Homolog of NCBI NO: 15234547 NR Description: putative protein
  misc_feature (10)..(199): Homolog of NCBI NO: 112717 NR Description: 21 KD PROTEIN PRECURSOR (1.2 PROTEIN)
  misc_feature (1)..(202): Homolog of NCBI NO: 15234982 NR Description: putative protein
  misc_feature (31)..(199): Homolog of NCBI NO: 7488727 NR Description: 21K protein precursor - alfalfa
  misc_feature (1)..(199): Homolog of NCBI NO: 7406663 NR Description: putative ripening-related protein [Vitis vinifera]
  misc_feature (1)..(202): Homolog of NCBI NO: 15232790 NR Description: putative protein; protein id: At3g47380.1
  misc_feature (50)..(202): Homolog of NCBI NO: 11127599 NR Description: DC 1.2 homolog [Arabidopsis thaliana]
  misc_feature (1)..(202): Homolog of NCBI NO: 15241799 NR Description: ripening-related protein - like
  misc_feature (1)..(202): Homolog of NCBI NO: 21618088 NR Description: ripening-related protein-like [Arabidopsis

SEQ ID NO: 31913 - protein, 108 aa, Arabidopsis thaliana; identical to SEQ ID NO: 28323
  peptide (1)..(108): Ceres Seq. ID no. 12340444
  misc_feature (1)..(105): Homolog of NCBI NO: 21555297 NR Description: unknown [Arabidopsis thaliana]
  misc_feature (1)..(105): Homolog of NCBI NO: 15234547 NR Description: putative protein
  misc_feature (1)..(105): Homolog of NCBI NO: 112717 NR Description: 21 KD PROTEIN PRECURSOR (1.2 PROTEIN)
  misc_feature (1)..(108): Homolog of NCBI NO: 15234982 NR Description: putative protein
  misc_feature (1)..(105): Homolog of NCBI NO: 7488727 NR Description: 21K protein precursor - alfalfa
  misc_feature (1)..(105): Homolog of NCBI NO: 7406663 NR Description: putative ripening-related protein [Vitis vinifera]
  misc_feature (1)..(108): Homolog of NCBI NO: 15232790 NR Description: putative protein; protein id: At3g47380.1
  misc_feature (1)..(108): Homolog of NCBI NO: 11127599 NR Description: DC 1.2 homolog [Arabidopsis thaliana]
  misc_feature (1)..(108): Homolog of NCBI NO: 15241799 NR Description: ripening-related protein - like
  misc_feature (1)..(108): Homolog of NCBI NO: 21618088 NR Description: ripening-related protein-like [Arabidopsis

SEQ ID NO: 31914 - DNA, 737 bp, Arabidopsis thaliana; identical to SEQ ID NO: 28324
  misc_feature (1)..(737): Ceres Seq. ID no. 12393223
  misc_feature: MA Experiment ID: 108607 Result: Up-regulated in Transcription
  misc_feature: MA Experiment 108607 PARAMETER Experiment Name: At_100uM_ABA_cDNA_P Parameter: Timepoint (hr) Value: 4
  misc_feature: MA Experiment 108607 PARAMETER Experiment Name: At_100uM_ABA_cDNA_P Parameter: Tissue Value: Aerial
  misc_feature: MA Experiment 108607 PARAMETER Experiment Name: At_100uM_ABA_cDNA_P Parameter: Treatment Value: 100uM ABA vs. No Treatment
  misc_feature: MA Experiment ID: 20000069 Result: Up-regulated in Transcription
  misc_feature: MA Experiment 20000069 PARAMETER Experiment Name: At_100uM_ABA_Mutants_cDNA_P Parameter: Plant Line Value: CS23
  misc_feature: MA Experiment 20000069 PARAMETER Experiment Name: At_100uM_ABA_Mutants_cDNA_P Parameter: Timepoint (hr) Value: 6
  misc_feature: MA Experiment 20000069 PARAMETER Experiment Name: At_100uM_ABA_Mutants_cDNA_P Parameter: Tissue Value: Aerial
  misc_feature: MA Experiment 20000069 PARAMETER Experiment Name: At_100uM_ABA_Mutants_cDNA_P Parameter: Treatment Value: 100uM ABA vs. No Treatment
  misc_feature: MA Experiment ID: 20000070 Result: Up-regulated in Transcription
  misc_feature: MA Experiment 20000070 PARAMETER Experiment Name: At_100uM_ABA_Mutants_cDNA_P Parameter: Plant Line Value: CS24
  misc_feature: MA Experiment 20000070 PARAMETER Experiment Name: At_100uM_ABA_Mutants_cDNA_P Parameter: Timepoint (hr) Value: 6
  misc_feature: MA Experiment 20000070 PARAMETER Experiment Name: At_100uM_ABA_Mutants_cDNA_P Parameter: Tissue Value: Aerial
  misc_feature: MA Experiment 20000070 PARAMETER Experiment Name: At_100uM_ABA_Mutants_cDNA_P Parameter: Treatment Value: 100uM ABA vs. No Treatment
  misc_feature: MA Experiment ID: 20000086 Result: Up-regulated in Transcription
  misc_feature: MA Experiment 20000086 PARAMETER Experiment Name: At_100uM_ABA_Mutants_cDNA_P Parameter: Plant Line Value: CS22
  misc_feature: MA Experiment 20000086 PARAMETER Experiment Name: At_100uM_ABA_Mutants_cDNA_P Parameter: Timepoint (hr) Value: 6
  misc_feature: MA Experiment 20000086 PARAMETER Experiment Name: At_100uM_ABA_Mutants_cDNA_P Parameter: Tissue Value: Aerial
  misc_feature: MA Experiment 20000086 PARAMETER Experiment Name: At_100uM_ABA_Mutants_cDNA_P Parameter: Treatment Value: 100uM ABA vs. No Treatment
  misc_feature: MA Experiment ID: 20000179 Result: Up-regulated in Transcription
  misc_feature: MA Experiment 20000179 PARAMETER Experiment Name: At_Germinating_Seeds_P Parameter: Age (hr) Value: 6 vs. 0
  misc_feature: MA Experiment 20000179 PARAMETER Experiment Name: At_Germinating_Seeds_P Parameter: Tissue Value: Germinating Seeds
  misc_feature: MA Experiment ID: 20000180 Result: Up-regulated in Transcription
  misc_feature: MA Experiment 20000180 PARAMETER Experiment Name: At_Germinating_Seeds_P Parameter: Age (hr) Value: 24 vs. 0
  misc_feature: MA Experiment 20000180 PARAMETER Experiment Name: At_Germinating_Seeds_P Parameter: Tissue Value: Germinating Seeds
  misc_feature: MA Experiment ID: 20000185 Result: Up-regulated in Transcription
  misc_feature: MA Experiment 20000185 PARAMETER Experiment Name: At_Roots__P Parameter: Age (day) Value: 7 vs. 21
  misc_feature: MA Experiment 20000185 PARAMETER Experiment Name: At_Roots__P Parameter: Organism Value: A. thaliana
  misc_feature: MA Experiment 20000185 PARAMETER Experiment Name: At_Roots__P Parameter: Tissue Value: Roots vs. Whole Plant
  misc_feature: MA Experiment ID: 20000437 Result: Down-regulated in Transcription
  misc_feature: MA Experiment 20000437 PARAMETER Experiment Name: At_Drought_P Parameter: Age (day) Value: 8
  misc_feature: MA Experiment 20000437 PARAMETER Experiment Name: At_Drought_P Parameter: Organism Value: A. thaliana
  misc_feature: MA Experiment 20000437 PARAMETER Experiment Name: At_Drought_P Parameter: Plant Line Value: WS
  misc_feature: MA Experiment 20000437 PARAMETER Experiment Name: At_Drought_P Parameter: Timepoint (hr) Value: 24
  misc_feature: MA Experiment 20000437 PARAMETER Experiment Name: At_Drought_P Parameter: Tissue Value: Whole Plant
  misc_feature: MA Experiment 20000437 PARAMETER Experiment Name: At_Drought_P Parameter: Treatment Value: Drought vs. No Drought
  misc_feature: MA Experiment ID: 20001554 Result: Down-regulated in Transcription
  misc_feature: MA Experiment 20001554 PARAMETER Experiment Name: At_Drought_Soil_Dry_P Parameter: Age (day) Value: 21
  misc_feature: MA Experiment 20001554 PARAMETER Experiment Name: At_Drought_Soil_Dry_P Parameter: Organism Value: A. thaliana
  misc_feature: MA Experiment 20001554 PARAMETER Experiment Name: At_Drought_Soil_Dry_P Parameter: Plant Line Value: WS
  misc_feature: MA Experiment 20001554 PARAMETER Experiment Name: At_Drought_Soil_Dry_P Parameter: Post Timepoint (hr) Value: None
  misc_feature: MA Experiment 20001554 PARAMETER Experiment Name: At_Drought_Soil_Dry_P Parameter: Post-Treatment Value: None
  misc_feature: MA Experiment 20001554 PARAMETER Experiment Name: At_Drought_Soil_Dry_P Parameter: Timepoint (day) Value: 7
  misc_feature: MA Experiment 20001554 PARAMETER Experiment Name: At_Drought_Soil_Dry_P Parameter: Treatment Value: Drought vs. No Drought
  misc_feature: MA Experiment ID: 20001555 Result: Down-regulated in Transcription
  misc_feature: MA Experiment 20001555 PARAMETER Experiment Name: At_Drought_Soil_Dry_P Parameter: Age (day) Value: 24
  misc_feature: MA Experiment 20001555 PARAMETER Experiment Name: At_Drought_Soil_Dry_P Parameter: Organism Value: A. thaliana
  misc_feature: MA Experiment 20001555 PARAMETER Experiment Name: At_Drought_Soil_Dry_P Parameter: Plant Line Value: WS
  misc_feature: MA Experiment 20001555 PARAMETER Experiment Name: At_Drought_Soil_Dry_P Parameter: Post Timepoint (hr) Value: None
  misc_feature: MA Experiment 20001555 PARAMETER Experiment Name: At_Drought_Soil_Dry_P Parameter: Post-Treatment Value: None
  misc_feature: MA Experiment 20001555 PARAMETER Experiment Name: At_Drought_Soil_Dry_P Parameter: Timepoint (day) Value: 10
  misc_feature: MA Experiment 20001555 PARAMETER Experiment Name: At_Drought_Soil_Dry_P Parameter: Treatment Value: Drought vs. No Drought
  misc_feature: MA Experiment ID: 20001556 Result: Down-regulated in Transcription
  misc_feature: MA Experiment 20001556 PARAMETER Experiment Name: At_Drought_Soil_Dry_P Parameter: Age (day) Value: 26
  misc_feature: MA Experiment 20001556 PARAMETER Experiment Name: At_Drought_Soil_Dry_P Parameter: Organism Value: A. thaliana
  misc_feature: MA Experiment 20001556 PARAMETER Experiment Name: At_Drought_Soil_Dry_P Parameter: Plant Line Value: WS
  misc_feature: MA Experiment 20001556 PARAMETER Experiment Name: At_Drought_Soil_Dry_P Parameter: Post Timepoint (hr) Value: None
  misc_feature: MA Experiment 20001556 PARAMETER Experiment Name: At_Drought_Soil_Dry_P Parameter: Post-Treatment Value: None
  misc_feature: MA Experiment 20001556 PARAMETER Experiment Name: At_Drought_Soil_Dry_P Parameter: Timepoint (day) Value: 12
  misc_feature: MA Experiment 20001556 PARAMETER Experiment Name: At_Drought_Soil_Dry_P Parameter: Treatment Value: Drought vs. No Drought
  misc_feature: MA Experiment ID: 20001560 Result: Up-regulated in Transcription
  misc_feature: MA Experiment 20001560 PARAMETER Experiment Name: At_Drought_Soil_Dry_P Parameter: Age (day) Value: 28
  misc_feature: MA Experiment 20001560 PARAMETER Experiment Name: At_Drought_Soil_Dry_P Parameter: Organism Value: A. thaliana
  misc_feature: MA Experiment 20001560 PARAMETER Experiment Name: At_Drought_Soil_Dry_P Parameter: Plant Line Value: WS
  misc_feature: MA Experiment 20001560 PARAMETER Experiment Name: At_Drought_Soil_Dry_P Parameter: Post Timepoint (hr) Value: None
  misc_feature: MA Experiment 20001560 PARAMETER Experiment Name: At_Drought_Soil_Dry_P Parameter: Post-Treatment Value: None
  misc_feature: MA Experiment 20001560 PARAMETER Experiment Name: At_Drought_Soil_Dry_P Parameter: Timepoint (day) Value: 14
  misc_feature: MA Experiment 20001560 PARAMETER Experiment Name: At_Drought_Soil_Dry_P Parameter: Treatment Value: Drought vs. No Drought
  misc_feature: MA Experiment ID: 20001905 Result: Down-regulated in Transcription
  misc_feature: MA Experiment 20001905 PARAMETER Experiment Name: At_Drought_Reproduction_P Parameter: Age (day) Value: 40
  misc_feature: MA Experiment 20001905 PARAMETER Experiment Name: At_Drought_Reproduction_P Parameter: Organism Value: A. thaliana
  misc_feature: MA Experiment 20001905 PARAMETER Experiment Name: At_Drought_Reproduction_P Parameter: Plant Line Value: WS
  misc_feature: MA Experiment 20001905 PARAMETER Experiment Name: At_Drought_Reproduction_P Parameter: Timepoint (day) Value: 10
  misc_feature: MA Experiment 20001905 PARAMETER Experiment Name: At_Drought_Reproduction_P Parameter: Tissue Value: Rosettes
  misc_feature: MA Experiment 20001905 PARAMETER Experiment Name: At_Drought_Reproduction_P Parameter: Treatment Value: Drought vs. No Drought

SEQ ID NO: 31915 - protein, 168 aa, Arabidopsis thaliana; identical to SEQ ID NO: 28325
  peptide (1)..(168): Ceres Seq. ID no. 12393224
  misc_feature (1)..(112): Homolog of NCBI NO: 27688749 NR Description: similar to RIKEN cDNA 1810014L12
  misc_feature (1)..(112): Homolog of NCBI NO: 19526880 NR Description: RIKEN cDNA 1810014L12 [Mus musculus]
  misc_feature (2)..(116): Homolog of NCBI NO: 2135212 NR Description: gene MAC30 protein - human (fragment)
  misc_feature (1)..(167): Homolog of NCBI NO: 28411943 NR Description: OSJNBa0027N13.35 [Oryza sativa (japonica
  misc_feature (1)..(168): Homolog of NCBI NO: 28411944 NR Description: OSJNBa0027N13.37 [Oryza sativa (japonica
  misc_feature (1)..(168): Homolog of NCBI NO: 15220447 NR Description: hypothetical protein; protein id: At1g05220.1
  misc_feature (1)..(168): Homolog of NCBI NO: 18390494 NR Description: expressed protein
  misc_feature (1)..(168): Homolog of NCBI NO: 18402955 NR Description: expressed protein

SEQ ID NO: 31916 - protein, 150 aa, Arabidopsis thaliana; identical to SEQ ID NO: 28326
  peptide (1)..(150): Ceres Seq. ID no. 12393225
  misc_feature (1)..(94): Homolog of NCBI NO: 27688749 NR Description: similar to RIKEN cDNA 1810014L12
  misc_feature (1)..(94): Homolog of NCBI NO: 19526880 NR Description: RIKEN cDNA 1810014L12 [Mus musculus]
  misc_feature (1)..(98): Homolog of NCBI NO: 2135212 NR Description: gene MAC30 protein - human (fragment)
  misc_feature (1)..(149): Homolog of NCBI NO: 28411943 NR Description: OSJNBa0027N13.35 [Oryza sativa (japonica
  misc_feature (1)..(150): Homolog of NCBI NO: 28411944 NR Description: OSJNBa0027N13.37 [Oryza sativa (japonica
  misc_feature (1)..(150): Homolog of NCBI NO: 15220447 NR Description: hypothetical protein; protein id: At1g05220.1
  misc_feature (1)..(150): Homolog of NCBI NO: 18390494 NR Description: expressed protein
  misc_feature (1)..(150): Homolog of NCBI NO: 18402955 NR Description: expressed protein

SEQ ID NO: 31917 - DNA, 1002 bp, Arabidopsis thaliana; identical to SEQ ID NO: 28327
  misc_feature (1)..(1002): Ceres Seq. ID no. 12420559
  misc_feature: MA Experiment ID: 20000180 Result: Up-regulated in Transcription
  misc_feature: MA Experiment 20000180 PARAMETER Experiment Name: At_Germinating_Seeds_P Parameter: Age (hr) Value: 24 vs. 0
  misc_feature: MA Experiment 20000180 PARAMETER Experiment Name: At_Germinating_Seeds_P Parameter: Tissue Value: Germinating Seeds
  misc_feature: MA Experiment ID: 20000182 Result: Down-regulated in Transcription
  misc_feature: MA Experiment 20000182 PARAMETER Experiment Name: At_2mM_SA_P Parameter: Age (day) Value: 14
  misc_feature: MA Experiment 20000182 PARAMETER Experiment Name: At_2mM_SA_P Parameter: Organism Value: A. thaliana
  misc_feature: MA Experiment 20000182 PARAMETER Experiment Name: At_2mM_SA_P Parameter: Plant Line Value: WS
  misc_feature: MA Experiment 20000182 PARAMETER Experiment Name: At_2mM_SA_P Parameter: Timepoint (hr) Value: 6
  misc_feature: MA Experiment 20000182 PARAMETER Experiment Name: At_2mM_SA_P Parameter: Tissue Value: Aerial
  misc_feature: MA Experiment 20000182 PARAMETER Experiment Name: At_2mM_SA_P Parameter: Treatment Value: 2mM SA vs. No Treatment
  misc_feature: MA Experiment ID: 20000184 Result: Up-regulated in Transcription
  misc_feature: MA Experiment 20000184 PARAMETER Experiment Name: At_Shoots__P Parameter: Age (day) Value: 7
  misc_feature: MA Experiment 20000184 PARAMETER Experiment Name: At_Shoots__P Parameter: Tissue Value: Shoots vs. Whole Plant
  misc_feature: MA Experiment ID: 20000185 Result: Up-regulated in Transcription
  misc_feature: MA Experiment 20000185 PARAMETER Experiment Name: At_Roots__P Parameter: Age (day) Value: 7 vs. 21
  misc_feature: MA Experiment 20000185 PARAMETER Experiment Name: At_Roots__P Parameter: Organism Value: A. thaliana
  misc_feature: MA Experiment 20000185 PARAMETER Experiment Name: At_Roots__P Parameter: Tissue Value: Roots vs. Whole Plant
  misc_feature: MA Experiment ID: 20000286 Result: Down-regulated in Transcription
  misc_feature: MA Experiment 20000286 PARAMETER Experiment Name: At_Open_Flower_P Parameter: Age (day) Value: 21
  misc_feature: MA Experiment 20000286 PARAMETER Experiment Name: At_Open_Flower_P Parameter: Plant Line Value: WS
  misc_feature: MA Experiment 20000286 PARAMETER Experiment Name: At_Open_Flower_P Parameter: Tissue Value: Half Open vs. Whole Plant
  misc_feature: MA Experiment ID: 20000439 Result: Up-regulated in Transcription
  misc_feature: MA Experiment 20000439 PARAMETER Experiment Name: At_Roots__P Parameter: Age (day) Value: 14 vs. 21
  misc_feature: MA Experiment 20000439 PARAMETER Experiment Name: At_Roots__P Parameter: Organism Value: A. thaliana
  misc_feature: MA Experiment 20000439 PARAMETER Experiment Name: At_Roots__P Parameter: Tissue Value: Roots vs. Whole Plant
  misc_feature: MA Experiment ID: 20000452 Result: Up-regulated in Transcription
  misc_feature: MA Experiment 20000452 PARAMETER Experiment Name: At_CS6879_Shoots-Roots_P Parameter: Age (day) Value: 14
  misc_feature: MA Experiment 20000452 PARAMETER Experiment Name: At_CS6879_Shoots-Roots_P Parameter: Organism Value: A. thaliana
  misc_feature: MA Experiment 20000452 PARAMETER Experiment Name: At_CS6879_Shoots-Roots_P Parameter: Plant Line Value: CS6879 vs. WS
  misc_feature: MA Experiment 20000452 PARAMETER Experiment Name: At_CS6879_Shoots-Roots_P Parameter: Tissue Value: Shoots
  misc_feature: MA Experiment ID: 20000453 Result: Up-regulated in Transcription
  misc_feature: MA Experiment 20000453 PARAMETER Experiment Name: At_100uM_ABA_P Parameter: Age (day) Value: 15
  misc_feature: MA Experiment 20000453 PARAMETER Experiment Name: At_100uM_ABA_P Parameter: Organism Value: A. thaliana
  misc_feature: MA Experiment 20000453 PARAMETER Experiment Name: At_100uM_ABA_P Parameter: Plant Line Value: WS
  misc_feature: MA Experiment 20000453 PARAMETER Experiment Name: At_100uM_ABA_P Parameter: Timepoint (hr) Value: 24
  misc_feature: MA Experiment 20000453 PARAMETER Experiment Name: At_100uM_ABA_P Parameter: Tissue Value: Aerial
  misc_feature: MA Experiment 20000453 PARAMETER Experiment Name: At_100uM_ABA_P Parameter: Treatment Value: 100uM ABA vs. No Treatment
  misc_feature: MA Experiment ID: 20000456 Result: Up-regulated in Transcription
  misc_feature: MA Experiment 20000456 PARAMETER Experiment Name: At_100uM_BA_P Parameter: Age (day) Value: 14
  misc_feature: MA Experiment 20000456 PARAMETER Experiment Name: At_100uM_BA_P Parameter: Organism Value: A. thaliana
  misc_feature: MA Experiment 20000456 PARAMETER Experiment Name: At_100uM_BA_P Parameter: Plant Line Value: WS
  misc_feature: MA Experiment 20000456 PARAMETER Experiment Name: At_100uM_BA_P Parameter: Timepoint (hr) Value: 6
  misc_feature: MA Experiment 20000456 PARAMETER Experiment Name: At_100uM_BA_P Parameter: Tissue Value: Aerial
  misc_feature: MA Experiment 20000456 PARAMETER Experiment Name: At_100uM_BA_P Parameter: Treatment Value: 100uM BA vs. No Treatment
  misc_feature: MA Experiment ID: 20000460 Result: Down-regulated in Transcription
  misc_feature: MA Experiment 20000460 PARAMETER Experiment Name: At_10percent_PEG_P Parameter: Age (day) Value: 12
  misc_feature: MA Experiment 20000460 PARAMETER Experiment Name: At_10percent_PEG_P Parameter: Organism Value: A. thaliana
  misc_feature: MA Experiment 20000460 PARAMETER Experiment Name: At_10percent_PEG_P Parameter: Plant Line Value: WS
  misc_feature: MA Experiment 20000460 PARAMETER Experiment Name: At_10percent_PEG_P Parameter: Timepoint (day) Value: 12
  misc_feature: MA Experiment 20000460 PARAMETER Experiment Name: At_10percent_PEG_P Parameter: Tissue Value: Whole Plant
  misc_feature: MA Experiment 20000460 PARAMETER Experiment Name: At_10percent_PEG_P Parameter: Treatment Value: 10percent PEG vs. No Treatment
  misc_feature: MA Experiment ID: 20000527 Result: Down-regulated in Transcription
  misc_feature: MA Experiment 20000527 PARAMETER Experiment Name: At_10percent_PEG_P Parameter: Age (day) Value: 20
  misc_feature: MA Experiment 20000527 PARAMETER Experiment Name: At_10percent_PEG_P Parameter: Organism Value: A. thaliana
  misc_feature: MA Experiment 20000527 PARAMETER Experiment Name: At_10percent_PEG_P Parameter: Plant Line Value: WS
  misc_feature: MA Experiment 20000527 PARAMETER Experiment Name: At_10percent_PEG_P Parameter: Timepoint (day) Value: 20
  misc_feature: MA Experiment 20000527 PARAMETER Experiment Name: At_10percent_PEG_P Parameter: Tissue Value: Whole Plant
  misc_feature: MA Experiment 20000527 PARAMETER Experiment Name: At_10percent_PEG_P Parameter: Treatment Value: 10percent PEG vs. No Treatment
  misc_feature: MA Experiment ID: 20000576 Result: Down-regulated in Transcription
  misc_feature: MA Experiment 20000576 PARAMETER Experiment Name: At_100uM_ABA_Mutants__P Parameter: Organism Value: A. thaliana
  misc_feature: MA Experiment 20000576 PARAMETER Experiment Name: At_100uM_ABA_Mutants__P Parameter: Plant Line Value: CS23
  misc_feature: MA Experiment 20000576 PARAMETER Experiment Name: At_100uM_ABA_Mutants__P Parameter: Timepoint (hr) Value: 6
  misc_feature: MA Experiment 20000576 PARAMETER Experiment Name: At_100uM_ABA_Mutants__P Parameter: Tissue Value: Whole Plant
  misc_feature: MA Experiment 20000576 PARAMETER Experiment Name: At_100uM_ABA_Mutants__P Parameter: Treatment Value: 1uM ABA vs. No Treatment
  misc_feature: MA Experiment ID: 20001905 Result: Up-regulated in Transcription
  misc_feature: MA Experiment 20001905 PARAMETER Experiment Name: At_Drought_Reproduction_P Parameter: Age (day) Value: 40
  misc_feature: MA Experiment 20001905 PARAMETER Experiment Name: At_Drought_Reproduction_P Parameter: Organism Value: A. thaliana
  misc_feature: MA Experiment 20001905 PARAMETER Experiment Name: At_Drought_Reproduction_P Parameter: Plant Line Value: WS
  misc_feature: MA Experiment 20001905 PARAMETER Experiment Name: At_Drought_Reproduction_P Parameter: Timepoint (day) Value: 10
  misc_feature: MA Experiment 20001905 PARAMETER Experiment Name: At_Drought_Reproduction_P Parameter: Tissue Value: Rosettes
  misc_feature: MA Experiment 20001905 PARAMETER Experiment Name: At_Drought_Reproduction_P Parameter: Treatment Value: Drought vs. No Drought
  misc_feature: Phenotype: ROSETTE LEAVES Shape-Trident
  misc_feature: Phenotype: WHOLE PLANT Dwarf-Misc. Dwarf
  misc_feature: Phenotype: WHOLE PLANT Size-Small
  misc_feature: Phenotype: FERTILITY Fertility-Sterile
  misc_feature: Phenotype: WHOLE PLANT Size-Small
  misc_feature: Phenotype: ROSETTE LEAVES Shape-Serrate
  misc_feature: Phenotype: WHOLE PLANT Size-Small
  misc_feature: Phenotype: FERTILITY Fertility-Sterile
  misc_feature: Phenotype: WHOLE PLANT Color-Dark Green
  misc_feature: Phenotype: WHOLE PLANT Size-Large
  misc_feature: Phenotype: INFLORESCENCE Flowering Time-Late Flowering
  misc_feature: Phenotype: DIED PREMATURELY but unlikely to be related to gene
  misc_feature: Phenotype: ROSETTE LEAVES Shape-Oval
  misc_feature: Phenotype: WHOLE PLANT Color-Dark Green
  misc_feature: Phenotype: WHOLE PLANT Size-Small

SEQ ID NO: 31918 - protein, 276 aa, Arabidopsis thaliana; identical to SEQ ID NO: 28328
  peptide (1)..(276): Ceres Seq. ID no. 12420560
  misc_feature (110)..(275): Homolog of NCBI NO: 9293921 NR Description: contains similarity to alcohol
  misc_feature (128)..(276): Homolog of NCBI NO: 28416591 NR Description: At3g29250 [Arabidopsis thaliana]
  misc_feature (16)..(272): Homolog of NCBI NO: 15983819 NR Description: 3-beta-hydroxysteroiddehydrogenase [Digitalis
  misc_feature (21)..(272): Homolog of NCBI NO: 7431087 NR Description: probable alcohol dehydrogenase [imported] -
  misc_feature (16)..(272): Homolog of NCBI NO: 18407273 NR Description: putative alcohol dehydrogenase
  misc_feature (16)..(272): Homolog of NCBI NO: 15226500 NR Description: (NM_130280) putative alcohol dehydrogenase
  misc_feature (16)..(272): Homolog of NCBI NO: 15226503 NR Description: (NM_130281) putative alcohol dehydrogenase
  misc_feature (16)..(275): Homolog of NCBI NO: 15228656 NR Description: short-chain alcohol dehydrogenase, putative
  misc_feature (29)..(276): Homolog of NCBI NO: 22331405 NR Description: short-chain alcohol dehydrogenase, putative
  misc_feature (1)..(276): Homolog of NCBI NO: 9293918 NR Description: alcohol dehydrogenase-like protein [Arabidopsis

SEQ ID NO: 31919 - protein, 261 aa, Arabidopsis thaliana; identical to SEQ ID NO: 28329
  peptide (1)..(261): Ceres Seq. ID no. 12420561
  misc_feature (95)..(260): Homolog of NCBI NO: 9293921 NR Description: contains similarity to alcohol
  misc_feature (113)..(261): Homolog of NCBI NO: 28416591 NR Description: At3g29250 [Arabidopsis thaliana]
  misc_feature (1)..(257): Homolog of NCBI NO: 15983819 NR Description: 3-beta-hydroxysteroiddehydrogenase [Digitalis
  misc_feature (6)..(257): Homolog of NCBI NO: 7431087 NR Description: probable alcohol dehydrogenase [imported] -
  misc_feature (1)..(257): Homolog of NCBI NO: 18407273 NR Description: putative alcohol dehydrogenase
  misc_feature (1)..(257): Homolog of NCBI NO: 15226500 NR Description: (NM_130280) putative alcohol dehydrogenase
  misc_feature (1)..(257): Homolog of NCBI NO: 15226503 NR Description: (NM_130281) putative alcohol dehydrogenase
  misc_feature (1)..(260): Homolog of NCBI NO: 15228656 NR Description: short-chain alcohol dehydrogenase, putative
  misc_feature (14)..(261): Homolog of NCBI NO: 22331405 NR Description: short-chain alcohol dehydrogenase, putative
  misc_feature (1)..(261): Homolog of NCBI NO: 9293918 NR Description: alcohol dehydrogenase-like protein [Arabidopsis

SEQ ID NO: 31920 - protein, 149 aa, Arabidopsis thaliana; identical to SEQ ID NO: 28330
  peptide (1)..(149): Ceres Seq. ID no. 12420562
  misc_feature (1)..(148): Homolog of NCBI NO: 9293921 NR Description: contains similarity to alcohol
  misc_feature (1)..(149): Homolog of NCBI NO: 28416591 NR Description: At3g29250 [Arabidopsis thaliana]
  misc_feature (1)..(145): Homolog of NCBI NO: 15983819 NR Description: 3-beta-hydroxysteroiddehydrogenase [Digitalis
  misc_feature (1)..(145): Homolog of NCBI NO: 7431087 NR Description: probable alcohol dehydrogenase [imported] -
  misc_feature (1)..(145): Homolog of NCBI NO: 18407273 NR Description: putative alcohol dehydrogenase
  misc_feature (1)..(145): Homolog of NCBI NO: 15226500 NR Description: (NM_130280) putative alcohol dehydrogenase
  misc_feature (1)..(145): Homolog of NCBI NO: 15226503 NR Description: (NM_130281) putative alcohol dehydrogenase
  misc_feature (1)..(148): Homolog of NCBI NO: 15228656 NR Description: short-chain alcohol dehydrogenase, putative
  misc_feature (1)..(149): Homolog of NCBI NO: 22331405 NR Description: short-chain alcohol dehydrogenase, putative
  misc_feature (1)..(149): Homolog of NCBI NO: 9293918 NR Description: alcohol dehydrogenase-like protein [Arabidopsis

SEQ ID NO: 31921 - DNA, 689 bp, Arabidopsis thaliana; identical to SEQ ID NO: 28331
  misc_feature (1)..(689): Ceres Seq. ID no. 13494629
  misc_feature: MA Experiment ID: 108434 Result: Down-regulated in Transcription
  misc_feature: MA Experiment 108434 PARAMETER Experiment Name: At_Root_Tips_cDNA_P Parameter: Tissue Value: Root Tips
  misc_feature: MA Experiment ID: 20000185 Result: Up-regulated in Transcription
  misc_feature: MA Experiment 20000185 PARAMETER Experiment Name: At_Roots__P Parameter: Age (day) Value: 7 vs. 21
  misc_feature: MA Experiment 20000185 PARAMETER Experiment Name: At_Roots__P Parameter: Organism Value: A. thaliana
  misc_feature: MA Experiment 20000185 PARAMETER Experiment Name: At_Roots__P Parameter: Tissue Value: Roots vs. Whole Plant
  misc_feature: MA Experiment ID: 20000227 Result: Up-regulated in Transcription
  misc_feature: MA Experiment 20000227 PARAMETER Experiment Name: At_Root-Tips-vs-Tops_P Parameter: Tissue Value: Root Tips vs. Root Tops
  misc_feature: MA Experiment ID: 20000234 Result: Up-regulated in Transcription
  misc_feature: MA Experiment 20000234 PARAMETER Experiment Name: At_Siliques_P Parameter: Age (day) Value: 21
  misc_feature: MA Experiment 20000234 PARAMETER Experiment Name: At_Siliques_P Parameter: Organism Value: A. thaliana
  misc_feature: MA Experiment 20000234 PARAMETER Experiment Name: At_Siliques_P Parameter: Plant Line Value: WS
  misc_feature: MA Experiment 20000234 PARAMETER Experiment Name: At_Siliques_P Parameter: Tissue Value: Less Than 5mm Siliques vs. Whole Plant
  misc_feature: MA Experiment ID: 20000235 Result: Up-regulated in Transcription
  misc_feature: MA Experiment 20000235 PARAMETER Experiment Name: At_Siliques_P Parameter: Age (day) Value: 21
  misc_feature: MA Experiment 20000235 PARAMETER Experiment Name: At_Siliques_P Parameter: Organism Value: A. thaliana
  misc_feature: MA Experiment 20000235 PARAMETER Experiment Name: At_Siliques_P Parameter: Plant Line Value: WS
  misc_feature: MA Experiment 20000235 PARAMETER Experiment Name: At_Siliques_P Parameter: Tissue Value: 5-10mm Siliques vs. Whole Plant
  misc_feature: MA Experiment ID: 20000264 Result: Up-regulated in Transcription
  misc_feature: MA Experiment 20000264 PARAMETER Experiment Name: At_Open_Flower_P Parameter: Age (day) Value: 21
  misc_feature: MA Experiment 20000264 PARAMETER Experiment Name: At_Open_Flower_P Parameter: Plant Line Value: WS
  misc_feature: MA Experiment 20000264 PARAMETER Experiment Name: At_Open_Flower_P Parameter: Tissue Value: Open Flower vs. Whole Plant
  misc_feature: MA Experiment ID: 20000265 Result: Up-regulated in Transcription
  misc_feature: MA Experiment 20000265 PARAMETER Experiment Name: At_Open_Flower_P Parameter: Age (day) Value: 21
  misc_feature: MA Experiment 20000265 PARAMETER Experiment Name: At_Open_Flower_P Parameter: Plant Line Value: WS
  misc_feature: MA Experiment 20000265 PARAMETER Experiment Name: At_Open_Flower_P Parameter: Tissue Value: Closed Flower vs. Whole Plant
  misc_feature: MA Experiment ID: 20000286 Result: Up-regulated in Transcription
  misc_feature: MA Experiment 20000286 PARAMETER Experiment Name: At_Open_Flower_P Parameter: Age (day) Value: 21
  misc_feature: MA Experiment 20000286 PARAMETER Experiment Name: At_Open_Flower_P Parameter: Plant Line Value: WS
  misc_feature: MA Experiment 20000286 PARAMETER Experiment Name: At_Open_Flower_P Parameter: Tissue Value: Half Open vs. Whole Plant
  misc_feature: MA Experiment ID: 20000439 Result: Up-regulated in Transcription
  misc_feature: MA Experiment 20000439 PARAMETER Experiment Name: At_Roots__P Parameter: Age (day) Value: 14 vs. 21
  misc_feature: MA Experiment 20000439 PARAMETER Experiment Name: At_Roots__P Parameter: Organism Value: A. thaliana
  misc_feature: MA Experiment 20000439 PARAMETER Experiment Name: At_Roots__P Parameter: Tissue Value: Roots vs. Whole Plant
  misc_feature: MA Experiment ID: 20000496 Result: Down-regulated in Transcription
  misc_feature: MA Experiment 20000496 PARAMETER Experiment Name: At_Guard_Cells_P Parameter: Harvest Date Value: 7/19/2002
  misc_feature: MA Experiment 20000496 PARAMETER Experiment Name: At_Guard_Cells_P Parameter: Organism Value: Canola
  misc_feature: MA Experiment 20000496 PARAMETER Experiment Name: At_Guard_Cells_P Parameter: Tissue Value: Guard Cells vs. Leaves
  misc_feature: MA Experiment ID: 20000527 Result: Down-regulated in Transcription
  misc_feature: MA Experiment 20000527 PARAMETER Experiment Name: At_10percent_PEG_P Parameter: Age (day) Value: 20
  misc_feature: MA Experiment 20000527 PARAMETER Experiment Name: At_10percent_PEG_P Parameter: Organism Value: A. thaliana
  misc_feature: MA Experiment 20000527 PARAMETER Experiment Name: At_10percent_PEG_P Parameter: Plant Line Value: WS
  misc_feature: MA Experiment 20000527 PARAMETER Experiment Name: At_10percent_PEG_P Parameter: Timepoint (day) Value: 20
  misc_feature: MA Experiment 20000527 PARAMETER Experiment Name: At_10percent_PEG_P Parameter: Tissue Value: Whole Plant
  misc_feature: MA Experiment 20000527 PARAMETER Experiment Name: At_10percent_PEG_P Parameter: Treatment Value: 10percent PEG vs. No Treatment
  misc_feature: MA Experiment ID: 20001450 Result: Down-regulated in Transcription
  misc_feature: MA Experiment 20001450 PARAMETER Experiment Name: At_Far-red-induction_P Parameter: Age (day) Value: 7
  misc_feature: MA Experiment 20001450 PARAMETER Experiment Name: At_Far-red-induction_P Parameter: Light Value: Far-red vs. White
  misc_feature: MA Experiment 20001450 PARAMETER Experiment Name: At_Far-red-induction_P Parameter: Organism Value: A. thaliana
  misc_feature: MA Experiment 20001450 PARAMETER Experiment Name: At_Far-red-induction_P Parameter: Plant Line Value: Columbia
  misc_feature: MA Experiment 20001450 PARAMETER Experiment Name: At_Far-red-induction_P Parameter: Timepoint (hr) Value: 8
  misc_feature: MA Experiment 20001450 PARAMETER Experiment Name: At_Far-red-induction_P Parameter: Tissue Value: Whole Plant

SEQ ID NO: 31922 - protein, 166 aa, Arabidopsis thaliana; identical to SEQ ID NO: 26434
  peptide (1)..(166): Ceres Seq. ID no. 13494630
  misc_feature (17)..(166): Pfam Name: Late embryogenesis abundant protein Pfam Description: Late embryogenesis abundant protein
  misc_feature (16)..(166): Homolog of NCBI NO: 1170745 NR Description: Late embryogenesis abundant protein Lea14-A
  misc_feature (16)..(166): Homolog of NCBI NO: 1170746 NR Description: Desiccation protectant protein Lea14 homolog
  misc_feature (1)..(166): Homolog of NCBI NO: 3789986 NR Description: desiccation protein [Brassica napus]
  misc_feature (1)..(166): Homolog of NCBI NO: 21555248 NR Description: putative desiccation related protein [Arabidopsis
  misc_feature (1)..(166): Homolog of NCBI NO: 15225930 NR Description: desiccation related protein -related [Arabidopsis

SEQ ID NO: 31923 - DNA, 678 bp, Arabidopsis thaliana; identical to SEQ ID NO: 28333
  misc_feature (1)..(678): Ceres Seq. ID no. 12330045
  misc_feature: MA Experiment ID: 108461 Result: Up-regulated in Transcription
  misc_feature: MA Experiment 108461 PARAMETER Experiment Name: At_Germinating_Seeds_cDNA_P Parameter: Age (day) Value: 1 vs. 0
  misc_feature: MA Experiment 108461 PARAMETER Experiment Name: At_Germinating_Seeds_cDNA_P Parameter: Tissue Value: Germinating Seeds
  misc_feature: MA Experiment ID: 108462 Result: Up-regulated in Transcription
  misc_feature: MA Experiment 108462 PARAMETER Experiment Name: At_Germinating_Seeds_cDNA_P Parameter: Age (day) Value: 2 vs. 0
  misc_feature: MA Experiment 108462 PARAMETER Experiment Name: At_Germinating_Seeds_cDNA_P Parameter: Tissue Value: Germinating Seeds
  misc_feature: MA Experiment ID: 108464 Result: Up-regulated in Transcription
  misc_feature: MA Experiment 108464 PARAMETER Experiment Name: At_Germinating_Seeds_cDNA_P Parameter: Age (day) Value: 4 vs. 0
  misc_feature: MA Experiment 108464 PARAMETER Experiment Name: At_Germinating_Seeds_cDNA_P Parameter: Tissue Value: Germinating Seeds
  misc_feature: MA Experiment ID: 108561 Result: Down-regulated in Transcription
  misc_feature: MA Experiment 108561 PARAMETER Experiment Name: At_100uM_ABA_cDNA_P Parameter: Timepoint (hr) Value: 6
  misc_feature: MA Experiment 108561 PARAMETER Experiment Name: At_100uM_ABA_cDNA_P Parameter: Tissue Value: Aerial
  misc_feature: MA Experiment 108561 PARAMETER Experiment Name: At_100uM_ABA_cDNA_P Parameter: Treatment Value: 100uM ABA vs. No Treatment
  misc_feature: MA Experiment ID: 20000179 Result: Up-regulated in Transcription
  misc_feature: MA Experiment 20000179 PARAMETER Experiment Name: At_Germinating_Seeds_P Parameter: Age (hr) Value: 6 vs. 0
  misc_feature: MA Experiment 20000179 PARAMETER Experiment Name: At_Germinating_Seeds_P Parameter: Tissue Value: Germinating Seeds
  misc_feature: MA Experiment ID: 20000180 Result: Up-regulated in Transcription
  misc_feature: MA Experiment 20000180 PARAMETER Experiment Name: At_Germinating_Seeds_P Parameter: Age (hr) Value: 24 vs. 0
  misc_feature: MA Experiment 20000180 PARAMETER Experiment Name: At_Germinating_Seeds_P Parameter: Tissue Value: Germinating Seeds
  misc_feature: MA Experiment ID: 20001248 Result: Down-regulated in Transcription
  misc_feature: MA Experiment 20001248 PARAMETER Experiment Name: At_Far-red-induction_P Parameter: Age (day) Value: 7
  misc_feature: MA Experiment 20001248 PARAMETER Experiment Name: At_Far-red-induction_P Parameter: Light Value: Far-red vs. White
  misc_feature: MA Experiment 20001248 PARAMETER Experiment Name: At_Far-red-induction_P Parameter: Organism Value: A. thaliana
  misc_feature: MA Experiment 20001248 PARAMETER Experiment Name: At_Far-red-induction_P Parameter: Plant Line Value: Columbia
  misc_feature: MA Experiment 20001248 PARAMETER Experiment Name: At_Far-red-induction_P Parameter: Timepoint (hr) Value: 4
  misc_feature: MA Experiment 20001248 PARAMETER Experiment Name: At_Far-red-induction_P Parameter: Tissue Value: Whole Plant

SEQ ID NO: 31924 - protein, 155 aa, Arabidopsis thaliana; identical to SEQ ID NO: 28334
  peptide (1)..(155): Ceres Seq. ID no. 12330046
  misc_feature (17)..(153): Homolog of NCBI NO: 7546725 NR Description: MFP1 attachment factor 1 [Lycopersicon esculentum]
  misc_feature (1)..(154): Homolog of NCBI NO: 21553809 NR Description: unknown [Arabidopsis thaliana]
  misc_feature (1)..(154): Homolog of NCBI NO: 18401618 NR Description: expressed protein
  misc_feature (1)..(155): Homolog of NCBI NO: 15239170 NR Description: putative protein
  misc_feature (1)..(155): Homolog of NCBI NO: 21618109 NR Description: MFP1 attachment factor 1 [Arabidopsis thaliana]

SEQ ID NO: 31925 - DNA, 1463 bp, Arabidopsis thaliana; identical to SEQ ID NO: 28335
  misc_feature (1)..(1463): Ceres Seq. ID no. 13487748
  misc_feature: MA Experiment ID: 108464 Result: Up-regulated in Transcription
  misc_feature: MA Experiment 108464 PARAMETER Experiment Name: At_Germinating_Seeds_cDNA_P Parameter: Age (day) Value: 4 vs. 0
  misc_feature: MA Experiment 108464 PARAMETER Experiment Name: At_Germinating_Seeds_cDNA_P Parameter: Tissue Value: Germinating Seeds
  misc_feature: MA Experiment ID: 20000111 Result: Down-regulated in Transcription
  misc_feature: MA Experiment 20000111 PARAMETER Experiment Name: At_42deg_Heat_cDNA_P Parameter: Temperature (deg C) Value: 42 vs. 22
  misc_feature: MA Experiment 20000111 PARAMETER Experiment Name: At_42deg_Heat_cDNA_P Parameter: Timepoint (hr) Value: 6
  misc_feature: MA Experiment 20000111 PARAMETER Experiment Name: At_42deg_Heat_cDNA_P Parameter: Tissue Value: Aerial
  misc_feature: MA Experiment ID: 20000113 Result: Down-regulated in Transcription
  misc_feature: MA Experiment 20000113 PARAMETER Experiment Name: At_42deg_Heat_cDNA_P Parameter: Temperature (deg C) Value: 42 vs. 22
  misc_feature: MA Experiment 20000113 PARAMETER Experiment Name: At_42deg_Heat_cDNA_P Parameter: Timepoint (hr) Value: 8
  misc_feature: MA Experiment 20000113 PARAMETER Experiment Name: At_42deg_Heat_cDNA_P Parameter: Tissue Value: Aerial
  misc_feature: MA Experiment ID: 20001557 Result: Down-regulated in Transcription
  misc_feature: MA Experiment 20001557 PARAMETER Experiment Name: At_Drought_Soil_Dry_P Parameter: Age (day) Value: 27
  misc_feature: MA Experiment 20001557 PARAMETER Experiment Name: At_Drought_Soil_Dry_P Parameter: Organism Value: A. thaliana
  misc_feature: MA Experiment 20001557 PARAMETER Experiment Name: At_Drought_Soil_Dry_P Parameter: Plant Line Value: WS
  misc_feature: MA Experiment 20001557 PARAMETER Experiment Name: At_Drought_Soil_Dry_P Parameter: Post Timepoint (hr) Value: 3
  misc_feature: MA Experiment 20001557 PARAMETER Experiment Name: At_Drought_Soil_Dry_P Parameter: Post-Treatment Value: Re-Water vs. No Drought
  misc_feature: MA Experiment 20001557 PARAMETER Experiment Name: At_Drought_Soil_Dry_P Parameter: Timepoint (day) Value: 13
  misc_feature: MA Experiment 20001557 PARAMETER Experiment Name: At_Drought_Soil_Dry_P Parameter: Treatment Value: Drought vs. No Drought
  misc_feature: MA Experiment ID: 20001558 Result: Down-regulated in Transcription
  misc_feature: MA Experiment 20001558 PARAMETER Experiment Name: At_Drought_Soil_Dry_P Parameter: Age (day) Value: 27
  misc_feature: MA Experiment 20001558 PARAMETER Experiment Name: At_Drought_Soil_Dry_P Parameter: Organism Value: A. thaliana
  misc_feature: MA Experiment 20001558 PARAMETER Experiment Name: At_Drought_Soil_Dry_P Parameter: Plant Line Value: WS
  misc_feature: MA Experiment 20001558 PARAMETER Experiment Name: At_Drought_Soil_Dry_P Parameter: Post Timepoint (hr) Value: 6
  misc_feature: MA Experiment 20001558 PARAMETER Experiment Name: At_Drought_Soil_Dry_P Parameter: Post-Treatment Value: Re-Water vs. No Drought
  misc_feature: MA Experiment 20001558 PARAMETER Experiment Name: At_Drought_Soil_Dry_P Parameter: Timepoint (day) Value: 13
  misc_feature: MA Experiment 20001558 PARAMETER Experiment Name: At_Drought_Soil_Dry_P Parameter: Treatment Value: Drought vs. No Drought
  misc_feature: MA Experiment ID: 20001560 Result: Down-regulated in Transcription
  misc_feature: MA Experiment 20001560 PARAMETER Experiment Name: At_Drought_Soil_Dry_P Parameter: Age (day) Value: 28
  misc_feature: MA Experiment 20001560 PARAMETER Experiment Name: At_Drought_Soil_Dry_P Parameter: Organism Value: A. thaliana
  misc_feature: MA Experiment 20001560 PARAMETER Experiment Name: At_Drought_Soil_Dry_P Parameter: Plant Line Value: WS
  misc_feature: MA Experiment 20001560 PARAMETER Experiment Name: At_Drought_Soil_Dry_P Parameter: Post Timepoint (hr) Value: None
  misc_feature: MA Experiment 20001560 PARAMETER Experiment Name: At_Drought_Soil_Dry_P Parameter: Post-Treatment Value: None
  misc_feature: MA Experiment 20001560 PARAMETER Experiment Name: At_Drought_Soil_Dry_P Parameter: Timepoint (day) Value: 14
  misc_feature: MA Experiment 20001560 PARAMETER Experiment Name: At_Drought_Soil_Dry_P Parameter: Treatment Value: Drought vs. No Drought

SEQ ID NO: 31926 - protein, 440 aa, Arabidopsis thaliana; identical to SEQ ID NO: 28336
  peptide (1)..(440): Ceres Seq. ID no. 13487749
  misc_feature (159)..(344): Pfam Name: Sodium Bile acid symporter family Pfam Description: Sodium Bile acid symporter family
  misc_feature (57)..(432): Homolog of NCBI NO: 20269901 NR Description: putative sodium-dependent bile acid symporter
  misc_feature (57)..(432): Homolog of NCBI NO: 30683305 NR Description: bile acid:sodium symporter family [Arabidopsis
  misc_feature (93)..(420): Homolog of NCBI NO: 9279722 NR Description: contains similarity to transporter
  misc_feature (93)..(432): Homolog of NCBI NO: 21554890 NR Description: unknown [Arabidopsis thaliana]
  misc_feature (93)..(432): Homolog of NCBI NO: 18404505 NR Description: bile acid:sodium symporter family [Arabidopsis
  misc_feature (120)..(417): Homolog of NCBI NO: 7485566 NR Description: hypothetical protein F16J13.100 - Arabidopsis
  misc_feature (165)..(436): Homolog of NCBI NO: 18413732 NR Description: bile acid:sodium symporter family [Arabidopsis
  misc_feature (32)..(85): Homolog of NCBI NO: 7486890 NR Description: hypothetical protein T12H17.230 - Arabidopsis
  misc_feature (83)..(440): Homolog of NCBI NO: 7486890 NR Description: hypothetical protein T12H17.230 - Arabidopsis
  misc_feature (32)..(440): Homolog of NCBI NO: 18416020 NR Description: bile acid:sodium symporter family [Arabidopsis

SEQ ID NO: 31927 - protein, 409 aa, Arabidopsis thaliana; identical to SEQ ID NO: 28337
  peptide (1)..(409): Ceres Seq. ID no. 13487750
  misc_feature (128)..(313): Pfam Name: Sodium Bile acid symporter family Pfam Description: Sodium Bile acid symporter family
  misc_feature (26)..(401): Homolog of NCBI NO: 20269901 NR Description: putative sodium-dependent bile acid symporter
  misc_feature (26)..(401): Homolog of NCBI NO: 30683305 NR Description: bile acid:sodium symporter family [Arabidopsis
  misc_feature (62)..(389): Homolog of NCBI NO: 9279722 NR Description: contains similarity to transporter
  misc_feature (62)..(401): Homolog of NCBI NO: 21554890 NR Description: unknown [Arabidopsis thaliana]
  misc_feature (62)..(401): Homolog of NCBI NO: 18404505 NR Description: bile acid:sodium symporter family [Arabidopsis
  misc_feature (89)..(386): Homolog of NCBI NO: 7485566 NR Description: hypothetical protein F16J13.100 - Arabidopsis
  misc_feature (134)..(405): Homolog of NCBI NO: 18413732 NR Description: bile acid:sodium symporter family [Arabidopsis
  misc_feature (1)..(54): Homolog of NCBI NO: 7486890 NR Description: hypothetical protein T12H17.230 - Arabidopsis
  misc_feature (52)..(409): Homolog of NCBI NO: 7486890 NR Description: hypothetical protein T12H17.230 - Arabidopsis
  misc_feature (1)..(409): Homolog of NCBI NO: 18416020 NR Description: bile acid:sodium symporter family [Arabidopsis

SEQ ID NO: 31928 - protein, 337 aa, Arabidopsis thaliana; identical to SEQ ID NO: 28338
  peptide (1)..(337): Ceres Seq. ID no. 13487751
  misc_feature (56)..(241): Pfam Name: Sodium Bile acid symporter family Pfam Description: Sodium Bile acid symporter family
  misc_feature (5)..(329): Homolog of NCBI NO: 34911708 NR Description: P0707D10.18 [Oryza sativa (japonica
  misc_feature (1)..(329): Homolog of NCBI NO: 20269901 NR Description: putative sodium-dependent bile acid symporter
  misc_feature (1)..(329): Homolog of NCBI NO: 30683305 NR Description: bile acid:sodium symporter family [Arabidopsis
  misc_feature (1)..(317): Homolog of NCBI NO: 9279722 NR Description: contains similarity to transporter
  misc_feature (1)..(329): Homolog of NCBI NO: 21554890 NR Description: unknown [Arabidopsis thaliana]
  misc_feature (1)..(329): Homolog of NCBI NO: 18404505 NR Description: bile acid:sodium symporter family [Arabidopsis
  misc_feature (17)..(314): Homolog of NCBI NO: 7485566 NR Description: hypothetical protein F16J13.100 - Arabidopsis
  misc_feature (62)..(333): Homolog of NCBI NO: 18413732 NR Description: bile acid:sodium symporter family [Arabidopsis
  misc_feature (1)..(337): Homolog of NCBI NO: 7486890 NR Description: hypothetical protein T12H17.230 - Arabidopsis
  misc_feature (1)..(337): Homolog of NCBI NO: 18416020 NR Description: bile acid:sodium symporter family [Arabidopsis

SEQ ID NO: 31929 - DNA, 791 bp, Arabidopsis thaliana; identical to SEQ ID NO: 28339
  misc_feature (1)..(791): Ceres Seq. ID no. 13500319
  misc_feature: MA Experiment ID: 108572 Result: Up-regulated in Transcription
  misc_feature: MA Experiment 108572 PARAMETER Experiment Name: At_Drought_cDNA_P Parameter: Timepoint (hr) Value: 1
  misc_feature: MA Experiment 108572 PARAMETER Experiment Name: At_Drought_cDNA_P Parameter: Tissue Value: Aerial
  misc_feature: MA Experiment 108572 PARAMETER Experiment Name: At_Drought_cDNA_P Parameter: Treatment Value: Drought vs. No Drought
  misc_feature: MA Experiment ID: 108574 Result: Down-regulated in Transcription
  misc_feature: MA Experiment 108574 PARAMETER Experiment Name: At_Wounding__cDNA_P Parameter: Timepoint (hr) Value: 1
  misc_feature: MA Experiment 108574 PARAMETER Experiment Name: At_Wounding__cDNA_P Parameter: Tissue Value: Aerial
  misc_feature: MA Experiment 108574 PARAMETER Experiment Name: At_Wounding__cDNA_P Parameter: Treatment Value: Wounding vs. No Wounding
  misc_feature: MA Experiment ID: 108576 Result: Down-regulated in Transcription
  misc_feature: MA Experiment 108576 PARAMETER Experiment Name: At_42deg_Heat_cDNA_P Parameter: Temperature (deg C) Value: 42 vs. 22
  misc_feature: MA Experiment 108576 PARAMETER Experiment Name: At_42deg_Heat_cDNA_P Parameter: Timepoint (hr) Value: 1
  misc_feature: MA Experiment 108576 PARAMETER Experiment Name: At_42deg_Heat_cDNA_P Parameter: Tissue Value: Aerial
  misc_feature: MA Experiment ID: 108585 Result: Down-regulated in Transcription
  misc_feature: MA Experiment 108585 PARAMETER Experiment Name: At_5mM_NaNP_cDNA_P Parameter: Timepoint (hr) Value: 6
  misc_feature: MA Experiment 108585 PARAMETER Experiment Name: At_5mM_NaNP_cDNA_P Parameter: Tissue Value: Aerial
  misc_feature: MA Experiment 108585 PARAMETER Experiment Name: At_5mM_NaNP_cDNA_P Parameter: Treatment Value: null
  misc_feature: MA Experiment ID: 108595 Result: Down-regulated in Transcription
  misc_feature: MA Experiment 108595 PARAMETER Experiment Name: At_Ler-pi_Ovule_cDNA_P Parameter: Plant Line Value: null
  misc_feature: MA Experiment ID: 108667 Result: Down-regulated in Transcription
  misc_feature: MA Experiment 108667 PARAMETER Experiment Name: At_2mM_SA_cDNA_P Parameter: Plant Line Value: WS
  misc_feature: MA Experiment 108667 PARAMETER Experiment Name: At_2mM_SA_cDNA_P Parameter: Timepoint (hr) Value: 1
  misc_feature: MA Experiment 108667 PARAMETER Experiment Name: At_2mM_SA_cDNA_P Parameter: Treatment Value: 2mM SA vs. No Treatment
  misc_feature: MA Experiment ID: 108668 Result: Down-regulated in Transcription
  misc_feature: MA Experiment 108668 PARAMETER Experiment Name: At_2mM_SA_cDNA_P Parameter: Plant Line Value: WS
  misc_feature: MA Experiment 108668 PARAMETER Experiment Name: At_2mM_SA_cDNA_P Parameter: Timepoint (hr) Value: 6
  misc_feature: MA Experiment 108668 PARAMETER Experiment Name: At_2mM_SA_cDNA_P Parameter: Treatment Value: 2mM SA vs. No Treatment
  misc_feature: MA Experiment ID: 20000070 Result: Up-regulated in Transcription
  misc_feature: MA Experiment 20000070 PARAMETER Experiment Name: At_100uM_ABA_Mutants_cDNA_P Parameter: Plant Line Value: CS24
  misc_feature: MA Experiment 20000070 PARAMETER Experiment Name: At_100uM_ABA_Mutants_cDNA_P Parameter: Timepoint (hr) Value: 6
  misc_feature: MA Experiment 20000070 PARAMETER Experiment Name: At_100uM_ABA_Mutants_cDNA_P Parameter: Tissue Value: Aerial
  misc_feature: MA Experiment 20000070 PARAMETER Experiment Name: At_100uM_ABA_Mutants_cDNA_P Parameter: Treatment Value: 100uM ABA vs. No Treatment
  misc_feature: MA Experiment ID: 20000169 Result: Up-regulated in Transcription
  misc_feature: MA Experiment 20000169 PARAMETER Experiment Name: At_100uM_ABA_P Parameter: Age (day) Value: 14
  misc_feature: MA Experiment 20000169 PARAMETER Experiment Name: At_100uM_ABA_P Parameter: Organism Value: A. thaliana
  misc_feature: MA Experiment 20000169 PARAMETER Experiment Name: At_100uM_ABA_P Parameter: Plant Line Value: WS
  misc_feature: MA Experiment 20000169 PARAMETER Experiment Name: At_100uM_ABA_P Parameter: Timepoint (hr) Value: 6
  misc_feature: MA Experiment 20000169 PARAMETER Experiment Name: At_100uM_ABA_P Parameter: Tissue Value: Aerial
  misc_feature: MA Experiment 20000169 PARAMETER Experiment Name: At_100uM_ABA_P Parameter: Treatment Value: 100uM ABA vs. No Treatment
  misc_feature: MA Experiment ID: 20000171 Result: Down-regulated in Transcription
  misc_feature: MA Experiment 20000171 PARAMETER Experiment Name: At_42deg_Heat_P Parameter: Age (day) Value: 14
  misc_feature: MA Experiment 20000171 PARAMETER Experiment Name: At_42deg_Heat_P Parameter: Organism Value: A. thaliana
  misc_feature: MA Experiment 20000171 PARAMETER Experiment Name: At_42deg_Heat_P Parameter: Plant Line Value: WS
  misc_feature: MA Experiment 20000171 PARAMETER Experiment Name: At_42deg_Heat_P Parameter: Temperature (deg C) Value: 42 vs. 22
  misc_feature: MA Experiment 20000171 PARAMETER Experiment Name: At_42deg_Heat_P Parameter: Timepoint (hr) Value: 1
  misc_feature: MA Experiment 20000171 PARAMETER Experiment Name: At_42deg_Heat_P Parameter: Tissue Value: Aerial
  misc_feature: MA Experiment ID: 20000173 Result: Down-regulated in Transcription
  misc_feature: MA Experiment 20000173 PARAMETER Experiment Name: At_42deg_Heat_P Parameter: Age (day) Value: 14
  misc_feature: MA Experiment 20000173 PARAMETER Experiment Name: At_42deg_Heat_P Parameter: Organism Value: A. thaliana
  misc_feature: MA Experiment 20000173 PARAMETER Experiment Name: At_42deg_Heat_P Parameter: Plant Line Value: WS
  misc_feature: MA Experiment 20000173 PARAMETER Experiment Name: At_42deg_Heat_P Parameter: Temperature (deg C) Value: 42 vs. 22
  misc_feature: MA Experiment 20000173 PARAMETER Experiment Name: At_42deg_Heat_P Parameter: Timepoint (hr) Value: 6
  misc_feature: MA Experiment 20000173 PARAMETER Experiment Name: At_42deg_Heat_P Parameter: Tissue Value: Aerial
  misc_feature: MA Experiment ID: 20000182 Result: Down-regulated in Transcription
  misc_feature: MA Experiment 20000182 PARAMETER Experiment Name: At_2mM_SA_P Parameter: Age (day) Value: 14
  misc_feature: MA Experiment 20000182 PARAMETER Experiment Name: At_2mM_SA_P Parameter: Organism Value: A. thaliana
  misc_feature: MA Experiment 20000182 PARAMETER Experiment Name: At_2mM_SA_P Parameter: Plant Line Value: WS
  misc_feature: MA Experiment 20000182 PARAMETER Experiment Name: At_2mM_SA_P Parameter: Timepoint (hr) Value: 6
  misc_feature: MA Experiment 20000182 PARAMETER Experiment Name: At_2mM_SA_P Parameter: Tissue Value: Aerial
  misc_feature: MA Experiment 20000182 PARAMETER Experiment Name: At_2mM_SA_P Parameter: Treatment Value: 2mM SA vs. No Treatment
  misc_feature: MA Experiment ID: 20000184 Result: Down-regulated in Transcription
  misc_feature: MA Experiment 20000184 PARAMETER Experiment Name: At_Shoots__P Parameter: Age (day) Value: 7
  misc_feature: MA Experiment 20000184 PARAMETER Experiment Name: At_Shoots__P Parameter: Tissue Value: Shoots vs. Whole Plant
  misc_feature: MA Experiment ID: 20000185 Result: Down-regulated in Transcription
  misc_feature: MA Experiment 20000185 PARAMETER Experiment Name: At_Roots__P Parameter: Age (day) Value: 7 vs. 21
  misc_feature: MA Experiment 20000185 PARAMETER Experiment Name: At_Roots__P Parameter: Organism Value: A. thaliana
  misc_feature: MA Experiment 20000185 PARAMETER Experiment Name: At_Roots__P Parameter: Tissue Value: Roots vs. Whole Plant
  misc_feature: MA Experiment ID: 20000211 Result: Down-regulated in Transcription
  misc_feature: MA Experiment 20000211 PARAMETER Experiment Name: At_0.001percent_MeJA__P Parameter: Age (day) Value: 14
  misc_feature: MA Experiment 20000211 PARAMETER Experiment Name: At_0.001percent_MeJA__P Parameter: Organism Value: A. thaliana
  misc_feature: MA Experiment 20000211 PARAMETER Experiment Name: At_0.001percent_MeJA__P Parameter: Plant Line Value: WS
  misc_feature: MA Experiment 20000211 PARAMETER Experiment Name: At_0.001percent_MeJA__P Parameter: Timepoint (hr) Value: 1
  misc_feature: MA Experiment 20000211 PARAMETER Experiment Name: At_0.001percent_MeJA__P Parameter: Tissue Value: Aerial
  misc_feature: MA Experiment 20000211 PARAMETER Experiment Name: At_0.001percent_MeJA__P Parameter: Treatment Value: 0.001percent MeJA vs. No Treatment
  misc_feature: MA Experiment ID: 20000234 Result: Down-regulated in Transcription
  misc_feature: MA Experiment 20000234 PARAMETER Experiment Name: At_Siliques_P Parameter: Age (day) Value: 21
  misc_feature: MA Experiment 20000234 PARAMETER Experiment Name: At_Siliques_P Parameter: Organism Value: A. thaliana
  misc_feature: MA Experiment 20000234 PARAMETER Experiment Name: At_Siliques_P Parameter: Plant Line Value: WS
  misc_feature: MA Experiment 20000234 PARAMETER Experiment Name: At_Siliques_P Parameter: Tissue Value: Less Than 5mm Siliques vs. Whole Plant
  misc_feature: MA Experiment ID: 20000437 Result: Up-regulated in Transcription
  misc_feature: MA Experiment 20000437 PARAMETER Experiment Name: At_Drought_P Parameter: Age (day) Value: 8
  misc_feature: MA Experiment 20000437 PARAMETER Experiment Name: At_Drought_P Parameter: Organism Value: A. thaliana
  misc_feature: MA Experiment 20000437 PARAMETER Experiment Name: At_Drought_P Parameter: Plant Line Value: WS
  misc_feature: MA Experiment 20000437 PARAMETER Experiment Name: At_Drought_P Parameter: Timepoint (hr) Value: 24
  misc_feature: MA Experiment 20000437 PARAMETER Experiment Name: At_Drought_P Parameter: Tissue Value: Whole Plant
  misc_feature: MA Experiment 20000437 PARAMETER Experiment Name: At_Drought_P Parameter: Treatment Value: Drought vs. No Drought
  misc_feature: MA Experiment ID: 20000439 Result: Down-regulated in Transcription
  misc_feature: MA Experiment 20000439 PARAMETER Experiment Name: At_Roots__P Parameter: Age (day) Value: 14 vs. 21
  misc_feature: MA Experiment 20000439 PARAMETER Experiment Name: At_Roots__P Parameter: Organism Value: A. thaliana
  misc_feature: MA Experiment 20000439 PARAMETER Experiment Name: At_Roots__P Parameter: Tissue Value: Roots vs. Whole Plant
  misc_feature: MA Experiment ID: 20000453 Result: Up-regulated in Transcription
  misc_feature: MA Experiment 20000453 PARAMETER Experiment Name: At_100uM_ABA_P Parameter: Age (day) Value: 15
  misc_feature: MA Experiment 20000453 PARAMETER Experiment Name: At_100uM_ABA_P Parameter: Organism Value: A. thaliana
  misc_feature: MA Experiment 20000453 PARAMETER Experiment Name: At_100uM_ABA_P Parameter: Plant Line Value: WS
  misc_feature: MA Experiment 20000453 PARAMETER Experiment Name: At_100uM_ABA_P Parameter: Timepoint (hr) Value: 24
  misc_feature: MA Experiment 20000453 PARAMETER Experiment Name: At_100uM_ABA_P Parameter: Tissue Value: Aerial
  misc_feature: MA Experiment 20000453 PARAMETER Experiment Name: At_100uM_ABA_P Parameter: Treatment Value: 100uM ABA vs. No Treatment
  misc_feature: MA Experiment ID: 20000495 Result: Down-regulated in Transcription
  misc_feature: MA Experiment 20000495 PARAMETER Experiment Name: At_Guard_Cells_P Parameter: Harvest Date Value: 8/2/2002
  misc_feature: MA Experiment 20000495 PARAMETER Experiment Name: At_Guard_Cells_P Parameter: Organism Value: A. thaliana
  misc_feature: MA Experiment 20000495 PARAMETER Experiment Name: At_Guard_Cells_P Parameter: Tissue Value: Guard Cells vs. Leaves
  misc_feature: MA Experiment ID: 20000794 Result: Up-regulated in Transcription
  misc_feature: MA Experiment 20000794 PARAMETER Experiment Name: At_Petals_P Parameter: Age (day) Value: 23-25 days
  misc_feature: MA Experiment 20000794 PARAMETER Experiment Name: At_Petals_P Parameter: Plant Line Value: WS
  misc_feature: MA Experiment 20000794 PARAMETER Experiment Name: At_Petals_P Parameter: Tissue Value: Petals vs. Whole plant
  misc_feature: MA Experiment ID: 20001247 Result: Down-regulated in Transcription
  misc_feature: MA Experiment 20001247 PARAMETER Experiment Name: At_Far-red-induction_P Parameter: Age (day) Value: 7
  misc_feature: MA Experiment 20001247 PARAMETER Experiment Name: At_Far-red-induction_P Parameter: Light Value: Far-red vs. White
  misc_feature: MA Experiment 20001247 PARAMETER Experiment Name: At_Far-red-induction_P Parameter: Organism Value: A. thaliana
  misc_feature: MA Experiment 20001247 PARAMETER Experiment Name: At_Far-red-induction_P Parameter: Plant Line Value: Columbia
  misc_feature: MA Experiment 20001247 PARAMETER Experiment Name: At_Far-red-induction_P Parameter: Timepoint (hr) Value: 1
  misc_feature: MA Experiment 20001247 PARAMETER Experiment Name: At_Far-red-induction_P Parameter: Tissue Value: Whole Plant
  misc_feature: MA Experiment ID: 20001248 Result: Up-regulated in Transcription
  misc_feature: MA Experiment 20001248 PARAMETER Experiment Name: At_Far-red-induction_P Parameter: Age (day) Value: 7
  misc_feature: MA Experiment 20001248 PARAMETER Experiment Name: At_Far-red-induction_P Parameter: Light Value: Far-red vs. White
  misc_feature: MA Experiment 20001248 PARAMETER Experiment Name: At_Far-red-induction_P Parameter: Organism Value: A. thaliana
  misc_feature: MA Experiment 20001248 PARAMETER Experiment Name: At_Far-red-induction_P Parameter: Plant Line Value: Columbia
  misc_feature: MA Experiment 20001248 PARAMETER Experiment Name: At_Far-red-induction_P Parameter: Timepoint (hr) Value: 4
  misc_feature: MA Experiment 20001248 PARAMETER Experiment Name: At_Far-red-induction_P Parameter: Tissue Value: Whole Plant
  misc_feature: MA Experiment ID: 20001459 Result: Down-regulated in Transcription
  misc_feature: MA Experiment 20001459 PARAMETER Experiment Name: At_50mM_NH4NO3_L-to-H_P Parameter: Age (day) Value: Undefined
  misc_feature: MA Experiment 20001459 PARAMETER Experiment Name: At_50mM_NH4NO3_L-to-H_P Parameter: Organism Value: Undefined
  misc_feature: MA Experiment 20001459 PARAMETER Experiment Name: At_50mM_NH4NO3_L-to-H_P Parameter: Plant Line Value: Undefined
  misc_feature: MA Experiment 20001459 PARAMETER Experiment Name: At_50mM_NH4NO3_L-to-H_P Parameter: Timepoint (hr) Value: 4
  misc_feature: MA Experiment 20001459 PARAMETER Experiment Name: At_50mM_NH4NO3_L-to-H_P Parameter: Tissue Value: Siliques
  misc_feature: MA Experiment 20001459 PARAMETER Experiment Name: At_50mM_NH4NO3_L-to-H_P Parameter: Treatment Value: 50mM NH4NO3 vs. 100mM Manitol
  misc_feature: MA Experiment ID: 20001557 Result: Down-regulated in Transcription
  misc_feature: MA Experiment 20001557 PARAMETER Experiment Name: At_Drought_Soil_Dry_P Parameter: Age (day) Value: 27
  misc_feature: MA Experiment 20001557 PARAMETER Experiment Name: At_Drought_Soil_Dry_P Parameter: Organism Value: A. thaliana
  misc_feature: MA Experiment 20001557 PARAMETER Experiment Name: At_Drought_Soil_Dry_P Parameter: Plant Line Value: WS
  misc_feature: MA Experiment 20001557 PARAMETER Experiment Name: At_Drought_Soil_Dry_P Parameter: Post Timepoint (hr) Value: 3
  misc_feature: MA Experiment 20001557 PARAMETER Experiment Name: At_Drought_Soil_Dry_P Parameter: Post-Treatment Value: Re-Water vs. No Drought
  misc_feature: MA Experiment 20001557 PARAMETER Experiment Name: At_Drought_Soil_Dry_P Parameter: Timepoint (day) Value: 13
  misc_feature: MA Experiment 20001557 PARAMETER Experiment Name: At_Drought_Soil_Dry_P Parameter: Treatment Value: Drought vs. No Drought
  misc_feature: MA Experiment ID: 20001558 Result: Down-regulated in Transcription
  misc_feature: MA Experiment 20001558 PARAMETER Experiment Name: At_Drought_Soil_Dry_P Parameter: Age (day) Value: 27
  misc_feature: MA Experiment 20001558 PARAMETER Experiment Name: At_Drought_Soil_Dry_P Parameter: Organism Value: A. thaliana
  misc_feature: MA Experiment 20001558 PARAMETER Experiment Name: At_Drought_Soil_Dry_P Parameter: Plant Line Value: WS
  misc_feature: MA Experiment 20001558 PARAMETER Experiment Name: At_Drought_Soil_Dry_P Parameter: Post Timepoint (hr) Value: 6
  misc_feature: MA Experiment 20001558 PARAMETER Experiment Name: At_Drought_Soil_Dry_P Parameter: Post-Treatment Value: Re-Water vs. No Drought
  misc_feature: MA Experiment 20001558 PARAMETER Experiment Name: At_Drought_Soil_Dry_P Parameter: Timepoint (day) Value: 13
  misc_feature: MA Experiment 20001558 PARAMETER Experiment Name: At_Drought_Soil_Dry_P Parameter: Treatment Value: Drought vs. No Drought
  misc_feature: MA Experiment ID: 20001560 Result: Down-regulated in Transcription
  misc_feature: MA Experiment 20001560 PARAMETER Experiment Name: At_Drought_Soil_Dry_P Parameter: Age (day) Value: 28
  misc_feature: MA Experiment 20001560 PARAMETER Experiment Name: At_Drought_Soil_Dry_P Parameter: Organism Value: A. thaliana
  misc_feature: MA Experiment 20001560 PARAMETER Experiment Name: At_Drought_Soil_Dry_P Parameter: Plant Line Value: WS
  misc_feature: MA Experiment 20001560 PARAMETER Experiment Name: At_Drought_Soil_Dry_P Parameter: Post Timepoint (hr) Value: None
  misc_feature: MA Experiment 20001560 PARAMETER Experiment Name: At_Drought_Soil_Dry_P Parameter: Post-Treatment Value: None
  misc_feature: MA Experiment 20001560 PARAMETER Experiment Name: At_Drought_Soil_Dry_P Parameter: Timepoint (day) Value: 14
  misc_feature: MA Experiment 20001560 PARAMETER Experiment Name: At_Drought_Soil_Dry_P Parameter: Treatment Value: Drought vs. No Drought
  misc_feature: MA Experiment ID: 20001757 Result: Up-regulated in Transcription
  misc_feature: MA Experiment 20001757 PARAMETER Experiment Name: At_50mM_NH4NO3_L-to-H_P Parameter: Timepoint (hr) Value: 6
  misc_feature: MA Experiment 20001757 PARAMETER Experiment Name: At_50mM_NH4NO3_L-to-H_P Parameter: Tissue Value: Leaf
  misc_feature: MA Experiment 20001757 PARAMETER Experiment Name: At_50mM_NH4NO3_L-to-H_P Parameter: Treatment Value: 50mM NH4NO3 vs 100mM Mannitol
  misc_feature: MA Experiment ID: 20001772 Result: Up-regulated in Transcription
  misc_feature: MA Experiment 20001772 PARAMETER Experiment Name: At_Far-red-enriched-adult_P Parameter: Age (day) Value: 29
  misc_feature: MA Experiment 20001772 PARAMETER Experiment Name: At_Far-red-enriched-adult_P Parameter: Light Value: Far-red enriched vs. White
  misc_feature: MA Experiment 20001772 PARAMETER Experiment Name: At_Far-red-enriched-adult_P Parameter: Organism Value: A. thaliana
  misc_feature: MA Experiment 20001772 PARAMETER Experiment Name: At_Far-red-enriched-adult_P Parameter: Plant Line Value: Columbia
  misc_feature: MA Experiment 20001772 PARAMETER Experiment Name: At_Far-red-enriched-adult_P Parameter: Timepoint (hr) Value: 24
  misc_feature: MA Experiment 20001772 PARAMETER Experiment Name: At_Far-red-enriched-adult_P Parameter: Tissue Value: Aerial
  misc_feature: MA Experiment ID: 20001773 Result: Up-regulated in Transcription
  misc_feature: MA Experiment 20001773 PARAMETER Experiment Name: At_Far-red-enriched-adult_P Parameter: Age (day) Value: 30
  misc_feature: MA Experiment 20001773 PARAMETER Experiment Name: At_Far-red-enriched-adult_P Parameter: Light Value: Far-red enriched vs. White
  misc_feature: MA Experiment 20001773 PARAMETER Experiment Name: At_Far-red-enriched-adult_P Parameter: Organism Value: A. thaliana
  misc_feature: MA Experiment 20001773 PARAMETER Experiment Name: At_Far-red-enriched-adult_P Parameter: Plant Line Value: Columbia
  misc_feature: MA Experiment 20001773 PARAMETER Experiment Name: At_Far-red-enriched-adult_P Parameter: Timepoint (hr) Value: 48
  misc_feature: MA Experiment 20001773 PARAMETER Experiment Name: At_Far-red-enriched-adult_P Parameter: Tissue Value: Aerial

SEQ ID NO: 31930 - protein, 162 aa, Arabidopsis thaliana; identical to SEQ ID NO: 28340
  peptide (1)..(162): Ceres Seq. ID no. 13500320
  misc_feature (6)..(156): Pfam Name: Universal stress protein family Pfam Description: Universal stress protein family
  misc_feature (7)..(156): Homolog of NCBI NO: 30681955 NR Description: ethylene-responsive protein -related [Arabidopsis
  misc_feature (7)..(156): Homolog of NCBI NO: 18399413 NR Description: ethylene-responsive protein -related [Arabidopsis
  misc_feature (5)..(156): Homolog of NCBI NO: 30694811 NR Description: expressed protein [Arabidopsis thaliana]
  misc_feature (8)..(161): Homolog of NCBI NO: 40539010 NR Description: putative stress-related protein
  misc_feature (4)..(156): Homolog of NCBI NO: 5669654 NR Description: ER6 protein [Lycopersicon esculentum]
  misc_feature (5)..(158): Homolog of NCBI NO: 34914610 NR Description: P0520B06.18 [Oryza sativa (japonica
  misc_feature (9)..(156): Homolog of NCBI NO: 25402571 NR Description: hypothetical protein [imported] - Arabidopsis
  misc_feature (9)..(156): Homolog of NCBI NO: 30681321 NR Description: ER6 protein -related [Arabidopsis thaliana]
  misc_feature (3)..(134): Homolog of NCBI NO: 34905540 NR Description: B1146F03.27 [Oryza sativa (japonica
  misc_feature (1)..(162): Homolog of NCBI NO: 15228790 NR Description: expressed protein [Arabidopsis thaliana]

SEQ ID NO: 31931 - protein, 143 aa, Arabidopsis thaliana; identical to SEQ ID NO: 28341
  peptide (1)..(143): Ceres Seq. ID no. 13500321
  misc_feature (1)..(137): Pfam Name: Universal stress protein family Pfam Description: Universal stress protein family
  misc_feature (1)..(137): Homolog of NCBI NO: 30681955 NR Description: ethylene-responsive protein -related [Arabidopsis
  misc_feature (1)..(137): Homolog of NCBI NO: 18399413 NR Description: ethylene-responsive protein -related [Arabidopsis
  misc_feature (1)..(137): Homolog of NCBI NO: 30694811 NR Description: expressed protein [Arabidopsis thaliana]
  misc_feature (1)..(142): Homolog of NCBI NO: 40539010 NR Description: putative stress-related protein
  misc_feature (1)..(137): Homolog of NCBI NO: 5669654 NR Description: ER6 protein [Lycopersicon esculentum]
  misc_feature (1)..(139): Homolog of NCBI NO: 34914610 NR Description: P0520B06.18 [Oryza sativa (japonica
  misc_feature (1)..(137): Homolog of NCBI NO: 25402571 NR Description: hypothetical protein [imported] - Arabidopsis
  misc_feature (1)..(137): Homolog of NCBI NO: 30681321 NR Description: ER6 protein -related [Arabidopsis thaliana]
  misc_feature (1)..(115): Homolog of NCBI NO: 34905540 NR Description: B1146F03.27 [Oryza sativa (japonica
  misc_feature (1)..(143): Homolog of NCBI NO: 15228790 NR Description: expressed protein [Arabidopsis thaliana]

SEQ ID NO: 31932 - protein, 82 aa, Arabidopsis thaliana; identical to SEQ ID NO: 28342
  peptide (1)..(82): Ceres Seq. ID no. 13500322
  misc_feature (1)..(76): Pfam Name: Universal stress protein family Pfam Description: Universal stress protein family
  misc_feature (1)..(76): Homolog of NCBI NO: 30681955 NR Description: ethylene-responsive protein -related [Arabidopsis
  misc_feature (1)..(76): Homolog of NCBI NO: 18399413 NR Description: ethylene-responsive protein -related [Arabidopsis
  misc_feature (1)..(76): Homolog of NCBI NO: 30694811 NR Description: expressed protein [Arabidopsis thaliana]
  misc_feature (1)..(81): Homolog of NCBI NO: 40539010 NR Description: putative stress-related protein
  misc_feature (1)..(76): Homolog of NCBI NO: 5669654 NR Description: ER6 protein [Lycopersicon esculentum]
  misc_feature (1)..(78): Homolog of NCBI NO: 34914610 NR Description: P0520B06.18 [Oryza sativa (japonica
  misc_feature (1)..(76): Homolog of NCBI NO: 25402571 NR Description: hypothetical protein [imported] - Arabidopsis
  misc_feature (1)..(76): Homolog of NCBI NO: 30681321 NR Description: ER6 protein -related [Arabidopsis thaliana]
  misc_feature (1)..(54): Homolog of NCBI NO: 34905540 NR Description: B1146F03.27 [Oryza sativa (japonica
  misc_feature (1)..(82): Homolog of NCBI NO: 15228790 NR Description: expressed protein [Arabidopsis thaliana]

SEQ ID NO: 31933 - DNA, 1649 bp, Arabidopsis thaliana; identical to SEQ ID NO: 28343
  misc_feature (1)..(1649): Ceres Seq. ID no. 13645741
  misc_feature: MA Experiment ID: 108434 Result: Up-regulated in Transcription
  misc_feature: MA Experiment 108434 PARAMETER Experiment Name: At_Root_Tips_cDNA_P Parameter: Tissue Value: Root Tips
  misc_feature: MA Experiment ID: 108461 Result: Down-regulated in Transcription
  misc_feature: MA Experiment 108461 PARAMETER Experiment Name: At_Germinating_Seeds_cDNA_P Parameter: Age (day) Value: 1 vs. 0
  misc_feature: MA Experiment 108461 PARAMETER Experiment Name: At_Germinating_Seeds_cDNA_P Parameter: Tissue Value: Germinating Seeds
  misc_feature: MA Experiment ID: 108462 Result: Down-regulated in Transcription
  misc_feature: MA Experiment 108462 PARAMETER Experiment Name: At_Germinating_Seeds_cDNA_P Parameter: Age (day) Value: 2 vs. 0
  misc_feature: MA Experiment 108462 PARAMETER Experiment Name: At_Germinating_Seeds_cDNA_P Parameter: Tissue Value: Germinating Seeds
  misc_feature: MA Experiment ID: 108463 Result: Down-regulated in Transcription
  misc_feature: MA Experiment 108463 PARAMETER Experiment Name: At_Germinating_Seeds_cDNA_P Parameter: Age (day) Value: 3 vs. 0
  misc_feature: MA Experiment 108463 PARAMETER Experiment Name: At_Germinating_Seeds_cDNA_P Parameter: Tissue Value: Germinating Seeds
  misc_feature: MA Experiment ID: 108464 Result: Down-regulated in Transcription
  misc_feature: MA Experiment 108464 PARAMETER Experiment Name: At_Germinating_Seeds_cDNA_P Parameter: Age (day) Value: 4 vs. 0
  misc_feature: MA Experiment 108464 PARAMETER Experiment Name: At_Germinating_Seeds_cDNA_P Parameter: Tissue Value: Germinating Seeds
  misc_feature: MA Experiment ID: 108488 Result: Up-regulated in Transcription
  misc_feature: MA Experiment ID: 108489 Result: Up-regulated in Transcription
  misc_feature: MA Experiment ID: 108572 Result: Down-regulated in Transcription
  misc_feature: MA Experiment 108572 PARAMETER Experiment Name: At_Drought_cDNA_P Parameter: Timepoint (hr) Value: 1
  misc_feature: MA Experiment 108572 PARAMETER Experiment Name: At_Drought_cDNA_P Parameter: Tissue Value: Aerial
  misc_feature: MA Experiment 108572 PARAMETER Experiment Name: At_Drought_cDNA_P Parameter: Treatment Value: Drought vs. No Drought
  misc_feature: MA Experiment ID: 108573 Result: Down-regulated in Transcription
  misc_feature: MA Experiment 108573 PARAMETER Experiment Name: At_Drought_cDNA_P Parameter: Timepoint (hr) Value: 6
  misc_feature: MA Experiment 108573 PARAMETER Experiment Name: At_Drought_cDNA_P Parameter: Tissue Value: Aerial
  misc_feature: MA Experiment 108573 PARAMETER Experiment Name: At_Drought_cDNA_P Parameter: Treatment Value: Drought vs. No Drought
  misc_feature: MA Experiment ID: 108595 Result: Down-regulated in Transcription
  misc_feature: MA Experiment 108595 PARAMETER Experiment Name: At_Ler-pi_Ovule_cDNA_P Parameter: Plant Line Value: null
  misc_feature: MA Experiment ID: 20000179 Result: Down-regulated in Transcription
  misc_feature: MA Experiment 20000179 PARAMETER Experiment Name: At_Germinating_Seeds_P Parameter: Age (hr) Value: 6 vs. 0
  misc_feature: MA Experiment 20000179 PARAMETER Experiment Name: At_Germinating_Seeds_P Parameter: Tissue Value: Germinating Seeds
  misc_feature: MA Experiment ID: 20000180 Result: Down-regulated in Transcription
  misc_feature: MA Experiment 20000180 PARAMETER Experiment Name: At_Germinating_Seeds_P Parameter: Age (hr) Value: 24 vs. 0
  misc_feature: MA Experiment 20000180 PARAMETER Experiment Name: At_Germinating_Seeds_P Parameter: Tissue Value: Germinating Seeds
  misc_feature: MA Experiment ID: 20000227 Result: Up-regulated in Transcription
  misc_feature: MA Experiment 20000227 PARAMETER Experiment Name: At_Root-Tips-vs-Tops_P Parameter: Tissue Value: Root Tips vs. Root Tops
  misc_feature: MA Experiment ID: 20001451 Result: Down-regulated in Transcription
  misc_feature: MA Experiment 20001451 PARAMETER Experiment Name: At_Far-red-induction_P Parameter: Age (day) Value: 7
  misc_feature: MA Experiment 20001451 PARAMETER Experiment Name: At_Far-red-induction_P Parameter: Light Value: Far-red vs. White
  misc_feature: MA Experiment 20001451 PARAMETER Experiment Name: At_Far-red-induction_P Parameter: Organism Value: A. thaliana
  misc_feature: MA Experiment 20001451 PARAMETER Experiment Name: At_Far-red-induction_P Parameter: Plant Line Value: Columbia
  misc_feature: MA Experiment 20001451 PARAMETER Experiment Name: At_Far-red-induction_P Parameter: Timepoint (hr) Value: 24
  misc_feature: MA Experiment 20001451 PARAMETER Experiment Name: At_Far-red-induction_P Parameter: Tissue Value: Whole Plant
  misc_feature: MA Experiment ID: 20001458 Result: Up-regulated in Transcription
  misc_feature: MA Experiment 20001458 PARAMETER Experiment Name: At_50mM_NH4NO3_L-to-H_P Parameter: Age (day) Value: Undefined
  misc_feature: MA Experiment 20001458 PARAMETER Experiment Name: At_50mM_NH4NO3_L-to-H_P Parameter: Organism Value: Undefined
  misc_feature: MA Experiment 20001458 PARAMETER Experiment Name: At_50mM_NH4NO3_L-to-H_P Parameter: Plant Line Value: Undefined
  misc_feature: MA Experiment 20001458 PARAMETER Experiment Name: At_50mM_NH4NO3_L-to-H_P Parameter: Timepoint (hr) Value: 2
  misc_feature: MA Experiment 20001458 PARAMETER Experiment Name: At_50mM_NH4NO3_L-to-H_P Parameter: Tissue Value: Siliques
  misc_feature: MA Experiment 20001458 PARAMETER Experiment Name: At_50mM_NH4NO3_L-to-H_P Parameter: Treatment Value: 50mM NH4NO3 vs. 100mM Manitol
  misc_feature: MA Experiment ID: 20001556 Result: Up-regulated in Transcription
  misc_feature: MA Experiment 20001556 PARAMETER Experiment Name: At_Drought_Soil_Dry_P Parameter: Age (day) Value: 26
  misc_feature: MA Experiment 20001556 PARAMETER Experiment Name: At_Drought_Soil_Dry_P Parameter: Organism Value: A. thaliana
  misc_feature: MA Experiment 20001556 PARAMETER Experiment Name: At_Drought_Soil_Dry_P Parameter: Plant Line Value: WS
  misc_feature: MA Experiment 20001556 PARAMETER Experiment Name: At_Drought_Soil_Dry_P Parameter: Post Timepoint (hr) Value: None
  misc_feature: MA Experiment 20001556 PARAMETER Experiment Name: At_Drought_Soil_Dry_P Parameter: Post-Treatment Value: None
  misc_feature: MA Experiment 20001556 PARAMETER Experiment Name: At_Drought_Soil_Dry_P Parameter: Timepoint (day) Value: 12
  misc_feature: MA Experiment 20001556 PARAMETER Experiment Name: At_Drought_Soil_Dry_P Parameter: Treatment Value: Drought vs. No Drought
  misc_feature: MA Experiment ID: 20001557 Result: Up-regulated in Transcription
  misc_feature: MA Experiment 20001557 PARAMETER Experiment Name: At_Drought_Soil_Dry_P Parameter: Age (day) Value: 27
  misc_feature: MA Experiment 20001557 PARAMETER Experiment Name: At_Drought_Soil_Dry_P Parameter: Organism Value: A. thaliana
  misc_feature: MA Experiment 20001557 PARAMETER Experiment Name: At_Drought_Soil_Dry_P Parameter: Plant Line Value: WS
  misc_feature: MA Experiment 20001557 PARAMETER Experiment Name: At_Drought_Soil_Dry_P Parameter: Post Timepoint (hr) Value: 3
  misc_feature: MA Experiment 20001557 PARAMETER Experiment Name: At_Drought_Soil_Dry_P Parameter: Post-Treatment Value: Re-Water vs. No Drought
  misc_feature: MA Experiment 20001557 PARAMETER Experiment Name: At_Drought_Soil_Dry_P Parameter: Timepoint (day) Value: 13
  misc_feature: MA Experiment 20001557 PARAMETER Experiment Name: At_Drought_Soil_Dry_P Parameter: Treatment Value: Drought vs. No Drought
  misc_feature: MA Experiment ID: 20001558 Result: Up-regulated in Transcription
  misc_feature: MA Experiment 20001558 PARAMETER Experiment Name: At_Drought_Soil_Dry_P Parameter: Age (day) Value: 27
  misc_feature: MA Experiment 20001558 PARAMETER Experiment Name: At_Drought_Soil_Dry_P Parameter: Organism Value: A. thaliana
  misc_feature: MA Experiment 20001558 PARAMETER Experiment Name: At_Drought_Soil_Dry_P Parameter: Plant Line Value: WS
  misc_feature: MA Experiment 20001558 PARAMETER Experiment Name: At_Drought_Soil_Dry_P Parameter: Post Timepoint (hr) Value: 6
  misc_feature: MA Experiment 20001558 PARAMETER Experiment Name: At_Drought_Soil_Dry_P Parameter: Post-Treatment Value: Re-Water vs. No Drought
  misc_feature: MA Experiment 20001558 PARAMETER Experiment Name: At_Drought_Soil_Dry_P Parameter: Timepoint (day) Value: 13
  misc_feature: MA Experiment 20001558 PARAMETER Experiment Name: At_Drought_Soil_Dry_P Parameter: Treatment Value: Drought vs. No Drought
  misc_feature: MA Experiment ID: 20001560 Result: Up-regulated in Transcription
  misc_feature: MA Experiment 20001560 PARAMETER Experiment Name: At_Drought_Soil_Dry_P Parameter: Age (day) Value: 28
  misc_feature: MA Experiment 20001560 PARAMETER Experiment Name: At_Drought_Soil_Dry_P Parameter: Organism Value: A. thaliana
  misc_feature: MA Experiment 20001560 PARAMETER Experiment Name: At_Drought_Soil_Dry_P Parameter: Plant Line Value: WS
  misc_feature: MA Experiment 20001560 PARAMETER Experiment Name: At_Drought_Soil_Dry_P Parameter: Post Timepoint (hr) Value: None
  misc_feature: MA Experiment 20001560 PARAMETER Experiment Name: At_Drought_Soil_Dry_P Parameter: Post-Treatment Value: None
  misc_feature: MA Experiment 20001560 PARAMETER Experiment Name: At_Drought_Soil_Dry_P Parameter: Timepoint (day) Value: 14
  misc_feature: MA Experiment 20001560 PARAMETER Experiment Name: At_Drought_Soil_Dry_P Parameter: Treatment Value: Drought vs. No Drought
  misc_feature: MA Experiment ID: 20001757 Result: Up-regulated in Transcription
  misc_feature: MA Experiment 20001757 PARAMETER Experiment Name: At_50mM_NH4NO3_L-to-H_P Parameter: Timepoint (hr) Value: 6
  misc_feature: MA Experiment 20001757 PARAMETER Experiment Name: At_50mM_NH4NO3_L-to-H_P Parameter: Tissue Value: Leaf
  misc_feature: MA Experiment 20001757 PARAMETER Experiment Name: At_50mM_NH4NO3_L-to-H_P Parameter: Treatment Value: 50mM NH4NO3 vs 100mM Mannitol

SEQ ID NO: 31934 - protein, 444 aa, Arabidopsis thaliana; identical to SEQ ID NO: 28344
  peptide (1)..(444): Ceres Seq. ID no. 13645742
  misc_feature (127)..(423): Pfam Name: Bystin Pfam Description: Bystin
  misc_feature (127)..(423): Pfam Name: Bystin Pfam Description: Bystin
  misc_feature (128)..(420): Homolog of NCBI NO: 15011984 NR Description: bystin [Homo sapiens]
  misc_feature (128)..(420): Homolog of NCBI NO: 15208645 NR Description: bystin [Homo sapiens]
  misc_feature (127)..(420): Homolog of NCBI NO: 21264404 NR Description: Bystin
  misc_feature (116)..(420): Homolog of NCBI NO: 33873575 NR Description: BYSL protein [Homo sapiens]
  misc_feature (116)..(420): Homolog of NCBI NO: 38566213 NR Description: BYSL protein [Homo sapiens]
  misc_feature (128)..(420): Homolog of NCBI NO: 15011984 NR Description: bystin [Homo sapiens]
  misc_feature (127)..(420): Homolog of NCBI NO: 21264404 NR Description: Bystin
  misc_feature (116)..(420): Homolog of NCBI NO: 38566213 NR Description: BYSL protein [Homo sapiens]
  misc_feature (1)..(444): Homolog of NCBI NO: 20268780 NR Description: putative bystin [Arabidopsis thaliana]
  misc_feature (1)..(444): Homolog of NCBI NO: 15222394 NR Description: bystin -related [Arabidopsis thaliana]
  misc_feature (12)..(418): Homolog of NCBI NO: 31419416 NR Description: Unknown (protein for MGC:63889) [Danio rerio]
  misc_feature (15)..(420): Homolog of NCBI NO: 29792064 NR Description: bystin-like [Homo sapiens]
  misc_feature (111)..(421): Homolog of NCBI NO: 32996727 NR Description: bystin-like [Rattus norvegicus]
  misc_feature (116)..(420): Homolog of NCBI NO: 33873575 NR Description: BYSL protein [Homo sapiens]
  misc_feature (128)..(420): Homolog of NCBI NO: 15208645 NR Description: bystin [Homo sapiens]
  misc_feature (111)..(421): Homolog of NCBI NO: 32996727 NR Description: bystin-like [Rattus norvegicus]
  misc_feature (15)..(420): Homolog of NCBI NO: 29792064 NR Description: bystin-like [Homo sapiens]
  misc_feature (12)..(418): Homolog of NCBI NO: 31419416 NR Description: Unknown (protein for MGC:63889) [Danio rerio]
  misc_feature (1)..(444): Homolog of NCBI NO: 15222394 NR Description: bystin -related [Arabidopsis thaliana]
  misc_feature (1)..(444): Homolog of NCBI NO: 20268780 NR Description: putative bystin [Arabidopsis thaliana]

SEQ ID NO: 31935 - protein, 400 aa, Arabidopsis thaliana; identical to SEQ ID NO: 28345
  peptide (1)..(400): Ceres Seq. ID no. 13645743
  misc_feature (83)..(379): Pfam Name: Bystin Pfam Description: Bystin
  misc_feature (83)..(379): Pfam Name: Bystin Pfam Description: Bystin
  misc_feature (84)..(376): Homolog of NCBI NO: 15011984 NR Description: bystin [Homo sapiens]
  misc_feature (84)..(376): Homolog of NCBI NO: 15208645 NR Description: bystin [Homo sapiens]
  misc_feature (83)..(376): Homolog of NCBI NO: 21264404 NR Description: Bystin
  misc_feature (72)..(376): Homolog of NCBI NO: 33873575 NR Description: BYSL protein [Homo sapiens]
  misc_feature (72)..(376): Homolog of NCBI NO: 38566213 NR Description: BYSL protein [Homo sapiens]
  misc_feature (84)..(376): Homolog of NCBI NO: 15011984 NR Description: bystin [Homo sapiens]
  misc_feature (83)..(376): Homolog of NCBI NO: 21264404 NR Description: Bystin
  misc_feature (72)..(376): Homolog of NCBI NO: 38566213 NR Description: BYSL protein [Homo sapiens]
  misc_feature (1)..(400): Homolog of NCBI NO: 20268780 NR Description: putative bystin [Arabidopsis thaliana]
  misc_feature (1)..(400): Homolog of NCBI NO: 15222394 NR Description: bystin -related [Arabidopsis thaliana]
  misc_feature (1)..(374): Homolog of NCBI NO: 31419416 NR Description: Unknown (protein for MGC:63889) [Danio rerio]
  misc_feature (1)..(376): Homolog of NCBI NO: 29792064 NR Description: bystin-like [Homo sapiens]
  misc_feature (67)..(377): Homolog of NCBI NO: 32996727 NR Description: bystin-like [Rattus norvegicus]
  misc_feature (72)..(376): Homolog of NCBI NO: 33873575 NR Description: BYSL protein [Homo sapiens]
  misc_feature (84)..(376): Homolog of NCBI NO: 15208645 NR Description: bystin [Homo sapiens]
  misc_feature (67)..(377): Homolog of NCBI NO: 32996727 NR Description: bystin-like [Rattus norvegicus]
  misc_feature (1)..(376): Homolog of NCBI NO: 29792064 NR Description: bystin-like [Homo sapiens]
  misc_feature (1)..(374): Homolog of NCBI NO: 31419416 NR Description: Unknown (protein for MGC:63889) [Danio rerio]
  misc_feature (1)..(400): Homolog of NCBI NO: 15222394 NR Description: bystin -related [Arabidopsis thaliana]
  misc_feature (1)..(400): Homolog of NCBI NO: 20268780 NR Description: putative bystin [Arabidopsis thaliana]

SEQ ID NO: 31936 - protein, 395 aa, Arabidopsis thaliana; identical to SEQ ID NO: 28346
  peptide (1)..(395): Ceres Seq. ID no. 13645744
  misc_feature (78)..(374): Pfam Name: Bystin Pfam Description: Bystin
  misc_feature (78)..(374): Pfam Name: Bystin Pfam Description: Bystin
  misc_feature (79)..(371): Homolog of NCBI NO: 15011984 NR Description: bystin [Homo sapiens]
  misc_feature (79)..(371): Homolog of NCBI NO: 15208645 NR Description: bystin [Homo sapiens]
  misc_feature (78)..(371): Homolog of NCBI NO: 21264404 NR Description: Bystin
  misc_feature (67)..(371): Homolog of NCBI NO: 33873575 NR Description: BYSL protein [Homo sapiens]
  misc_feature (67)..(371): Homolog of NCBI NO: 38566213 NR Description: BYSL protein [Homo sapiens]
  misc_feature (79)..(371): Homolog of NCBI NO: 15011984 NR Description: bystin [Homo sapiens]
  misc_feature (78)..(371): Homolog of NCBI NO: 21264404 NR Description: Bystin
  misc_feature (67)..(371): Homolog of NCBI NO: 38566213 NR Description: BYSL protein [Homo sapiens]
  misc_feature (1)..(395): Homolog of NCBI NO: 20268780 NR Description: putative bystin [Arabidopsis thaliana]
  misc_feature (1)..(395): Homolog of NCBI NO: 15222394 NR Description: bystin -related [Arabidopsis thaliana]
  misc_feature (1)..(369): Homolog of NCBI NO: 31419416 NR Description: Unknown (protein for MGC:63889) [Danio rerio]
  misc_feature (1)..(371): Homolog of NCBI NO: 29792064 NR Description: bystin-like [Homo sapiens]
  misc_feature (62)..(372): Homolog of NCBI NO: 32996727 NR Description: bystin-like [Rattus norvegicus]
  misc_feature (67)..(371): Homolog of NCBI NO: 33873575 NR Description: BYSL protein [Homo sapiens]
  misc_feature (79)..(371): Homolog of NCBI NO: 15208645 NR Description: bystin [Homo sapiens]
  misc_feature (62)..(372): Homolog of NCBI NO: 32996727 NR Description: bystin-like [Rattus norvegicus]
  misc_feature (1)..(371): Homolog of NCBI NO: 29792064 NR Description: bystin-like [Homo sapiens]
  misc_feature (1)..(369): Homolog of NCBI NO: 31419416 NR Description: Unknown (protein for MGC:63889) [Danio rerio]
  misc_feature (1)..(395): Homolog of NCBI NO: 15222394 NR Description: bystin -related [Arabidopsis thaliana]
  misc_feature (1)..(395): Homolog of NCBI NO: 20268780 NR Description: putative bystin [Arabidopsis thaliana]

SEQ ID NO: 31937 - DNA, 1041 bp, Arabidopsis thaliana; identical to SEQ ID NO: 28347
  misc_feature (1)..(1041): Ceres Seq. ID no. 13504928
  misc_feature: MA Experiment ID: 20000234 Result: Down-regulated in Transcription
  misc_feature: MA Experiment 20000234 PARAMETER Experiment Name: At_Siliques_P Parameter: Age (day) Value: 21
  misc_feature: MA Experiment 20000234 PARAMETER Experiment Name: At_Siliques_P Parameter: Organism Value: A. thaliana
  misc_feature: MA Experiment 20000234 PARAMETER Experiment Name: At_Siliques_P Parameter: Plant Line Value: WS
  misc_feature: MA Experiment 20000234 PARAMETER Experiment Name: At_Siliques_P Parameter: Tissue Value: Less Than 5mm Siliques vs. Whole Plant
  misc_feature: MA Experiment ID: 20000235 Result: Down-regulated in Transcription
  misc_feature: MA Experiment 20000235 PARAMETER Experiment Name: At_Siliques_P Parameter: Age (day) Value: 21
  misc_feature: MA Experiment 20000235 PARAMETER Experiment Name: At_Siliques_P Parameter: Organism Value: A. thaliana
  misc_feature: MA Experiment 20000235 PARAMETER Experiment Name: At_Siliques_P Parameter: Plant Line Value: WS
  misc_feature: MA Experiment 20000235 PARAMETER Experiment Name: At_Siliques_P Parameter: Tissue Value: 5-10mm Siliques vs. Whole Plant
  misc_feature: MA Experiment ID: 20000264 Result: Down-regulated in Transcription
  misc_feature: MA Experiment 20000264 PARAMETER Experiment Name: At_Open_Flower_P Parameter: Age (day) Value: 21
  misc_feature: MA Experiment 20000264 PARAMETER Experiment Name: At_Open_Flower_P Parameter: Plant Line Value: WS
  misc_feature: MA Experiment 20000264 PARAMETER Experiment Name: At_Open_Flower_P Parameter: Tissue Value: Open Flower vs. Whole Plant
  misc_feature: MA Experiment ID: 20000265 Result: Down-regulated in Transcription
  misc_feature: MA Experiment 20000265 PARAMETER Experiment Name: At_Open_Flower_P Parameter: Age (day) Value: 21
  misc_feature: MA Experiment 20000265 PARAMETER Experiment Name: At_Open_Flower_P Parameter: Plant Line Value: WS
  misc_feature: MA Experiment 20000265 PARAMETER Experiment Name: At_Open_Flower_P Parameter: Tissue Value: Closed Flower vs. Whole Plant
  misc_feature: MA Experiment ID: 20000286 Result: Down-regulated in Transcription
  misc_feature: MA Experiment 20000286 PARAMETER Experiment Name: At_Open_Flower_P Parameter: Age (day) Value: 21
  misc_feature: MA Experiment 20000286 PARAMETER Experiment Name: At_Open_Flower_P Parameter: Plant Line Value: WS
  misc_feature: MA Experiment 20000286 PARAMETER Experiment Name: At_Open_Flower_P Parameter: Tissue Value: Half Open vs. Whole Plant
  misc_feature: MA Experiment ID: 20000438 Result: Down-regulated in Transcription
  misc_feature: MA Experiment 20000438 PARAMETER Experiment Name: At_Shoots__P Parameter: Age (day) Value: 14
  misc_feature: MA Experiment 20000438 PARAMETER Experiment Name: At_Shoots__P Parameter: Tissue Value: Shoots vs. Whole Plant
  misc_feature: MA Experiment ID: 20001248 Result: Up-regulated in Transcription
  misc_feature: MA Experiment 20001248 PARAMETER Experiment Name: At_Far-red-induction_P Parameter: Age (day) Value: 7
  misc_feature: MA Experiment 20001248 PARAMETER Experiment Name: At_Far-red-induction_P Parameter: Light Value: Far-red vs. White
  misc_feature: MA Experiment 20001248 PARAMETER Experiment Name: At_Far-red-induction_P Parameter: Organism Value: A. thaliana
  misc_feature: MA Experiment 20001248 PARAMETER Experiment Name: At_Far-red-induction_P Parameter: Plant Line Value: Columbia
  misc_feature: MA Experiment 20001248 PARAMETER Experiment Name: At_Far-red-induction_P Parameter: Timepoint (hr) Value: 4
  misc_feature: MA Experiment 20001248 PARAMETER Experiment Name: At_Far-red-induction_P Parameter: Tissue Value: Whole Plant
  misc_feature: MA Experiment ID: 20001450 Result: Up-regulated in Transcription
  misc_feature: MA Experiment 20001450 PARAMETER Experiment Name: At_Far-red-induction_P Parameter: Age (day) Value: 7
  misc_feature: MA Experiment 20001450 PARAMETER Experiment Name: At_Far-red-induction_P Parameter: Light Value: Far-red vs. White
  misc_feature: MA Experiment 20001450 PARAMETER Experiment Name: At_Far-red-induction_P Parameter: Organism Value: A. thaliana
  misc_feature: MA Experiment 20001450 PARAMETER Experiment Name: At_Far-red-induction_P Parameter: Plant Line Value: Columbia
  misc_feature: MA Experiment 20001450 PARAMETER Experiment Name: At_Far-red-induction_P Parameter: Timepoint (hr) Value: 8
  misc_feature: MA Experiment 20001450 PARAMETER Experiment Name: At_Far-red-induction_P Parameter: Tissue Value: Whole Plant
  misc_feature: MA Experiment ID: 20001451 Result: Up-regulated in Transcription
  misc_feature: MA Experiment 20001451 PARAMETER Experiment Name: At_Far-red-induction_P Parameter: Age (day) Value: 7
  misc_feature: MA Experiment 20001451 PARAMETER Experiment Name: At_Far-red-induction_P Parameter: Light Value: Far-red vs. White
  misc_feature: MA Experiment 20001451 PARAMETER Experiment Name: At_Far-red-induction_P Parameter: Organism Value: A. thaliana
  misc_feature: MA Experiment 20001451 PARAMETER Experiment Name: At_Far-red-induction_P Parameter: Plant Line Value: Columbia
  misc_feature: MA Experiment 20001451 PARAMETER Experiment Name: At_Far-red-induction_P Parameter: Timepoint (hr) Value: 24
  misc_feature: MA Experiment 20001451 PARAMETER Experiment Name: At_Far-red-induction_P Parameter: Tissue Value: Whole Plant
  misc_feature: MA Experiment ID: 20001905 Result: Down-regulated in Transcription
  misc_feature: MA Experiment 20001905 PARAMETER Experiment Name: At_Drought_Reproduction_P Parameter: Age (day) Value: 40
  misc_feature: MA Experiment 20001905 PARAMETER Experiment Name: At_Drought_Reproduction_P Parameter: Organism Value: A. thaliana
  misc_feature: MA Experiment 20001905 PARAMETER Experiment Name: At_Drought_Reproduction_P Parameter: Plant Line Value: WS
  misc_feature: MA Experiment 20001905 PARAMETER Experiment Name: At_Drought_Reproduction_P Parameter: Timepoint (day) Value: 10
  misc_feature: MA Experiment 20001905 PARAMETER Experiment Name: At_Drought_Reproduction_P Parameter: Tissue Value: Rosettes
  misc_feature: MA Experiment 20001905 PARAMETER Experiment Name: At_Drought_Reproduction_P Parameter: Treatment Value: Drought vs. No Drought

SEQ ID NO: 31938 - protein, 206 aa, Arabidopsis thaliana; identical to SEQ ID NO: 28348
  peptide (1)..(206): Ceres Seq. ID no. 13504929
  misc_feature (66)..(121): Pfam Name: CBS domain Pfam Description: CBS domain
  misc_feature (78)..(204): Homolog of NCBI NO: 15595447 NR Description: conserved hypothetical protein [Pseudomonas
  misc_feature (56)..(204): Homolog of NCBI NO: 26986946 NR Description: CBS domain protein [Pseudomonas putida KT2440]
  misc_feature (66)..(206): Homolog of NCBI NO: 22988916 NR Description: hypothetical protein [Burkholderia fungorum]
  misc_feature (48)..(202): Homolog of NCBI NO: 28850322 NR Description: similar to putative protein
  misc_feature (36)..(204): Homolog of NCBI NO: 22984734 NR Description: hypothetical protein [Burkholderia fungorum]
  misc_feature (56)..(203): Homolog of NCBI NO: 34499375 NR Description: conserved hypothetical protein
  misc_feature (1)..(110): Homolog of NCBI NO: 18266206 NR Description: senescence-associated putative protein [Narcissus
  misc_feature (1)..(206): Homolog of NCBI NO: 34913008 NR Description: P0663E10.18 [Oryza sativa (japonica
  misc_feature (1)..(206): Homolog of NCBI NO: 29788876 NR Description: unknown protein [Oryza sativa (japonica
  misc_feature (1)..(206): Homolog of NCBI NO: 15238284 NR Description: CBS domain containing protein [Arabidopsis

SEQ ID NO: 31939 - protein, 160 aa, Arabidopsis thaliana; identical to SEQ ID NO: 25659
  peptide (1)..(160): Ceres Seq. ID no. 13504930
  misc_feature (20)..(75): Pfam Name: CBS domain Pfam Description: CBS domain
  misc_feature (32)..(158): Homolog of NCBI NO: 15595447 NR Description: conserved hypothetical protein [Pseudomonas
  misc_feature (10)..(158): Homolog of NCBI NO: 26986946 NR Description: CBS domain protein [Pseudomonas putida KT2440]
  misc_feature (20)..(160): Homolog of NCBI NO: 22988916 NR Description: hypothetical protein [Burkholderia fungorum]
  misc_feature (2)..(156): Homolog of NCBI NO: 28850322 NR Description: similar to putative protein
  misc_feature (1)..(158): Homolog of NCBI NO: 22984734 NR Description: hypothetical protein [Burkholderia fungorum]
  misc_feature (10)..(157): Homolog of NCBI NO: 34499375 NR Description: conserved hypothetical protein
  misc_feature (1)..(64): Homolog of NCBI NO: 18266206 NR Description: senescence-associated putative protein [Narcissus
  misc_feature (1)..(160): Homolog of NCBI NO: 34913008 NR Description: P0663E10.18 [Oryza sativa (japonica
  misc_feature (1)..(160): Homolog of NCBI NO: 29788876 NR Description: unknown protein [Oryza sativa (japonica
  misc_feature (1)..(160): Homolog of NCBI NO: 15238284 NR Description: CBS domain containing protein [Arabidopsis

SEQ ID NO: 31940 - protein, 146 aa, Arabidopsis thaliana; identical to SEQ ID NO: 25660
  peptide (1)..(146): Ceres Seq. ID no. 13504931
  misc_feature (6)..(61): Pfam Name: CBS domain Pfam Description: CBS domain
  misc_feature (18)..(144): Homolog of NCBI NO: 15595447 NR Description: conserved hypothetical protein [Pseudomonas
  misc_feature (1)..(144): Homolog of NCBI NO: 26986946 NR Description: CBS domain protein [Pseudomonas putida KT2440]
  misc_feature (6)..(146): Homolog of NCBI NO: 22988916 NR Description: hypothetical protein [Burkholderia fungorum]
  misc_feature (1)..(142): Homolog of NCBI NO: 28850322 NR Description: similar to putative protein
  misc_feature (1)..(144): Homolog of NCBI NO: 22984734 NR Description: hypothetical protein [Burkholderia fungorum]
  misc_feature (1)..(143): Homolog of NCBI NO: 34499375 NR Description: conserved hypothetical protein
  misc_feature (1)..(50): Homolog of NCBI NO: 18266206 NR Description: senescence-associated putative protein [Narcissus
  misc_feature (1)..(146): Homolog of NCBI NO: 34913008 NR Description: P0663E10.18 [Oryza sativa (japonica
  misc_feature (1)..(146): Homolog of NCBI NO: 29788876 NR Description: unknown protein [Oryza sativa (japonica
  misc_feature (1)..(146): Homolog of NCBI NO: 15238284 NR Description: CBS domain containing protein [Arabidopsis

SEQ ID NO: 31941 - DNA, 1596 bp, Arabidopsis thaliana; identical to SEQ ID NO: 28351
  misc_feature (1)..(1596): Ceres Seq. ID no. 13496758
  misc_feature: MA Experiment ID: 20000171 Result: Down-regulated in Transcription
  misc_feature: MA Experiment 20000171 PARAMETER Experiment Name: At_42deg_Heat_P Parameter: Age (day) Value: 14
  misc_feature: MA Experiment 20000171 PARAMETER Experiment Name: At_42deg_Heat_P Parameter: Organism Value: A. thaliana
  misc_feature: MA Experiment 20000171 PARAMETER Experiment Name: At_42deg_Heat_P Parameter: Plant Line Value: WS
  misc_feature: MA Experiment 20000171 PARAMETER Experiment Name: At_42deg_Heat_P Parameter: Temperature (deg C) Value: 42 vs. 22
  misc_feature: MA Experiment 20000171 PARAMETER Experiment Name: At_42deg_Heat_P Parameter: Timepoint (hr) Value: 1
  misc_feature: MA Experiment 20000171 PARAMETER Experiment Name: At_42deg_Heat_P Parameter: Tissue Value: Aerial
  misc_feature: MA Experiment ID: 20000173 Result: Down-regulated in Transcription
  misc_feature: MA Experiment 20000173 PARAMETER Experiment Name: At_42deg_Heat_P Parameter: Age (day) Value: 14
  misc_feature: MA Experiment 20000173 PARAMETER Experiment Name: At_42deg_Heat_P Parameter: Organism Value: A. thaliana
  misc_feature: MA Experiment 20000173 PARAMETER Experiment Name: At_42deg_Heat_P Parameter: Plant Line Value: WS
  misc_feature: MA Experiment 20000173 PARAMETER Experiment Name: At_42deg_Heat_P Parameter: Temperature (deg C) Value: 42 vs. 22
  misc_feature: MA Experiment 20000173 PARAMETER Experiment Name: At_42deg_Heat_P Parameter: Timepoint (hr) Value: 6
  misc_feature: MA Experiment 20000173 PARAMETER Experiment Name: At_42deg_Heat_P Parameter: Tissue Value: Aerial
  misc_feature: MA Experiment ID: 20000179 Result: Down-regulated in Transcription
  misc_feature: MA Experiment 20000179 PARAMETER Experiment Name: At_Germinating_Seeds_P Parameter: Age (hr) Value: 6 vs. 0
  misc_feature: MA Experiment 20000179 PARAMETER Experiment Name: At_Germinating_Seeds_P Parameter: Tissue Value: Germinating Seeds
  misc_feature: MA Experiment ID: 20000185 Result: Up-regulated in Transcription
  misc_feature: MA Experiment 20000185 PARAMETER Experiment Name: At_Roots__P Parameter: Age (day) Value: 7 vs. 21
  misc_feature: MA Experiment 20000185 PARAMETER Experiment Name: At_Roots__P Parameter: Organism Value: A. thaliana
  misc_feature: MA Experiment 20000185 PARAMETER Experiment Name: At_Roots__P Parameter: Tissue Value: Roots vs. Whole Plant
  misc_feature: MA Experiment ID: 20000234 Result: Up-regulated in Transcription
  misc_feature: MA Experiment 20000234 PARAMETER Experiment Name: At_Siliques_P Parameter: Age (day) Value: 21
  misc_feature: MA Experiment 20000234 PARAMETER Experiment Name: At_Siliques_P Parameter: Organism Value: A. thaliana
  misc_feature: MA Experiment 20000234 PARAMETER Experiment Name: At_Siliques_P Parameter: Plant Line Value: WS
  misc_feature: MA Experiment 20000234 PARAMETER Experiment Name: At_Siliques_P Parameter: Tissue Value: Less Than 5mm Siliques vs. Whole Plant
  misc_feature: MA Experiment ID: 20000235 Result: Up-regulated in Transcription
  misc_feature: MA Experiment 20000235 PARAMETER Experiment Name: At_Siliques_P Parameter: Age (day) Value: 21
  misc_feature: MA Experiment 20000235 PARAMETER Experiment Name: At_Siliques_P Parameter: Organism Value: A. thaliana
  misc_feature: MA Experiment 20000235 PARAMETER Experiment Name: At_Siliques_P Parameter: Plant Line Value: WS
  misc_feature: MA Experiment 20000235 PARAMETER Experiment Name: At_Siliques_P Parameter: Tissue Value: 5-10mm Siliques vs. Whole Plant
  misc_feature: MA Experiment ID: 20000264 Result: Up-regulated in Transcription
  misc_feature: MA Experiment 20000264 PARAMETER Experiment Name: At_Open_Flower_P Parameter: Age (day) Value: 21
  misc_feature: MA Experiment 20000264 PARAMETER Experiment Name: At_Open_Flower_P Parameter: Plant Line Value: WS
  misc_feature: MA Experiment 20000264 PARAMETER Experiment Name: At_Open_Flower_P Parameter: Tissue Value: Open Flower vs. Whole Plant
  misc_feature: MA Experiment ID: 20000265 Result: Up-regulated in Transcription
  misc_feature: MA Experiment 20000265 PARAMETER Experiment Name: At_Open_Flower_P Parameter: Age (day) Value: 21
  misc_feature: MA Experiment 20000265 PARAMETER Experiment Name: At_Open_Flower_P Parameter: Plant Line Value: WS
  misc_feature: MA Experiment 20000265 PARAMETER Experiment Name: At_Open_Flower_P Parameter: Tissue Value: Closed Flower vs. Whole Plant
  misc_feature: MA Experiment ID: 20000286 Result: Up-regulated in Transcription
  misc_feature: MA Experiment 20000286 PARAMETER Experiment Name: At_Open_Flower_P Parameter: Age (day) Value: 21
  misc_feature: MA Experiment 20000286 PARAMETER Experiment Name: At_Open_Flower_P Parameter: Plant Line Value: WS
  misc_feature: MA Experiment 20000286 PARAMETER Experiment Name: At_Open_Flower_P Parameter: Tissue Value: Half Open vs. Whole Plant
  misc_feature: MA Experiment ID: 20000439 Result: Up-regulated in Transcription
  misc_feature: MA Experiment 20000439 PARAMETER Experiment Name: At_Roots__P Parameter: Age (day) Value: 14 vs. 21
  misc_feature: MA Experiment 20000439 PARAMETER Experiment Name: At_Roots__P Parameter: Organism Value: A. thaliana
  misc_feature: MA Experiment 20000439 PARAMETER Experiment Name: At_Roots__P Parameter: Tissue Value: Roots vs. Whole Plant
  misc_feature: MA Experiment ID: 20000495 Result: Up-regulated in Transcription
  misc_feature: MA Experiment 20000495 PARAMETER Experiment Name: At_Guard_Cells_P Parameter: Harvest Date Value: 8/2/2002
  misc_feature: MA Experiment 20000495 PARAMETER Experiment Name: At_Guard_Cells_P Parameter: Organism Value: A. thaliana
  misc_feature: MA Experiment 20000495 PARAMETER Experiment Name: At_Guard_Cells_P Parameter: Tissue Value: Guard Cells vs. Leaves
  misc_feature: MA Experiment ID: 20000496 Result: Up-regulated in Transcription
  misc_feature: MA Experiment 20000496 PARAMETER Experiment Name: At_Guard_Cells_P Parameter: Harvest Date Value: 7/19/2002
  misc_feature: MA Experiment 20000496 PARAMETER Experiment Name: At_Guard_Cells_P Parameter: Organism Value: Canola
  misc_feature: MA Experiment 20000496 PARAMETER Experiment Name: At_Guard_Cells_P Parameter: Tissue Value: Guard Cells vs. Leaves
  misc_feature: MA Experiment ID: 20000794 Result: Up-regulated in Transcription
  misc_feature: MA Experiment 20000794 PARAMETER Experiment Name: At_Petals_P Parameter: Age (day) Value: 23-25 days
  misc_feature: MA Experiment 20000794 PARAMETER Experiment Name: At_Petals_P Parameter: Plant Line Value: WS
  misc_feature: MA Experiment 20000794 PARAMETER Experiment Name: At_Petals_P Parameter: Tissue Value: Petals vs. Whole plant

SEQ ID NO: 31942 - protein, 495 aa, Arabidopsis thaliana; identical to SEQ ID NO: 28352
  peptide (1)..(495): Ceres Seq. ID no. 13496759
  misc_feature (101)..(457): Pfam Name: Glycosyl hydrolases family 28 Pfam Description: Glycosyl hydrolases family 28
  misc_feature (81)..(468): Homolog of NCBI NO: 34393209 NR Description: putative polygalacturonase
  misc_feature (64)..(460): Homolog of NCBI NO: 40714685 NR Description: putative polygalacturonase
  misc_feature (57)..(462): Homolog of NCBI NO: 11263971 NR Description: hypothetical protein T17J13.70 - Arabidopsis
  misc_feature (57)..(462): Homolog of NCBI NO: 18412253 NR Description: polygalacturonase, putative [Arabidopsis
  misc_feature (57)..(488): Homolog of NCBI NO: 15224072 NR Description: polygalacturonase, putative [Arabidopsis
  misc_feature (58)..(490): Homolog of NCBI NO: 34897760 NR Description: ESTs AU029388(E30287),D49277(S16474) correspond a region of the predicted gene.~Similar to Arabidopsis thaliana
  misc_feature (45)..(489): Homolog of NCBI NO: 15229058 NR Description: polygalacturonase, putative [Arabidopsis
  misc_feature (54)..(488): Homolog of NCBI NO: 15233124 NR Description: polygalacturonase, putative [Arabidopsis
  misc_feature (34)..(488): Homolog of NCBI NO: 30692538 NR Description: polygalacturonase-like protein [Fragaria x
  misc_feature (1)..(495): Homolog of NCBI NO: 15236514 NR Description: polygalacturonase, putative [Arabidopsis

SEQ ID NO: 31943 - protein, 286 aa, Arabidopsis thaliana; identical to SEQ ID NO: 28353
  peptide (1)..(286): Ceres Seq. ID no. 13496760
  misc_feature (1)..(248): Pfam Name: Glycosyl hydrolases family 28 Pfam Description: Glycosyl hydrolases family 28
  misc_feature (1)..(259): Homolog of NCBI NO: 34393209 NR Description: putative polygalacturonase
  misc_feature (1)..(251): Homolog of NCBI NO: 40714685 NR Description: putative polygalacturonase
  misc_feature (1)..(253): Homolog of NCBI NO: 11263971 NR Description: hypothetical protein T17J13.70 - Arabidopsis
  misc_feature (1)..(253): Homolog of NCBI NO: 18412253 NR Description: polygalacturonase, putative [Arabidopsis
  misc_feature (1)..(279): Homolog of NCBI NO: 15224072 NR Description: polygalacturonase, putative [Arabidopsis
  misc_feature (1)..(281): Homolog of NCBI NO: 34897760 NR Description: ESTs AU029388(E30287),D49277(S16474) correspond a region of the predicted gene.~Similar to Arabidopsis thaliana
  misc_feature (1)..(280): Homolog of NCBI NO: 15229058 NR Description: polygalacturonase, putative [Arabidopsis
  misc_feature (1)..(279): Homolog of NCBI NO: 15233124 NR Description: polygalacturonase, putative [Arabidopsis
  misc_feature (1)..(279): Homolog of NCBI NO: 30692538 NR Description: polygalacturonase-like protein [Fragaria x
  misc_feature (1)..(286): Homolog of NCBI NO: 15236514 NR Description: polygalacturonase, putative [Arabidopsis

SEQ ID NO: 31944 - DNA, 591 bp, Arabidopsis thaliana; identical to SEQ ID NO: 28354
  misc_feature (1)..(591): Ceres Seq. ID no. 12393038
  misc_feature: MA Experiment ID: 108434 Result: Up-regulated in Transcription
  misc_feature: MA Experiment 108434 PARAMETER Experiment Name: At_Root_Tips_cDNA_P Parameter: Tissue Value: Root Tips
  misc_feature: MA Experiment ID: 108462 Result: Down-regulated in Transcription
  misc_feature: MA Experiment 108462 PARAMETER Experiment Name: At_Germinating_Seeds_cDNA_P Parameter: Age (day) Value: 2 vs. 0
  misc_feature: MA Experiment 108462 PARAMETER Experiment Name: At_Germinating_Seeds_cDNA_P Parameter: Tissue Value: Germinating Seeds
  misc_feature: MA Experiment ID: 108463 Result: Down-regulated in Transcription
  misc_feature: MA Experiment 108463 PARAMETER Experiment Name: At_Germinating_Seeds_cDNA_P Parameter: Age (day) Value: 3 vs. 0
  misc_feature: MA Experiment 108463 PARAMETER Experiment Name: At_Germinating_Seeds_cDNA_P Parameter: Tissue Value: Germinating Seeds
  misc_feature: MA Experiment ID: 108464 Result: Down-regulated in Transcription
  misc_feature: MA Experiment 108464 PARAMETER Experiment Name: At_Germinating_Seeds_cDNA_P Parameter: Age (day) Value: 4 vs. 0
  misc_feature: MA Experiment 108464 PARAMETER Experiment Name: At_Germinating_Seeds_cDNA_P Parameter: Tissue Value: Germinating Seeds
  misc_feature: MA Experiment ID: 108573 Result: Down-regulated in Transcription
  misc_feature: MA Experiment 108573 PARAMETER Experiment Name: At_Drought_cDNA_P Parameter: Timepoint (hr) Value: 6
  misc_feature: MA Experiment 108573 PARAMETER Experiment Name: At_Drought_cDNA_P Parameter: Tissue Value: Aerial
  misc_feature: MA Experiment 108573 PARAMETER Experiment Name: At_Drought_cDNA_P Parameter: Treatment Value: Drought vs. No Drought
  misc_feature: MA Experiment ID: 20000117 Result: Down-regulated in Transcription
  misc_feature: MA Experiment 20000117 PARAMETER Experiment Name: At_100uM_ABA_Mutants_cDNA_P Parameter: Plant Line Value: Columbia
  misc_feature: MA Experiment 20000117 PARAMETER Experiment Name: At_100uM_ABA_Mutants_cDNA_P Parameter: Timepoint (hr) Value: 6
  misc_feature: MA Experiment 20000117 PARAMETER Experiment Name: At_100uM_ABA_Mutants_cDNA_P Parameter: Tissue Value: Aerial
  misc_feature: MA Experiment 20000117 PARAMETER Experiment Name: At_100uM_ABA_Mutants_cDNA_P Parameter: Treatment Value: 100uM ABA vs. No Treatment

SEQ ID NO: 31945 - protein, 127 aa, Arabidopsis thaliana; identical to SEQ ID NO: 28355
  peptide (1)..(127): Ceres Seq. ID no. 12393039
  misc_feature (29)..(126): Pfam Name: 60s Acidic ribosomal protein Pfam Description: 60s Acidic ribosomal protein
  misc_feature (13)..(127): Homolog of NCBI NO: 730583 NR Description: 60S acidic ribosomal protein P2
  misc_feature (13)..(127): Homolog of NCBI NO: 4204372 NR Description: acidic ribosomal protein P2a-2 [Zea mays]
  misc_feature (13)..(127): Homolog of NCBI NO: 899610 NR Description: acidic ribosomal protein P2
  misc_feature (13)..(127): Homolog of NCBI NO: 1173073 NR Description: 60S ACIDIC RIBOSOMAL PROTEIN P2A (P2)
  misc_feature (13)..(127): Homolog of NCBI NO: 15230454 NR Description: acidic ribosomal protein P2 -like; protein id:
  misc_feature (13)..(127): Homolog of NCBI NO: 34906408 NR Description: putative 60S acidic ribosomal protein P2A
  misc_feature (13)..(127): Homolog of NCBI NO: 24473796 NR Description: 60s acidic ribosomal protein [Prunus dulcis]
  misc_feature (13)..(127): Homolog of NCBI NO: 15226231 NR Description: 60S acidic ribosomal protein P2
  misc_feature (13)..(127): Homolog of NCBI NO: 15226230 NR Description: 60S acidic ribosomal protein P2
  misc_feature (13)..(127): Homolog of NCBI NO: 21593095 NR Description: 60S acidic ribosomal protein P2 [Arabidopsis

SEQ ID NO: 31946 - protein, 115 aa, Arabidopsis thaliana; identical to SEQ ID NO: 28356
  peptide (1)..(115): Ceres Seq. ID no. 12393040
  misc_feature (17)..(114): Pfam Name: 60s Acidic ribosomal protein Pfam Description: 60s Acidic ribosomal protein
  misc_feature (1)..(115): Homolog of NCBI NO: 730583 NR Description: 60S acidic ribosomal protein P2
  misc_feature (1)..(115): Homolog of NCBI NO: 4204372 NR Description: acidic ribosomal protein P2a-2 [Zea mays]
  misc_feature (1)..(115): Homolog of NCBI NO: 899610 NR Description: acidic ribosomal protein P2
  misc_feature (1)..(115): Homolog of NCBI NO: 1173073 NR Description: 60S ACIDIC RIBOSOMAL PROTEIN P2A (P2)
  misc_feature (1)..(115): Homolog of NCBI NO: 15230454 NR Description: acidic ribosomal protein P2 -like; protein id:
  misc_feature (1)..(115): Homolog of NCBI NO: 34906408 NR Description: putative 60S acidic ribosomal protein P2A
  misc_feature (1)..(115): Homolog of NCBI NO: 24473796 NR Description: 60s acidic ribosomal protein [Prunus dulcis]
  misc_feature (1)..(115): Homolog of NCBI NO: 15226231 NR Description: 60S acidic ribosomal protein P2
  misc_feature (1)..(115): Homolog of NCBI NO: 15226230 NR Description: 60S acidic ribosomal protein P2
  misc_feature (1)..(115): Homolog of NCBI NO: 21593095 NR Description: 60S acidic ribosomal protein P2 [Arabidopsis

SEQ ID NO: 31947 - DNA, 1046 bp, Arabidopsis thaliana; identical to SEQ ID NO: 28357
  misc_feature (1)..(1046): Ceres Seq. ID no. 12640901
  misc_feature: MA Experiment ID: 108569 Result: Down-regulated in Transcription
  misc_feature: MA Experiment 108569 PARAMETER Experiment Name: At_0.001%_MeJA__cDNA_P Parameter: Timepoint (hr) Value: 6
  misc_feature: MA Experiment 108569 PARAMETER Experiment Name: At_0.001%_MeJA__cDNA_P Parameter: Tissue Value: Aerial
  misc_feature: MA Experiment 108569 PARAMETER Experiment Name: At_0.001%_MeJA__cDNA_P Parameter: Treatment Value: 0.001% MeJA vs. No Treatment
  misc_feature: MA Experiment ID: 108668 Result: Up-regulated in Transcription
  misc_feature: MA Experiment 108668 PARAMETER Experiment Name: At_2mM_SA_cDNA_P Parameter: Plant Line Value: WS
  misc_feature: MA Experiment 108668 PARAMETER Experiment Name: At_2mM_SA_cDNA_P Parameter: Timepoint (hr) Value: 6
  misc_feature: MA Experiment 108668 PARAMETER Experiment Name: At_2mM_SA_cDNA_P Parameter: Treatment Value: 2mM SA vs. No Treatment
  misc_feature: MA Experiment ID: 20000173 Result: Up-regulated in Transcription
  misc_feature: MA Experiment 20000173 PARAMETER Experiment Name: At_42deg_Heat_P Parameter: Age (day) Value: 14
  misc_feature: MA Experiment 20000173 PARAMETER Experiment Name: At_42deg_Heat_P Parameter: Organism Value: A. thaliana
  misc_feature: MA Experiment 20000173 PARAMETER Experiment Name: At_42deg_Heat_P Parameter: Plant Line Value: WS
  misc_feature: MA Experiment 20000173 PARAMETER Experiment Name: At_42deg_Heat_P Parameter: Temperature (deg C) Value: 42 vs. 22
  misc_feature: MA Experiment 20000173 PARAMETER Experiment Name: At_42deg_Heat_P Parameter: Timepoint (hr) Value: 6
  misc_feature: MA Experiment 20000173 PARAMETER Experiment Name: At_42deg_Heat_P Parameter: Tissue Value: Aerial
  misc_feature: MA Experiment ID: 20000182 Result: Up-regulated in Transcription
  misc_feature: MA Experiment 20000182 PARAMETER Experiment Name: At_2mM_SA_P Parameter: Age (day) Value: 14
  misc_feature: MA Experiment 20000182 PARAMETER Experiment Name: At_2mM_SA_P Parameter: Organism Value: A. thaliana
  misc_feature: MA Experiment 20000182 PARAMETER Experiment Name: At_2mM_SA_P Parameter: Plant Line Value: WS
  misc_feature: MA Experiment 20000182 PARAMETER Experiment Name: At_2mM_SA_P Parameter: Timepoint (hr) Value: 6
  misc_feature: MA Experiment 20000182 PARAMETER Experiment Name: At_2mM_SA_P Parameter: Tissue Value: Aerial
  misc_feature: MA Experiment 20000182 PARAMETER Experiment Name: At_2mM_SA_P Parameter: Treatment Value: 2mM SA vs. No Treatment
  misc_feature: MA Experiment ID: 20000184 Result: Down-regulated in Transcription
  misc_feature: MA Experiment 20000184 PARAMETER Experiment Name: At_Shoots__P Parameter: Age (day) Value: 7
  misc_feature: MA Experiment 20000184 PARAMETER Experiment Name: At_Shoots__P Parameter: Tissue Value: Shoots vs. Whole Plant
  misc_feature: MA Experiment ID: 20000227 Result: Down-regulated in Transcription
  misc_feature: MA Experiment 20000227 PARAMETER Experiment Name: At_Root-Tips-vs-Tops_P Parameter: Tissue Value: Root Tips vs. Root Tops

SEQ ID NO: 31948 - protein, 146 aa, Arabidopsis thaliana; identical to SEQ ID NO: 28358
  peptide (1)..(146): Ceres Seq. ID no. 12640902
  misc_feature (19)..(146): Pfam Name: Cofilin/tropomyosin-type actin-binding protein Pfam Description: Cofilin/tropomyosin-type actin-binding protein
  misc_feature (17)..(146): Homolog of NCBI NO: 37536154 NR Description: putative actin depolymerizing factor
  misc_feature (10)..(146): Homolog of NCBI NO: 30697300 NR Description: actin depolymerizing factor 4 - like protein
  misc_feature (10)..(146): Homolog of NCBI NO: 17366768 NR Description: Actin-depolymerizing factor 1 (ADF 1)
  misc_feature (7)..(146): Homolog of NCBI NO: 34897072 NR Description: putative actin-depolymerizing factor
  misc_feature (12)..(145): Homolog of NCBI NO: 7330254 NR Description: actin depolymerizing factor [Elaeis guineensis]
  misc_feature (1)..(145): Homolog of NCBI NO: 24745620 NR Description: actin depolymerizing factor 6 [Solanum tuberosum]
  misc_feature (9)..(146): Homolog of NCBI NO: 4566614 NR Description: actin depolymerizing factor [Populus x canescens]
  misc_feature (15)..(146): Homolog of NCBI NO: 25295741 NR Description: actin depolymerizing factor 6 [imported] -
  misc_feature (1)..(146): Homolog of NCBI NO: 21554405 NR Description: Actin-depolymerizing factor ADF-6 [Arabidopsis
  misc_feature (1)..(146): Homolog of NCBI NO: 18402587 NR Description: actin depolymerizing factor 6

SEQ ID NO: 31949 - protein, 132 aa, Arabidopsis thaliana; identical to SEQ ID NO: 28359
  peptide (1)..(132): Ceres Seq. ID no. 12640903
  misc_feature (5)..(132): Pfam Name: Cofilin/tropomyosin-type actin-binding protein Pfam Description: Cofilin/tropomyosin-type actin-binding protein
  misc_feature (3)..(132): Homolog of NCBI NO: 37536154 NR Description: putative actin depolymerizing factor
  misc_feature (1)..(132): Homolog of NCBI NO: 30697300 NR Description: actin depolymerizing factor 4 - like protein
  misc_feature (1)..(132): Homolog of NCBI NO: 17366768 NR Description: Actin-depolymerizing factor 1 (ADF 1)
  misc_feature (1)..(132): Homolog of NCBI NO: 34897072 NR Description: putative actin-depolymerizing factor
  misc_feature (1)..(131): Homolog of NCBI NO: 7330254 NR Description: actin depolymerizing factor [Elaeis guineensis]
  misc_feature (1)..(131): Homolog of NCBI NO: 24745620 NR Description: actin depolymerizing factor 6 [Solanum tuberosum]
  misc_feature (1)..(132): Homolog of NCBI NO: 4566614 NR Description: actin depolymerizing factor [Populus x canescens]
  misc_feature (1)..(132): Homolog of NCBI NO: 25295741 NR Description: actin depolymerizing factor 6 [imported] -
  misc_feature (1)..(132): Homolog of NCBI NO: 21554405 NR Description: Actin-depolymerizing factor ADF-6 [Arabidopsis
  misc_feature (1)..(132): Homolog of NCBI NO: 18402587 NR Description: actin depolymerizing factor 6

SEQ ID NO: 31950 - DNA, 701 bp, Arabidopsis thaliana; identical to SEQ ID NO: 28360
  misc_feature (1)..(701): Ceres Seq. ID no. 12322232
  misc_feature: MA Experiment ID: 108434 Result: Down-regulated in Transcription
  misc_feature: MA Experiment 108434 PARAMETER Experiment Name: At_Root_Tips_cDNA_P Parameter: Tissue Value: Root Tips
  misc_feature: MA Experiment ID: 108488 Result: Down-regulated in Transcription
  misc_feature: MA Experiment ID: 108573 Result: Up-regulated in Transcription
  misc_feature: MA Experiment 108573 PARAMETER Experiment Name: At_Drought_cDNA_P Parameter: Timepoint (hr) Value: 6
  misc_feature: MA Experiment 108573 PARAMETER Experiment Name: At_Drought_cDNA_P Parameter: Tissue Value: Aerial
  misc_feature: MA Experiment 108573 PARAMETER Experiment Name: At_Drought_cDNA_P Parameter: Treatment Value: Drought vs. No Drought
  misc_feature: MA Experiment ID: 108576 Result: Up-regulated in Transcription
  misc_feature: MA Experiment 108576 PARAMETER Experiment Name: At_42deg_Heat_cDNA_P Parameter: Temperature (deg C) Value: 42 vs. 22
  misc_feature: MA Experiment 108576 PARAMETER Experiment Name: At_42deg_Heat_cDNA_P Parameter: Timepoint (hr) Value: 1
  misc_feature: MA Experiment 108576 PARAMETER Experiment Name: At_42deg_Heat_cDNA_P Parameter: Tissue Value: Aerial
  misc_feature: MA Experiment ID: 108579 Result: Up-regulated in Transcription
  misc_feature: MA Experiment 108579 PARAMETER Experiment Name: At_4deg_Cold_cDNA_P Parameter: Temperature (deg C) Value: 4 vs. 22
  misc_feature: MA Experiment 108579 PARAMETER Experiment Name: At_4deg_Cold_cDNA_P Parameter: Timepoint (hr) Value: 6
  misc_feature: MA Experiment 108579 PARAMETER Experiment Name: At_4deg_Cold_cDNA_P Parameter: Tissue Value: Aerial
  misc_feature: MA Experiment ID: 108585 Result: Up-regulated in Transcription
  misc_feature: MA Experiment 108585 PARAMETER Experiment Name: At_5mM_NaNP_cDNA_P Parameter: Timepoint (hr) Value: 6
  misc_feature: MA Experiment 108585 PARAMETER Experiment Name: At_5mM_NaNP_cDNA_P Parameter: Tissue Value: Aerial
  misc_feature: MA Experiment 108585 PARAMETER Experiment Name: At_5mM_NaNP_cDNA_P Parameter: Treatment Value: null
  misc_feature: MA Experiment ID: 108608 Result: Down-regulated in Transcription
  misc_feature: MA Experiment 108608 PARAMETER Experiment Name: At_100uM_ABA_cDNA_P Parameter: Timepoint (hr) Value: 1
  misc_feature: MA Experiment 108608 PARAMETER Experiment Name: At_100uM_ABA_cDNA_P Parameter: Tissue Value: Aerial
  misc_feature: MA Experiment 108608 PARAMETER Experiment Name: At_100uM_ABA_cDNA_P Parameter: Treatment Value: 100uM ABA vs. No Treatment
  misc_feature: MA Experiment ID: 108667 Result: Up-regulated in Transcription
  misc_feature: MA Experiment 108667 PARAMETER Experiment Name: At_2mM_SA_cDNA_P Parameter: Plant Line Value: WS
  misc_feature: MA Experiment 108667 PARAMETER Experiment Name: At_2mM_SA_cDNA_P Parameter: Timepoint (hr) Value: 1
  misc_feature: MA Experiment 108667 PARAMETER Experiment Name: At_2mM_SA_cDNA_P Parameter: Treatment Value: 2mM SA vs. No Treatment
  misc_feature: MA Experiment ID: 108668 Result: Up-regulated in Transcription
  misc_feature: MA Experiment 108668 PARAMETER Experiment Name: At_2mM_SA_cDNA_P Parameter: Plant Line Value: WS
  misc_feature: MA Experiment 108668 PARAMETER Experiment Name: At_2mM_SA_cDNA_P Parameter: Timepoint (hr) Value: 6
  misc_feature: MA Experiment 108668 PARAMETER Experiment Name: At_2mM_SA_cDNA_P Parameter: Treatment Value: 2mM SA vs. No Treatment
  misc_feature: MA Experiment ID: 20000068 Result: Up-regulated in Transcription
  misc_feature: MA Experiment ID: 20000069 Result: Up-regulated in Transcription
  misc_feature: MA Experiment 20000069 PARAMETER Experiment Name: At_100uM_ABA_Mutants_cDNA_P Parameter: Plant Line Value: CS23
  misc_feature: MA Experiment 20000069 PARAMETER Experiment Name: At_100uM_ABA_Mutants_cDNA_P Parameter: Timepoint (hr) Value: 6
  misc_feature: MA Experiment 20000069 PARAMETER Experiment Name: At_100uM_ABA_Mutants_cDNA_P Parameter: Tissue Value: Aerial
  misc_feature: MA Experiment 20000069 PARAMETER Experiment Name: At_100uM_ABA_Mutants_cDNA_P Parameter: Treatment Value: 100uM ABA vs. No Treatment
  misc_feature: MA Experiment ID: 20000086 Result: Up-regulated in Transcription
  misc_feature: MA Experiment 20000086 PARAMETER Experiment Name: At_100uM_ABA_Mutants_cDNA_P Parameter: Plant Line Value: CS22
  misc_feature: MA Experiment 20000086 PARAMETER Experiment Name: At_100uM_ABA_Mutants_cDNA_P Parameter: Timepoint (hr) Value: 6
  misc_feature: MA Experiment 20000086 PARAMETER Experiment Name: At_100uM_ABA_Mutants_cDNA_P Parameter: Tissue Value: Aerial
  misc_feature: MA Experiment 20000086 PARAMETER Experiment Name: At_100uM_ABA_Mutants_cDNA_P Parameter: Treatment Value: 100uM ABA vs. No Treatment
  misc_feature: MA Experiment ID: 20000087 Result: Up-regulated in Transcription
  misc_feature: MA Experiment 20000087 PARAMETER Experiment Name: At_100uM_ABA_Mutants_cDNA_P Parameter: Plant Line Value: WS
  misc_feature: MA Experiment 20000087 PARAMETER Experiment Name: At_100uM_ABA_Mutants_cDNA_P Parameter: Timepoint (hr) Value: 6
  misc_feature: MA Experiment 20000087 PARAMETER Experiment Name: At_100uM_ABA_Mutants_cDNA_P Parameter: Tissue Value: Aerial
  misc_feature: MA Experiment 20000087 PARAMETER Experiment Name: At_100uM_ABA_Mutants_cDNA_P Parameter: Treatment Value: 100uM ABA vs. No Treatment
  misc_feature: MA Experiment ID: 20000093 Result: Up-regulated in Transcription
  misc_feature: MA Experiment 20000093 PARAMETER Experiment Name: At_42deg_Heat_cDNA_P Parameter: Temperature (deg C) Value: 42 vs. 22
  misc_feature: MA Experiment 20000093 PARAMETER Experiment Name: At_42deg_Heat_cDNA_P Parameter: Timepoint (hr) Value: 0.5
  misc_feature: MA Experiment 20000093 PARAMETER Experiment Name: At_42deg_Heat_cDNA_P Parameter: Tissue Value: Aerial
  misc_feature: MA Experiment ID: 20000112 Result: Up-regulated in Transcription
  misc_feature: MA Experiment 20000112 PARAMETER Experiment Name: At_42deg_Heat_cDNA_P Parameter: Temperature (deg C) Value: 42 vs. 22
  misc_feature: MA Experiment 20000112 PARAMETER Experiment Name: At_42deg_Heat_cDNA_P Parameter: Timepoint (hr) Value: 2
  misc_feature: MA Experiment 20000112 PARAMETER Experiment Name: At_42deg_Heat_cDNA_P Parameter: Tissue Value: Aerial
  misc_feature: MA Experiment ID: 20000144 Result: Up-regulated in Transcription
  misc_feature: MA Experiment 20000144 PARAMETER Experiment Name: At_42deg_Heat_cDNA_P Parameter: Temperature (deg C) Value: 42 vs. 22
  misc_feature: MA Experiment 20000144 PARAMETER Experiment Name: At_42deg_Heat_cDNA_P Parameter: Timepoint (hr) Value: 1
  misc_feature: MA Experiment 20000144 PARAMETER Experiment Name: At_42deg_Heat_cDNA_P Parameter: Tissue Value: Aerial
  misc_feature: MA Experiment ID: 20000166 Result: Down-regulated in Transcription
  misc_feature: MA Experiment 20000166 PARAMETER Experiment Name: At_100uM_ABA_P Parameter: Age (day) Value: 14
  misc_feature: MA Experiment 20000166 PARAMETER Experiment Name: At_100uM_ABA_P Parameter: Organism Value: A. thaliana
  misc_feature: MA Experiment 20000166 PARAMETER Experiment Name: At_100uM_ABA_P Parameter: Plant Line Value: WS
  misc_feature: MA Experiment 20000166 PARAMETER Experiment Name: At_100uM_ABA_P Parameter: Timepoint (hr) Value: 1
  misc_feature: MA Experiment 20000166 PARAMETER Experiment Name: At_100uM_ABA_P Parameter: Tissue Value: Aerial
  misc_feature: MA Experiment 20000166 PARAMETER Experiment Name: At_100uM_ABA_P Parameter: Treatment Value: 100uM ABA vs. No Treatment
  misc_feature: MA Experiment ID: 20000171 Result: Up-regulated in Transcription
  misc_feature: MA Experiment 20000171 PARAMETER Experiment Name: At_42deg_Heat_P Parameter: Age (day) Value: 14
  misc_feature: MA Experiment 20000171 PARAMETER Experiment Name: At_42deg_Heat_P Parameter: Organism Value: A. thaliana
  misc_feature: MA Experiment 20000171 PARAMETER Experiment Name: At_42deg_Heat_P Parameter: Plant Line Value: WS
  misc_feature: MA Experiment 20000171 PARAMETER Experiment Name: At_42deg_Heat_P Parameter: Temperature (deg C) Value: 42 vs. 22
  misc_feature: MA Experiment 20000171 PARAMETER Experiment Name: At_42deg_Heat_P Parameter: Timepoint (hr) Value: 1
  misc_feature: MA Experiment 20000171 PARAMETER Experiment Name: At_42deg_Heat_P Parameter: Tissue Value: Aerial
  misc_feature: MA Experiment ID: 20000173 Result: Up-regulated in Transcription
  misc_feature: MA Experiment 20000173 PARAMETER Experiment Name: At_42deg_Heat_P Parameter: Age (day) Value: 14
  misc_feature: MA Experiment 20000173 PARAMETER Experiment Name: At_42deg_Heat_P Parameter: Organism Value: A. thaliana
  misc_feature: MA Experiment 20000173 PARAMETER Experiment Name: At_42deg_Heat_P Parameter: Plant Line Value: WS
  misc_feature: MA Experiment 20000173 PARAMETER Experiment Name: At_42deg_Heat_P Parameter: Temperature (deg C) Value: 42 vs. 22
  misc_feature: MA Experiment 20000173 PARAMETER Experiment Name: At_42deg_Heat_P Parameter: Timepoint (hr) Value: 6
  misc_feature: MA Experiment 20000173 PARAMETER Experiment Name: At_42deg_Heat_P Parameter: Tissue Value: Aerial
  misc_feature: MA Experiment ID: 20000182 Result: Up-regulated in Transcription
  misc_feature: MA Experiment 20000182 PARAMETER Experiment Name: At_2mM_SA_P Parameter: Age (day) Value: 14
  misc_feature: MA Experiment 20000182 PARAMETER Experiment Name: At_2mM_SA_P Parameter: Organism Value: A. thaliana
  misc_feature: MA Experiment 20000182 PARAMETER Experiment Name: At_2mM_SA_P Parameter: Plant Line Value: WS
  misc_feature: MA Experiment 20000182 PARAMETER Experiment Name: At_2mM_SA_P Parameter: Timepoint (hr) Value: 6
  misc_feature: MA Experiment 20000182 PARAMETER Experiment Name: At_2mM_SA_P Parameter: Tissue Value: Aerial
  misc_feature: MA Experiment 20000182 PARAMETER Experiment Name: At_2mM_SA_P Parameter: Treatment Value: 2mM SA vs. No Treatment
  misc_feature: MA Experiment ID: 20000213 Result: Up-regulated in Transcription
  misc_feature: MA Experiment 20000213 PARAMETER Experiment Name: At_4deg_Cold_P Parameter: Timepoint (hr) Value: 2
  misc_feature: MA Experiment ID: 20000224 Result: Down-regulated in Transcription
  misc_feature: MA Experiment ID: 20000437 Result: Down-regulated in Transcription
  misc_feature: MA Experiment 20000437 PARAMETER Experiment Name: At_Drought_P Parameter: Age (day) Value: 8
  misc_feature: MA Experiment 20000437 PARAMETER Experiment Name: At_Drought_P Parameter: Organism Value: A. thaliana
  misc_feature: MA Experiment 20000437 PARAMETER Experiment Name: At_Drought_P Parameter: Plant Line Value: WS
  misc_feature: MA Experiment 20000437 PARAMETER Experiment Name: At_Drought_P Parameter: Timepoint (hr) Value: 24
  misc_feature: MA Experiment 20000437 PARAMETER Experiment Name: At_Drought_P Parameter: Tissue Value: Whole Plant
  misc_feature: MA Experiment 20000437 PARAMETER Experiment Name: At_Drought_P Parameter: Treatment Value: Drought vs. No Drought
  misc_feature: MA Experiment ID: 20000439 Result: Up-regulated in Transcription
  misc_feature: MA Experiment 20000439 PARAMETER Experiment Name: At_Roots__P Parameter: Age (day) Value: 14 vs. 21
  misc_feature: MA Experiment 20000439 PARAMETER Experiment Name: At_Roots__P Parameter: Organism Value: A. thaliana
  misc_feature: MA Experiment 20000439 PARAMETER Experiment Name: At_Roots__P Parameter: Tissue Value: Roots vs. Whole Plant
  misc_feature: MA Experiment ID: 20000452 Result: Down-regulated in Transcription
  misc_feature: MA Experiment 20000452 PARAMETER Experiment Name: At_CS6879_Shoots-Roots_P Parameter: Age (day) Value: 14
  misc_feature: MA Experiment 20000452 PARAMETER Experiment Name: At_CS6879_Shoots-Roots_P Parameter: Organism Value: A. thaliana
  misc_feature: MA Experiment 20000452 PARAMETER Experiment Name: At_CS6879_Shoots-Roots_P Parameter: Plant Line Value: CS6879 vs. WS
  misc_feature: MA Experiment 20000452 PARAMETER Experiment Name: At_CS6879_Shoots-Roots_P Parameter: Tissue Value: Shoots
  misc_feature: MA Experiment ID: 20000794 Result: Up-regulated in Transcription
  misc_feature: MA Experiment 20000794 PARAMETER Experiment Name: At_Petals_P Parameter: Age (day) Value: 23-25 days
  misc_feature: MA Experiment 20000794 PARAMETER Experiment Name: At_Petals_P Parameter: Plant Line Value: WS
  misc_feature: MA Experiment 20000794 PARAMETER Experiment Name: At_Petals_P Parameter: Tissue Value: Petals vs. Whole plant
  misc_feature: MA Experiment ID: 20001247 Result: Up-regulated in Transcription
  misc_feature: MA Experiment 20001247 PARAMETER Experiment Name: At_Far-red-induction_P Parameter: Age (day) Value: 7
  misc_feature: MA Experiment 20001247 PARAMETER Experiment Name: At_Far-red-induction_P Parameter: Light Value: Far-red vs. White
  misc_feature: MA Experiment 20001247 PARAMETER Experiment Name: At_Far-red-induction_P Parameter: Organism Value: A. thaliana
  misc_feature: MA Experiment 20001247 PARAMETER Experiment Name: At_Far-red-induction_P Parameter: Plant Line Value: Columbia
  misc_feature: MA Experiment 20001247 PARAMETER Experiment Name: At_Far-red-induction_P Parameter: Timepoint (hr) Value: 1
  misc_feature: MA Experiment 20001247 PARAMETER Experiment Name: At_Far-red-induction_P Parameter: Tissue Value: Whole Plant
  misc_feature: MA Experiment ID: 20001248 Result: Up-regulated in Transcription
  misc_feature: MA Experiment 20001248 PARAMETER Experiment Name: At_Far-red-induction_P Parameter: Age (day) Value: 7
  misc_feature: MA Experiment 20001248 PARAMETER Experiment Name: At_Far-red-induction_P Parameter: Light Value: Far-red vs. White
  misc_feature: MA Experiment 20001248 PARAMETER Experiment Name: At_Far-red-induction_P Parameter: Organism Value: A. thaliana
  misc_feature: MA Experiment 20001248 PARAMETER Experiment Name: At_Far-red-induction_P Parameter: Plant Line Value: Columbia
  misc_feature: MA Experiment 20001248 PARAMETER Experiment Name: At_Far-red-induction_P Parameter: Timepoint (hr) Value: 4
  misc_feature: MA Experiment 20001248 PARAMETER Experiment Name: At_Far-red-induction_P Parameter: Tissue Value: Whole Plant
  misc_feature: MA Experiment ID: 20001556 Result: Down-regulated in Transcription
  misc_feature: MA Experiment 20001556 PARAMETER Experiment Name: At_Drought_Soil_Dry_P Parameter: Age (day) Value: 26
  misc_feature: MA Experiment 20001556 PARAMETER Experiment Name: At_Drought_Soil_Dry_P Parameter: Organism Value: A. thaliana
  misc_feature: MA Experiment 20001556 PARAMETER Experiment Name: At_Drought_Soil_Dry_P Parameter: Plant Line Value: WS
  misc_feature: MA Experiment 20001556 PARAMETER Experiment Name: At_Drought_Soil_Dry_P Parameter: Post Timepoint (hr) Value: None
  misc_feature: MA Experiment 20001556 PARAMETER Experiment Name: At_Drought_Soil_Dry_P Parameter: Post-Treatment Value: None
  misc_feature: MA Experiment 20001556 PARAMETER Experiment Name: At_Drought_Soil_Dry_P Parameter: Timepoint (day) Value: 12
  misc_feature: MA Experiment 20001556 PARAMETER Experiment Name: At_Drought_Soil_Dry_P Parameter: Treatment Value: Drought vs. No Drought
  misc_feature: MA Experiment ID: 20001557 Result: Up-regulated in Transcription
  misc_feature: MA Experiment 20001557 PARAMETER Experiment Name: At_Drought_Soil_Dry_P Parameter: Age (day) Value: 27
  misc_feature: MA Experiment 20001557 PARAMETER Experiment Name: At_Drought_Soil_Dry_P Parameter: Organism Value: A. thaliana
  misc_feature: MA Experiment 20001557 PARAMETER Experiment Name: At_Drought_Soil_Dry_P Parameter: Plant Line Value: WS
  misc_feature: MA Experiment 20001557 PARAMETER Experiment Name: At_Drought_Soil_Dry_P Parameter: Post Timepoint (hr) Value: 3
  misc_feature: MA Experiment 20001557 PARAMETER Experiment Name: At_Drought_Soil_Dry_P Parameter: Post-Treatment Value: Re-Water vs. No Drought
  misc_feature: MA Experiment 20001557 PARAMETER Experiment Name: At_Drought_Soil_Dry_P Parameter: Timepoint (day) Value: 13
  misc_feature: MA Experiment 20001557 PARAMETER Experiment Name: At_Drought_Soil_Dry_P Parameter: Treatment Value: Drought vs. No Drought
  misc_feature: MA Experiment ID: 20001558 Result: Up-regulated in Transcription
  misc_feature: MA Experiment 20001558 PARAMETER Experiment Name: At_Drought_Soil_Dry_P Parameter: Age (day) Value: 27
  misc_feature: MA Experiment 20001558 PARAMETER Experiment Name: At_Drought_Soil_Dry_P Parameter: Organism Value: A. thaliana
  misc_feature: MA Experiment 20001558 PARAMETER Experiment Name: At_Drought_Soil_Dry_P Parameter: Plant Line Value: WS
  misc_feature: MA Experiment 20001558 PARAMETER Experiment Name: At_Drought_Soil_Dry_P Parameter: Post Timepoint (hr) Value: 6
  misc_feature: MA Experiment 20001558 PARAMETER Experiment Name: At_Drought_Soil_Dry_P Parameter: Post-Treatment Value: Re-Water vs. No Drought
  misc_feature: MA Experiment 20001558 PARAMETER Experiment Name: At_Drought_Soil_Dry_P Parameter: Timepoint (day) Value: 13
  misc_feature: MA Experiment 20001558 PARAMETER Experiment Name: At_Drought_Soil_Dry_P Parameter: Treatment Value: Drought vs. No Drought

SEQ ID NO: 31951 - protein, 145 aa, Arabidopsis thaliana; identical to SEQ ID NO: 28361
  peptide (1)..(145): Ceres Seq. ID no. 12322233
  misc_feature (79)..(101): Pfam Name: Zinc finger, C2H2 type Pfam Description: Zinc finger, C2H2 type
  misc_feature (5)..(141): Homolog of NCBI NO: 1418323 NR Description: zinc finger protein [Arabidopsis thaliana]
  misc_feature (5)..(141): Homolog of NCBI NO: 15217692 NR Description: salt-tolerance zinc finger protein
  misc_feature (5)..(141): Homolog of NCBI NO: 6693033 NR Description: T22C5.18 [Arabidopsis thaliana]
  misc_feature (5)..(141): Homolog of NCBI NO: 15239195 NR Description: Cys2/His2-type zinc finger protein 3
  misc_feature (5)..(141): Homolog of NCBI NO: 21618143 NR Description: Cys2/His2-type zinc finger protein 3 [Arabidopsis

SEQ ID NO: 31952 - protein, 141 aa, Arabidopsis thaliana; identical to SEQ ID NO: 28362
  peptide (1)..(141): Ceres Seq. ID no. 12322234
  misc_feature (75)..(97): Pfam Name: Zinc finger, C2H2 type Pfam Description: Zinc finger, C2H2 type
  misc_feature (1)..(137): Homolog of NCBI NO: 1418323 NR Description: zinc finger protein [Arabidopsis thaliana]
  misc_feature (1)..(137): Homolog of NCBI NO: 15217692 NR Description: salt-tolerance zinc finger protein
  misc_feature (1)..(137): Homolog of NCBI NO: 6693033 NR Description: T22C5.18 [Arabidopsis thaliana]
  misc_feature (1)..(137): Homolog of NCBI NO: 15239195 NR Description: Cys2/His2-type zinc finger protein 3
  misc_feature (1)..(137): Homolog of NCBI NO: 21618143 NR Description: Cys2/His2-type zinc finger protein 3 [Arabidopsis

SEQ ID NO: 31953 - protein, 87 aa, Arabidopsis thaliana; identical to SEQ ID NO: 28363
  peptide (1)..(87): Ceres Seq. ID no. 12322235
  misc_feature (21)..(43): Pfam Name: Zinc finger, C2H2 type Pfam Description: Zinc finger, C2H2 type
  misc_feature (1)..(83): Homolog of NCBI NO: 1418323 NR Description: zinc finger protein [Arabidopsis thaliana]
  misc_feature (1)..(83): Homolog of NCBI NO: 15217692 NR Description: salt-tolerance zinc finger protein
  misc_feature (1)..(83): Homolog of NCBI NO: 6693033 NR Description: T22C5.18 [Arabidopsis thaliana]
  misc_feature (1)..(83): Homolog of NCBI NO: 15239195 NR Description: Cys2/His2-type zinc finger protein 3
  misc_feature (1)..(83): Homolog of NCBI NO: 21618143 NR Description: Cys2/His2-type zinc finger protein 3 [Arabidopsis

SEQ ID NO: 31954 - DNA, 678 bp, Arabidopsis thaliana; identical to SEQ ID NO: 28364
  misc_feature (1)..(678): Ceres Seq. ID no. 12396573
  misc_feature: MA Experiment ID: 108435 Result: Down-regulated in Transcription
  misc_feature: MA Experiment 108435 PARAMETER Experiment Name: At_stm_Mutants_cDNA_P Parameter: Plant Line Value: wt Landsburg vs stm
  misc_feature: MA Experiment 108435 PARAMETER Experiment Name: At_stm_Mutants_cDNA_P Parameter: Tissue Value: Shoot Apical Meristem Region
  misc_feature: MA Experiment ID: 108579 Result: Down-regulated in Transcription
  misc_feature: MA Experiment 108579 PARAMETER Experiment Name: At_4deg_Cold_cDNA_P Parameter: Temperature (deg C) Value: 4 vs. 22
  misc_feature: MA Experiment 108579 PARAMETER Experiment Name: At_4deg_Cold_cDNA_P Parameter: Timepoint (hr) Value: 6
  misc_feature: MA Experiment 108579 PARAMETER Experiment Name: At_4deg_Cold_cDNA_P Parameter: Tissue Value: Aerial
  misc_feature: MA Experiment ID: 108595 Result: Down-regulated in Transcription
  misc_feature: MA Experiment 108595 PARAMETER Experiment Name: At_Ler-pi_Ovule_cDNA_P Parameter: Plant Line Value: null
  misc_feature: MA Experiment ID: 20000111 Result: Down-regulated in Transcription
  misc_feature: MA Experiment 20000111 PARAMETER Experiment Name: At_42deg_Heat_cDNA_P Parameter: Temperature (deg C) Value: 42 vs. 22
  misc_feature: MA Experiment 20000111 PARAMETER Experiment Name: At_42deg_Heat_cDNA_P Parameter: Timepoint (hr) Value: 6
  misc_feature: MA Experiment 20000111 PARAMETER Experiment Name: At_42deg_Heat_cDNA_P Parameter: Tissue Value: Aerial
  misc_feature: MA Experiment ID: 20000173 Result: Down-regulated in Transcription
  misc_feature: MA Experiment 20000173 PARAMETER Experiment Name: At_42deg_Heat_P Parameter: Age (day) Value: 14
  misc_feature: MA Experiment 20000173 PARAMETER Experiment Name: At_42deg_Heat_P Parameter: Organism Value: A. thaliana
  misc_feature: MA Experiment 20000173 PARAMETER Experiment Name: At_42deg_Heat_P Parameter: Plant Line Value: WS
  misc_feature: MA Experiment 20000173 PARAMETER Experiment Name: At_42deg_Heat_P Parameter: Temperature (deg C) Value: 42 vs. 22
  misc_feature: MA Experiment 20000173 PARAMETER Experiment Name: At_42deg_Heat_P Parameter: Timepoint (hr) Value: 6
  misc_feature: MA Experiment 20000173 PARAMETER Experiment Name: At_42deg_Heat_P Parameter: Tissue Value: Aerial
  misc_feature: MA Experiment ID: 20000180 Result: Up-regulated in Transcription
  misc_feature: MA Experiment 20000180 PARAMETER Experiment Name: At_Germinating_Seeds_P Parameter: Age (hr) Value: 24 vs. 0
  misc_feature: MA Experiment 20000180 PARAMETER Experiment Name: At_Germinating_Seeds_P Parameter: Tissue Value: Germinating Seeds
  misc_feature: MA Experiment ID: 20000182 Result: Down-regulated in Transcription
  misc_feature: MA Experiment 20000182 PARAMETER Experiment Name: At_2mM_SA_P Parameter: Age (day) Value: 14
  misc_feature: MA Experiment 20000182 PARAMETER Experiment Name: At_2mM_SA_P Parameter: Organism Value: A. thaliana
  misc_feature: MA Experiment 20000182 PARAMETER Experiment Name: At_2mM_SA_P Parameter: Plant Line Value: WS
  misc_feature: MA Experiment 20000182 PARAMETER Experiment Name: At_2mM_SA_P Parameter: Timepoint (hr) Value: 6
  misc_feature: MA Experiment 20000182 PARAMETER Experiment Name: At_2mM_SA_P Parameter: Tissue Value: Aerial
  misc_feature: MA Experiment 20000182 PARAMETER Experiment Name: At_2mM_SA_P Parameter: Treatment Value: 2mM SA vs. No Treatment
  misc_feature: MA Experiment ID: 20000185 Result: Down-regulated in Transcription
  misc_feature: MA Experiment 20000185 PARAMETER Experiment Name: At_Roots__P Parameter: Age (day) Value: 7 vs. 21
  misc_feature: MA Experiment 20000185 PARAMETER Experiment Name: At_Roots__P Parameter: Organism Value: A. thaliana
  misc_feature: MA Experiment 20000185 PARAMETER Experiment Name: At_Roots__P Parameter: Tissue Value: Roots vs. Whole Plant
  misc_feature: MA Experiment ID: 20000224 Result: Down-regulated in Transcription
  misc_feature: MA Experiment ID: 20000227 Result: Down-regulated in Transcription
  misc_feature: MA Experiment 20000227 PARAMETER Experiment Name: At_Root-Tips-vs-Tops_P Parameter: Tissue Value: Root Tips vs. Root Tops
  misc_feature: MA Experiment ID: 20000234 Result: Up-regulated in Transcription
  misc_feature: MA Experiment 20000234 PARAMETER Experiment Name: At_Siliques_P Parameter: Age (day) Value: 21
  misc_feature: MA Experiment 20000234 PARAMETER Experiment Name: At_Siliques_P Parameter: Organism Value: A. thaliana
  misc_feature: MA Experiment 20000234 PARAMETER Experiment Name: At_Siliques_P Parameter: Plant Line Value: WS
  misc_feature: MA Experiment 20000234 PARAMETER Experiment Name: At_Siliques_P Parameter: Tissue Value: Less Than 5mm Siliques vs. Whole Plant
  misc_feature: MA Experiment ID: 20000235 Result: Up-regulated in Transcription
  misc_feature: MA Experiment 20000235 PARAMETER Experiment Name: At_Siliques_P Parameter: Age (day) Value: 21
  misc_feature: MA Experiment 20000235 PARAMETER Experiment Name: At_Siliques_P Parameter: Organism Value: A. thaliana
  misc_feature: MA Experiment 20000235 PARAMETER Experiment Name: At_Siliques_P Parameter: Plant Line Value: WS
  misc_feature: MA Experiment 20000235 PARAMETER Experiment Name: At_Siliques_P Parameter: Tissue Value: 5-10mm Siliques vs. Whole Plant
  misc_feature: MA Experiment ID: 20000265 Result: Up-regulated in Transcription
  misc_feature: MA Experiment 20000265 PARAMETER Experiment Name: At_Open_Flower_P Parameter: Age (day) Value: 21
  misc_feature: MA Experiment 20000265 PARAMETER Experiment Name: At_Open_Flower_P Parameter: Plant Line Value: WS
  misc_feature: MA Experiment 20000265 PARAMETER Experiment Name: At_Open_Flower_P Parameter: Tissue Value: Closed Flower vs. Whole Plant
  misc_feature: MA Experiment ID: 20000436 Result: Down-regulated in Transcription
  misc_feature: MA Experiment 20000436 PARAMETER Experiment Name: At_Drought_P Parameter: Age (day) Value: 7
  misc_feature: MA Experiment 20000436 PARAMETER Experiment Name: At_Drought_P Parameter: Organism Value: A. thaliana
  misc_feature: MA Experiment 20000436 PARAMETER Experiment Name: At_Drought_P Parameter: Plant Line Value: WS
  misc_feature: MA Experiment 20000436 PARAMETER Experiment Name: At_Drought_P Parameter: Timepoint (hr) Value: 12
  misc_feature: MA Experiment 20000436 PARAMETER Experiment Name: At_Drought_P Parameter: Tissue Value: Whole Plant
  misc_feature: MA Experiment 20000436 PARAMETER Experiment Name: At_Drought_P Parameter: Treatment Value: Drought vs. No Drought
  misc_feature: MA Experiment ID: 20000439 Result: Down-regulated in Transcription
  misc_feature: MA Experiment 20000439 PARAMETER Experiment Name: At_Roots__P Parameter: Age (day) Value: 14 vs. 21
  misc_feature: MA Experiment 20000439 PARAMETER Experiment Name: At_Roots__P Parameter: Organism Value: A. thaliana
  misc_feature: MA Experiment 20000439 PARAMETER Experiment Name: At_Roots__P Parameter: Tissue Value: Roots vs. Whole Plant
  misc_feature: MA Experiment ID: 20000451 Result: Down-regulated in Transcription
  misc_feature: MA Experiment 20000451 PARAMETER Experiment Name: At_CS6879_Shoots-Roots_P Parameter: Age (day) Value: 14
  misc_feature: MA Experiment 20000451 PARAMETER Experiment Name: At_CS6879_Shoots-Roots_P Parameter: Organism Value: A. thaliana
  misc_feature: MA Experiment 20000451 PARAMETER Experiment Name: At_CS6879_Shoots-Roots_P Parameter: Plant Line Value: CS6879 vs. WS
  misc_feature: MA Experiment 20000451 PARAMETER Experiment Name: At_CS6879_Shoots-Roots_P Parameter: Tissue Value: Roots
  misc_feature: MA Experiment ID: 20000573 Result: Up-regulated in Transcription
  misc_feature: MA Experiment 20000573 PARAMETER Experiment Name: At_100uM_ABA_Mutants__P Parameter: Organism Value: A. thaliana
  misc_feature: MA Experiment 20000573 PARAMETER Experiment Name: At_100uM_ABA_Mutants__P Parameter: Plant Line Value: CS22 vs. Ler wt
  misc_feature: MA Experiment 20000573 PARAMETER Experiment Name: At_100uM_ABA_Mutants__P Parameter: Timepoint (hr) Value: N/A
  misc_feature: MA Experiment 20000573 PARAMETER Experiment Name: At_100uM_ABA_Mutants__P Parameter: Tissue Value: Whole Plant
  misc_feature: MA Experiment 20000573 PARAMETER Experiment Name: At_100uM_ABA_Mutants__P Parameter: Treatment Value: None
  misc_feature: MA Experiment ID: 20000574 Result: Up-regulated in Transcription
  misc_feature: MA Experiment 20000574 PARAMETER Experiment Name: At_100uM_ABA_Mutants__P Parameter: Organism Value: A. thaliana
  misc_feature: MA Experiment 20000574 PARAMETER Experiment Name: At_100uM_ABA_Mutants__P Parameter: Plant Line Value: CS23 vs. Ler wt
  misc_feature: MA Experiment 20000574 PARAMETER Experiment Name: At_100uM_ABA_Mutants__P Parameter: Timepoint (hr) Value: N/A
  misc_feature: MA Experiment 20000574 PARAMETER Experiment Name: At_100uM_ABA_Mutants__P Parameter: Tissue Value: Whole Plant
  misc_feature: MA Experiment 20000574 PARAMETER Experiment Name: At_100uM_ABA_Mutants__P Parameter: Treatment Value: None
  misc_feature: MA Experiment ID: 20001451 Result: Up-regulated in Transcription
  misc_feature: MA Experiment 20001451 PARAMETER Experiment Name: At_Far-red-induction_P Parameter: Age (day) Value: 7
  misc_feature: MA Experiment 20001451 PARAMETER Experiment Name: At_Far-red-induction_P Parameter: Light Value: Far-red vs. White
  misc_feature: MA Experiment 20001451 PARAMETER Experiment Name: At_Far-red-induction_P Parameter: Organism Value: A. thaliana
  misc_feature: MA Experiment 20001451 PARAMETER Experiment Name: At_Far-red-induction_P Parameter: Plant Line Value: Columbia
  misc_feature: MA Experiment 20001451 PARAMETER Experiment Name: At_Far-red-induction_P Parameter: Timepoint (hr) Value: 24
  misc_feature: MA Experiment 20001451 PARAMETER Experiment Name: At_Far-red-induction_P Parameter: Tissue Value: Whole Plant
  misc_feature: MA Experiment ID: 20001757 Result: Up-regulated in Transcription
  misc_feature: MA Experiment 20001757 PARAMETER Experiment Name: At_50mM_NH4NO3_L-to-H_P Parameter: Timepoint (hr) Value: 6
  misc_feature: MA Experiment 20001757 PARAMETER Experiment Name: At_50mM_NH4NO3_L-to-H_P Parameter: Tissue Value: Leaf
  misc_feature: MA Experiment 20001757 PARAMETER Experiment Name: At_50mM_NH4NO3_L-to-H_P Parameter: Treatment Value: 50mM NH4NO3 vs 100mM Mannitol
  misc_feature: MA Experiment ID: 20001906 Result: Down-regulated in Transcription
  misc_feature: MA Experiment 20001906 PARAMETER Experiment Name: At_Drought_Reproduction_P Parameter: Age (day) Value: 35
  misc_feature: MA Experiment 20001906 PARAMETER Experiment Name: At_Drought_Reproduction_P Parameter: Organism Value: A. thaliana
  misc_feature: MA Experiment 20001906 PARAMETER Experiment Name: At_Drought_Reproduction_P Parameter: Plant Line Value: WS
  misc_feature: MA Experiment 20001906 PARAMETER Experiment Name: At_Drought_Reproduction_P Parameter: Timepoint (day) Value: 5
  misc_feature: MA Experiment 20001906 PARAMETER Experiment Name: At_Drought_Reproduction_P Parameter: Tissue Value: Siliques
  misc_feature: MA Experiment 20001906 PARAMETER Experiment Name: At_Drought_Reproduction_P Parameter: Treatment Value: Drought vs. No Drought

SEQ ID NO: 31955 - protein, 71 aa, Arabidopsis thaliana; identical to SEQ ID NO: 28365
  peptide (1)..(71): Ceres Seq. ID no. 12396574

SEQ ID NO: 31956 - protein, 50 aa, Arabidopsis thaliana; identical to SEQ ID NO: 28366
  peptide (1)..(50): Ceres Seq. ID no. 12396575

SEQ ID NO: 31957 - protein, 46 aa, Arabidopsis thaliana; identical to SEQ ID NO: 28367
  peptide (1)..(46): Ceres Seq. ID no. 12396576
  misc_feature (1)..(40): Homolog of NCBI NO: 22298826 NR Description: cytochrome c553 [Thermosynechococcus elongatus
  misc_feature (1)..(40): Homolog of NCBI NO: 23040173 NR Description: hypothetical protein [Trichodesmium erythraeum
  misc_feature (1)..(40): Homolog of NCBI NO: 20141074 NR Description: Cytochrome C6 precursor (Soluble cytochrome f)
  misc_feature (1)..(40): Homolog of NCBI NO: 22652035 NR Description: putative cytochrome c6-2 [Synechococcus sp. PCC
  misc_feature (1)..(40): Homolog of NCBI NO: 117923 NR Description: Cytochrome C6 (Soluble cytochrome f) (Cytochrome
  misc_feature (1)..(40): Homolog of NCBI NO: 37521549 NR Description: cytochrome c6 [Gloeobacter violaceus]
  misc_feature (1)..(46): Homolog of NCBI NO: 34393286 NR Description: cytochrome C6, chloroplast precursor-like protein
  misc_feature (1)..(46): Homolog of NCBI NO: 34899810 NR Description: putative c6 type cytochrome
  misc_feature (1)..(46): Homolog of NCBI NO: 10177496 NR Description: gene_id:K21C13.23~unknown protein [Arabidopsis
  misc_feature (1)..(46): Homolog of NCBI NO: 18422509 NR Description: expressed protein

SEQ ID NO: 31958 - DNA, 1746 bp, Arabidopsis thaliana; identical to SEQ ID NO: 28368
  misc_feature (1)..(1746): Ceres Seq. ID no. 12738795
  misc_feature: MA Experiment ID: 108461 Result: Up-regulated in Transcription
  misc_feature: MA Experiment 108461 PARAMETER Experiment Name: At_Germinating_Seeds_cDNA_P Parameter: Age (day) Value: 1 vs. 0
  misc_feature: MA Experiment 108461 PARAMETER Experiment Name: At_Germinating_Seeds_cDNA_P Parameter: Tissue Value: Germinating Seeds
  misc_feature: MA Experiment ID: 108462 Result: Up-regulated in Transcription
  misc_feature: MA Experiment 108462 PARAMETER Experiment Name: At_Germinating_Seeds_cDNA_P Parameter: Age (day) Value: 2 vs. 0
  misc_feature: MA Experiment 108462 PARAMETER Experiment Name: At_Germinating_Seeds_cDNA_P Parameter: Tissue Value: Germinating Seeds
  misc_feature: MA Experiment ID: 108501 Result: Up-regulated in Transcription
  misc_feature: MA Experiment 108501 PARAMETER Experiment Name: At_ap2_floral_buds_cDNA_P Parameter: Plant Line Value: ap2 (Ler.)
  misc_feature: MA Experiment 108501 PARAMETER Experiment Name: At_ap2_floral_buds_cDNA_P Parameter: Tissue Value: Closed Flower
  misc_feature: MA Experiment ID: 108569 Result: Up-regulated in Transcription
  misc_feature: MA Experiment 108569 PARAMETER Experiment Name: At_0.001%_MeJA__cDNA_P Parameter: Timepoint (hr) Value: 6
  misc_feature: MA Experiment 108569 PARAMETER Experiment Name: At_0.001%_MeJA__cDNA_P Parameter: Tissue Value: Aerial
  misc_feature: MA Experiment 108569 PARAMETER Experiment Name: At_0.001%_MeJA__cDNA_P Parameter: Treatment Value: 0.001% MeJA vs. No Treatment
  misc_feature: MA Experiment ID: 108573 Result: Up-regulated in Transcription
  misc_feature: MA Experiment 108573 PARAMETER Experiment Name: At_Drought_cDNA_P Parameter: Timepoint (hr) Value: 6
  misc_feature: MA Experiment 108573 PARAMETER Experiment Name: At_Drought_cDNA_P Parameter: Tissue Value: Aerial
  misc_feature: MA Experiment 108573 PARAMETER Experiment Name: At_Drought_cDNA_P Parameter: Treatment Value: Drought vs. No Drought
  misc_feature: MA Experiment ID: 108577 Result: Down-regulated in Transcription
  misc_feature: MA Experiment 108577 PARAMETER Experiment Name: At_42deg_Heat_cDNA_P Parameter: Temperature (deg C) Value: 42 vs. 22
  misc_feature: MA Experiment 108577 PARAMETER Experiment Name: At_42deg_Heat_cDNA_P Parameter: Timepoint (hr) Value: 6
  misc_feature: MA Experiment 108577 PARAMETER Experiment Name: At_42deg_Heat_cDNA_P Parameter: Tissue Value: Aerial
  misc_feature: MA Experiment ID: 108579 Result: Up-regulated in Transcription
  misc_feature: MA Experiment 108579 PARAMETER Experiment Name: At_4deg_Cold_cDNA_P Parameter: Temperature (deg C) Value: 4 vs. 22
  misc_feature: MA Experiment 108579 PARAMETER Experiment Name: At_4deg_Cold_cDNA_P Parameter: Timepoint (hr) Value: 6
  misc_feature: MA Experiment 108579 PARAMETER Experiment Name: At_4deg_Cold_cDNA_P Parameter: Tissue Value: Aerial
  misc_feature: MA Experiment ID: 20000113 Result: Down-regulated in Transcription
  misc_feature: MA Experiment 20000113 PARAMETER Experiment Name: At_42deg_Heat_cDNA_P Parameter: Temperature (deg C) Value: 42 vs. 22
  misc_feature: MA Experiment 20000113 PARAMETER Experiment Name: At_42deg_Heat_cDNA_P Parameter: Timepoint (hr) Value: 8
  misc_feature: MA Experiment 20000113 PARAMETER Experiment Name: At_42deg_Heat_cDNA_P Parameter: Tissue Value: Aerial
  misc_feature: MA Experiment ID: 20000173 Result: Down-regulated in Transcription
  misc_feature: MA Experiment 20000173 PARAMETER Experiment Name: At_42deg_Heat_P Parameter: Age (day) Value: 14
  misc_feature: MA Experiment 20000173 PARAMETER Experiment Name: At_42deg_Heat_P Parameter: Organism Value: A. thaliana
  misc_feature: MA Experiment 20000173 PARAMETER Experiment Name: At_42deg_Heat_P Parameter: Plant Line Value: WS
  misc_feature: MA Experiment 20000173 PARAMETER Experiment Name: At_42deg_Heat_P Parameter: Temperature (deg C) Value: 42 vs. 22
  misc_feature: MA Experiment 20000173 PARAMETER Experiment Name: At_42deg_Heat_P Parameter: Timepoint (hr) Value: 6
  misc_feature: MA Experiment 20000173 PARAMETER Experiment Name: At_42deg_Heat_P Parameter: Tissue Value: Aerial
  misc_feature: MA Experiment ID: 20000179 Result: Up-regulated in Transcription
  misc_feature: MA Experiment 20000179 PARAMETER Experiment Name: At_Germinating_Seeds_P Parameter: Age (hr) Value: 6 vs. 0
  misc_feature: MA Experiment 20000179 PARAMETER Experiment Name: At_Germinating_Seeds_P Parameter: Tissue Value: Germinating Seeds
  misc_feature: MA Experiment ID: 20000180 Result: Up-regulated in Transcription
  misc_feature: MA Experiment 20000180 PARAMETER Experiment Name: At_Germinating_Seeds_P Parameter: Age (hr) Value: 24 vs. 0
  misc_feature: MA Experiment 20000180 PARAMETER Experiment Name: At_Germinating_Seeds_P Parameter: Tissue Value: Germinating Seeds
  misc_feature: MA Experiment ID: 20000213 Result: Up-regulated in Transcription
  misc_feature: MA Experiment 20000213 PARAMETER Experiment Name: At_4deg_Cold_P Parameter: Timepoint (hr) Value: 2
  misc_feature: MA Experiment ID: 20000224 Result: Down-regulated in Transcription
  misc_feature: MA Experiment ID: 20000227 Result: Up-regulated in Transcription
  misc_feature: MA Experiment 20000227 PARAMETER Experiment Name: At_Root-Tips-vs-Tops_P Parameter: Tissue Value: Root Tips vs. Root Tops
  misc_feature: MA Experiment ID: 20000794 Result: Down-regulated in Transcription
  misc_feature: MA Experiment 20000794 PARAMETER Experiment Name: At_Petals_P Parameter: Age (day) Value: 23-25 days
  misc_feature: MA Experiment 20000794 PARAMETER Experiment Name: At_Petals_P Parameter: Plant Line Value: WS
  misc_feature: MA Experiment 20000794 PARAMETER Experiment Name: At_Petals_P Parameter: Tissue Value: Petals vs. Whole plant

SEQ ID NO: 31959 - protein, 480 aa, Arabidopsis thaliana; identical to SEQ ID NO: 28369
  peptide (1)..(480): Ceres Seq. ID no. 12738796
  misc_feature (2)..(200): Pfam Name: UDP-glucose/GDP-mannose dehydrogenase family, Pfam Description: UDP-glucose/GDP-mannose dehydrogenase family,
  misc_feature (1)..(480): Homolog of NCBI NO: 15242316 NR Description: UDP-glucose dehydrogenase-like protein
  misc_feature (1)..(478): Homolog of NCBI NO: 30102540 NR Description: At5g39320 [Arabidopsis thaliana]
  misc_feature (1)..(478): Homolog of NCBI NO: 15241704 NR Description: UDP-glucose dehydrogenase-like protein; protein
  misc_feature (1)..(480): Homolog of NCBI NO: 15983404 NR Description: AT3g29360/MUO10_6 [Arabidopsis thaliana]
  misc_feature (1)..(480): Homolog of NCBI NO: 15228687 NR Description: UDP-glucose dehydrogenase, putative
  misc_feature (1)..(480): Homolog of NCBI NO: 21618158 NR Description: UDP-glucose dehydrogenase, putative [Arabidopsis

SEQ ID NO: 31960 - protein, 464 aa, Arabidopsis thaliana; identical to SEQ ID NO: 28370
  peptide (1)..(464): Ceres Seq. ID no. 12738797
  misc_feature (1)..(184): Pfam Name: UDP-glucose/GDP-mannose dehydrogenase family, Pfam Description: UDP-glucose/GDP-mannose dehydrogenase family,
  misc_feature (1)..(464): Homolog of NCBI NO: 15242316 NR Description: UDP-glucose dehydrogenase-like protein
  misc_feature (1)..(462): Homolog of NCBI NO: 30102540 NR Description: At5g39320 [Arabidopsis thaliana]
  misc_feature (1)..(462): Homolog of NCBI NO: 15241704 NR Description: UDP-glucose dehydrogenase-like protein; protein
  misc_feature (1)..(464): Homolog of NCBI NO: 15983404 NR Description: AT3g29360/MUO10_6 [Arabidopsis thaliana]
  misc_feature (1)..(464): Homolog of NCBI NO: 15228687 NR Description: UDP-glucose dehydrogenase, putative
  misc_feature (1)..(464): Homolog of NCBI NO: 21618158 NR Description: UDP-glucose dehydrogenase, putative [Arabidopsis

SEQ ID NO: 31961 - protein, 369 aa, Arabidopsis thaliana; identical to SEQ ID NO: 28371
  peptide (1)..(369): Ceres Seq. ID no. 12738798
  misc_feature (1)..(89): Pfam Name: UDP-glucose/GDP-mannose dehydrogenase family, Pfam Description: UDP-glucose/GDP-mannose dehydrogenase family,
  misc_feature (1)..(369): Homolog of NCBI NO: 15242316 NR Description: UDP-glucose dehydrogenase-like protein
  misc_feature (1)..(367): Homolog of NCBI NO: 30102540 NR Description: At5g39320 [Arabidopsis thaliana]
  misc_feature (1)..(367): Homolog of NCBI NO: 15241704 NR Description: UDP-glucose dehydrogenase-like protein; protein
  misc_feature (1)..(369): Homolog of NCBI NO: 15983404 NR Description: AT3g29360/MUO10_6 [Arabidopsis thaliana]
  misc_feature (1)..(369): Homolog of NCBI NO: 15228687 NR Description: UDP-glucose dehydrogenase, putative
  misc_feature (1)..(369): Homolog of NCBI NO: 21618158 NR Description: UDP-glucose dehydrogenase, putative [Arabidopsis

SEQ ID NO: 31962 - DNA, 1084 bp, Arabidopsis thaliana; identical to SEQ ID NO: 28372
  misc_feature (1)..(1084): Ceres Seq. ID no. 13488418
  misc_feature: MA Experiment ID: 108464 Result: Up-regulated in Transcription
  misc_feature: MA Experiment 108464 PARAMETER Experiment Name: At_Germinating_Seeds_cDNA_P Parameter: Age (day) Value: 4 vs. 0
  misc_feature: MA Experiment 108464 PARAMETER Experiment Name: At_Germinating_Seeds_cDNA_P Parameter: Tissue Value: Germinating Seeds
  misc_feature: MA Experiment ID: 108473 Result: Up-regulated in Transcription
  misc_feature: MA Experiment 108473 PARAMETER Experiment Name: At_Drought_Flowers_cDNA_P Parameter: Timepoint (hr) Value: 7 d
  misc_feature: MA Experiment 108473 PARAMETER Experiment Name: At_Drought_Flowers_cDNA_P Parameter: Tissue Value: Flower
  misc_feature: MA Experiment 108473 PARAMETER Experiment Name: At_Drought_Flowers_cDNA_P Parameter: Treatment Value: Drought vs. No Drought
  misc_feature: MA Experiment ID: 108489 Result: Up-regulated in Transcription
  misc_feature: MA Experiment ID: 108501 Result: Down-regulated in Transcription
  misc_feature: MA Experiment 108501 PARAMETER Experiment Name: At_ap2_floral_buds_cDNA_P Parameter: Plant Line Value: ap2 (Ler.)
  misc_feature: MA Experiment 108501 PARAMETER Experiment Name: At_ap2_floral_buds_cDNA_P Parameter: Tissue Value: Closed Flower
  misc_feature: MA Experiment ID: 108572 Result: Up-regulated in Transcription
  misc_feature: MA Experiment 108572 PARAMETER Experiment Name: At_Drought_cDNA_P Parameter: Timepoint (hr) Value: 1
  misc_feature: MA Experiment 108572 PARAMETER Experiment Name: At_Drought_cDNA_P Parameter: Tissue Value: Aerial
  misc_feature: MA Experiment 108572 PARAMETER Experiment Name: At_Drought_cDNA_P Parameter: Treatment Value: Drought vs. No Drought
  misc_feature: MA Experiment ID: 108573 Result: Up-regulated in Transcription
  misc_feature: MA Experiment 108573 PARAMETER Experiment Name: At_Drought_cDNA_P Parameter: Timepoint (hr) Value: 6
  misc_feature: MA Experiment 108573 PARAMETER Experiment Name: At_Drought_cDNA_P Parameter: Tissue Value: Aerial
  misc_feature: MA Experiment 108573 PARAMETER Experiment Name: At_Drought_cDNA_P Parameter: Treatment Value: Drought vs. No Drought
  misc_feature: MA Experiment ID: 108574 Result: Down-regulated in Transcription
  misc_feature: MA Experiment 108574 PARAMETER Experiment Name: At_Wounding__cDNA_P Parameter: Timepoint (hr) Value: 1
  misc_feature: MA Experiment 108574 PARAMETER Experiment Name: At_Wounding__cDNA_P Parameter: Tissue Value: Aerial
  misc_feature: MA Experiment 108574 PARAMETER Experiment Name: At_Wounding__cDNA_P Parameter: Treatment Value: Wounding vs. No Wounding
  misc_feature: MA Experiment ID: 108594 Result: Up-regulated in Transcription
  misc_feature: MA Experiment 108594 PARAMETER Experiment Name: At_Ler-rhl_Root_cDNA_P Parameter: Plant Line Value: null
  misc_feature: MA Experiment ID: 20000068 Result: Down-regulated in Transcription
  misc_feature: MA Experiment ID: 20000112 Result: Up-regulated in Transcription
  misc_feature: MA Experiment 20000112 PARAMETER Experiment Name: At_42deg_Heat_cDNA_P Parameter: Temperature (deg C) Value: 42 vs. 22
  misc_feature: MA Experiment 20000112 PARAMETER Experiment Name: At_42deg_Heat_cDNA_P Parameter: Timepoint (hr) Value: 2
  misc_feature: MA Experiment 20000112 PARAMETER Experiment Name: At_42deg_Heat_cDNA_P Parameter: Tissue Value: Aerial
  misc_feature: MA Experiment ID: 20000224 Result: Down-regulated in Transcription
  misc_feature: MA Experiment ID: 20000227 Result: Down-regulated in Transcription
  misc_feature: MA Experiment 20000227 PARAMETER Experiment Name: At_Root-Tips-vs-Tops_P Parameter: Tissue Value: Root Tips vs. Root Tops
  misc_feature: MA Experiment ID: 20000234 Result: Down-regulated in Transcription
  misc_feature: MA Experiment 20000234 PARAMETER Experiment Name: At_Siliques_P Parameter: Age (day) Value: 21
  misc_feature: MA Experiment 20000234 PARAMETER Experiment Name: At_Siliques_P Parameter: Organism Value: A. thaliana
  misc_feature: MA Experiment 20000234 PARAMETER Experiment Name: At_Siliques_P Parameter: Plant Line Value: WS
  misc_feature: MA Experiment 20000234 PARAMETER Experiment Name: At_Siliques_P Parameter: Tissue Value: Less Than 5mm Siliques vs. Whole Plant
  misc_feature: MA Experiment ID: 20000264 Result: Down-regulated in Transcription
  misc_feature: MA Experiment 20000264 PARAMETER Experiment Name: At_Open_Flower_P Parameter: Age (day) Value: 21
  misc_feature: MA Experiment 20000264 PARAMETER Experiment Name: At_Open_Flower_P Parameter: Plant Line Value: WS
  misc_feature: MA Experiment 20000264 PARAMETER Experiment Name: At_Open_Flower_P Parameter: Tissue Value: Open Flower vs. Whole Plant
  misc_feature: MA Experiment ID: 20000265 Result: Down-regulated in Transcription
  misc_feature: MA Experiment 20000265 PARAMETER Experiment Name: At_Open_Flower_P Parameter: Age (day) Value: 21
  misc_feature: MA Experiment 20000265 PARAMETER Experiment Name: At_Open_Flower_P Parameter: Plant Line Value: WS
  misc_feature: MA Experiment 20000265 PARAMETER Experiment Name: At_Open_Flower_P Parameter: Tissue Value: Closed Flower vs. Whole Plant
  misc_feature: MA Experiment ID: 20000269 Result: Down-regulated in Transcription
  misc_feature: MA Experiment 20000269 PARAMETER Experiment Name: At_1mM_KNO3_L-vs-H_Roots_P Parameter: Age (day) Value: 7,10,12
  misc_feature: MA Experiment 20000269 PARAMETER Experiment Name: At_1mM_KNO3_L-vs-H_Roots_P Parameter: Organism Value: A. thaliana
  misc_feature: MA Experiment 20000269 PARAMETER Experiment Name: At_1mM_KNO3_L-vs-H_Roots_P Parameter: Plant Line Value: WS
  misc_feature: MA Experiment 20000269 PARAMETER Experiment Name: At_1mM_KNO3_L-vs-H_Roots_P Parameter: Timepoint (day) Value: 7,10,12
  misc_feature: MA Experiment 20000269 PARAMETER Experiment Name: At_1mM_KNO3_L-vs-H_Roots_P Parameter: Tissue Value: Roots
  misc_feature: MA Experiment 20000269 PARAMETER Experiment Name: At_1mM_KNO3_L-vs-H_Roots_P Parameter: Treatment Value: 1mM KNO3 vs. 50mM KNO3
  misc_feature: MA Experiment ID: 20000286 Result: Down-regulated in Transcription
  misc_feature: MA Experiment 20000286 PARAMETER Experiment Name: At_Open_Flower_P Parameter: Age (day) Value: 21
  misc_feature: MA Experiment 20000286 PARAMETER Experiment Name: At_Open_Flower_P Parameter: Plant Line Value: WS
  misc_feature: MA Experiment 20000286 PARAMETER Experiment Name: At_Open_Flower_P Parameter: Tissue Value: Half Open vs. Whole Plant
  misc_feature: MA Experiment ID: 20000439 Result: Down-regulated in Transcription
  misc_feature: MA Experiment 20000439 PARAMETER Experiment Name: At_Roots__P Parameter: Age (day) Value: 14 vs. 21
  misc_feature: MA Experiment 20000439 PARAMETER Experiment Name: At_Roots__P Parameter: Organism Value: A. thaliana
  misc_feature: MA Experiment 20000439 PARAMETER Experiment Name: At_Roots__P Parameter: Tissue Value: Roots vs. Whole Plant
  misc_feature: MA Experiment ID: 20000441 Result: Up-regulated in Transcription
  misc_feature: MA Experiment 20000441 PARAMETER Experiment Name: At_1uM_BR-BRZ__P Parameter: Tissue Value: Shoot Apices
  misc_feature: MA Experiment 20000441 PARAMETER Experiment Name: At_1uM_BR-BRZ__P Parameter: Treatment Value: 1uM BR vs. No Treatment
  misc_feature: MA Experiment ID: 20000443 Result: Up-regulated in Transcription
  misc_feature: MA Experiment 20000443 PARAMETER Experiment Name: At_1uM_BR-BRZ__P Parameter: Tissue Value: Shoot Apices
  misc_feature: MA Experiment 20000443 PARAMETER Experiment Name: At_1uM_BR-BRZ__P Parameter: Treatment Value: 1uM BRZ vs. No Treatment
  misc_feature: MA Experiment ID: 20000451 Result: Down-regulated in Transcription
  misc_feature: MA Experiment 20000451 PARAMETER Experiment Name: At_CS6879_Shoots-Roots_P Parameter: Age (day) Value: 14
  misc_feature: MA Experiment 20000451 PARAMETER Experiment Name: At_CS6879_Shoots-Roots_P Parameter: Organism Value: A. thaliana
  misc_feature: MA Experiment 20000451 PARAMETER Experiment Name: At_CS6879_Shoots-Roots_P Parameter: Plant Line Value: CS6879 vs. WS
  misc_feature: MA Experiment 20000451 PARAMETER Experiment Name: At_CS6879_Shoots-Roots_P Parameter: Tissue Value: Roots
  misc_feature: MA Experiment ID: 20000495 Result: Up-regulated in Transcription
  misc_feature: MA Experiment 20000495 PARAMETER Experiment Name: At_Guard_Cells_P Parameter: Harvest Date Value: 8/2/2002
  misc_feature: MA Experiment 20000495 PARAMETER Experiment Name: At_Guard_Cells_P Parameter: Organism Value: A. thaliana
  misc_feature: MA Experiment 20000495 PARAMETER Experiment Name: At_Guard_Cells_P Parameter: Tissue Value: Guard Cells vs. Leaves
  misc_feature: MA Experiment ID: 20000527 Result: Up-regulated in Transcription
  misc_feature: MA Experiment 20000527 PARAMETER Experiment Name: At_10percent_PEG_P Parameter: Age (day) Value: 20
  misc_feature: MA Experiment 20000527 PARAMETER Experiment Name: At_10percent_PEG_P Parameter: Organism Value: A. thaliana
  misc_feature: MA Experiment 20000527 PARAMETER Experiment Name: At_10percent_PEG_P Parameter: Plant Line Value: WS
  misc_feature: MA Experiment 20000527 PARAMETER Experiment Name: At_10percent_PEG_P Parameter: Timepoint (day) Value: 20
  misc_feature: MA Experiment 20000527 PARAMETER Experiment Name: At_10percent_PEG_P Parameter: Tissue Value: Whole Plant
  misc_feature: MA Experiment 20000527 PARAMETER Experiment Name: At_10percent_PEG_P Parameter: Treatment Value: 10percent PEG vs. No Treatment
  misc_feature: MA Experiment ID: 20000574 Result: Down-regulated in Transcription
  misc_feature: MA Experiment 20000574 PARAMETER Experiment Name: At_100uM_ABA_Mutants__P Parameter: Organism Value: A. thaliana
  misc_feature: MA Experiment 20000574 PARAMETER Experiment Name: At_100uM_ABA_Mutants__P Parameter: Plant Line Value: CS23 vs. Ler wt
  misc_feature: MA Experiment 20000574 PARAMETER Experiment Name: At_100uM_ABA_Mutants__P Parameter: Timepoint (hr) Value: N/A
  misc_feature: MA Experiment 20000574 PARAMETER Experiment Name: At_100uM_ABA_Mutants__P Parameter: Tissue Value: Whole Plant
  misc_feature: MA Experiment 20000574 PARAMETER Experiment Name: At_100uM_ABA_Mutants__P Parameter: Treatment Value: None
  misc_feature: MA Experiment ID: 20001248 Result: Up-regulated in Transcription
  misc_feature: MA Experiment 20001248 PARAMETER Experiment Name: At_Far-red-induction_P Parameter: Age (day) Value: 7
  misc_feature: MA Experiment 20001248 PARAMETER Experiment Name: At_Far-red-induction_P Parameter: Light Value: Far-red vs. White
  misc_feature: MA Experiment 20001248 PARAMETER Experiment Name: At_Far-red-induction_P Parameter: Organism Value: A. thaliana
  misc_feature: MA Experiment 20001248 PARAMETER Experiment Name: At_Far-red-induction_P Parameter: Plant Line Value: Columbia
  misc_feature: MA Experiment 20001248 PARAMETER Experiment Name: At_Far-red-induction_P Parameter: Timepoint (hr) Value: 4
  misc_feature: MA Experiment 20001248 PARAMETER Experiment Name: At_Far-red-induction_P Parameter: Tissue Value: Whole Plant
  misc_feature: MA Experiment ID: 20001450 Result: Up-regulated in Transcription
  misc_feature: MA Experiment 20001450 PARAMETER Experiment Name: At_Far-red-induction_P Parameter: Age (day) Value: 7
  misc_feature: MA Experiment 20001450 PARAMETER Experiment Name: At_Far-red-induction_P Parameter: Light Value: Far-red vs. White
  misc_feature: MA Experiment 20001450 PARAMETER Experiment Name: At_Far-red-induction_P Parameter: Organism Value: A. thaliana
  misc_feature: MA Experiment 20001450 PARAMETER Experiment Name: At_Far-red-induction_P Parameter: Plant Line Value: Columbia
  misc_feature: MA Experiment 20001450 PARAMETER Experiment Name: At_Far-red-induction_P Parameter: Timepoint (hr) Value: 8
  misc_feature: MA Experiment 20001450 PARAMETER Experiment Name: At_Far-red-induction_P Parameter: Tissue Value: Whole Plant
  misc_feature: MA Experiment ID: 20001451 Result: Up-regulated in Transcription
  misc_feature: MA Experiment 20001451 PARAMETER Experiment Name: At_Far-red-induction_P Parameter: Age (day) Value: 7
  misc_feature: MA Experiment 20001451 PARAMETER Experiment Name: At_Far-red-induction_P Parameter: Light Value: Far-red vs. White
  misc_feature: MA Experiment 20001451 PARAMETER Experiment Name: At_Far-red-induction_P Parameter: Organism Value: A. thaliana
  misc_feature: MA Experiment 20001451 PARAMETER Experiment Name: At_Far-red-induction_P Parameter: Plant Line Value: Columbia
  misc_feature: MA Experiment 20001451 PARAMETER Experiment Name: At_Far-red-induction_P Parameter: Timepoint (hr) Value: 24
  misc_feature: MA Experiment 20001451 PARAMETER Experiment Name: At_Far-red-induction_P Parameter: Tissue Value: Whole Plant
  misc_feature: MA Experiment ID: 20001757 Result: Up-regulated in Transcription
  misc_feature: MA Experiment 20001757 PARAMETER Experiment Name: At_50mM_NH4NO3_L-to-H_P Parameter: Timepoint (hr) Value: 6
  misc_feature: MA Experiment 20001757 PARAMETER Experiment Name: At_50mM_NH4NO3_L-to-H_P Parameter: Tissue Value: Leaf
  misc_feature: MA Experiment 20001757 PARAMETER Experiment Name: At_50mM_NH4NO3_L-to-H_P Parameter: Treatment Value: 50mM NH4NO3 vs 100mM Mannitol
  misc_feature: MA Experiment ID: 20001911 Result: Up-regulated in Transcription
  misc_feature: MA Experiment 20001911 PARAMETER Experiment Name: At_Drought_Reproduction_P Parameter: Age (day) Value: 40
  misc_feature: MA Experiment 20001911 PARAMETER Experiment Name: At_Drought_Reproduction_P Parameter: Organism Value: A. thaliana
  misc_feature: MA Experiment 20001911 PARAMETER Experiment Name: At_Drought_Reproduction_P Parameter: Plant Line Value: WS
  misc_feature: MA Experiment 20001911 PARAMETER Experiment Name: At_Drought_Reproduction_P Parameter: Timepoint (day) Value: 10
  misc_feature: MA Experiment 20001911 PARAMETER Experiment Name: At_Drought_Reproduction_P Parameter: Tissue Value: Flowers
  misc_feature: MA Experiment 20001911 PARAMETER Experiment Name: At_Drought_Reproduction_P Parameter: Treatment Value: Drought vs. No Drought

SEQ ID NO: 31963 - protein, 264 aa, Arabidopsis thaliana; identical to SEQ ID NO: 28373
  peptide (1)..(264): Ceres Seq. ID no. 13488419
  misc_feature (30)..(141): Homolog of NCBI NO: 15724184 NR Description: At2g24550/F25P17.15 [Arabidopsis thaliana]
  misc_feature (30)..(141): Homolog of NCBI NO: 25412223 NR Description: hypothetical protein At2g24550 [imported] -
  misc_feature (30)..(141): Homolog of NCBI NO: 18400574 NR Description: expressed protein [Arabidopsis thaliana]
  misc_feature (38)..(149): Homolog of NCBI NO: 28393161 NR Description: unknown protein [Arabidopsis thaliana]
  misc_feature (38)..(149): Homolog of NCBI NO: 15238642 NR Description: expressed protein [Arabidopsis thaliana]
  misc_feature (30)..(136): Homolog of NCBI NO: 34905120 NR Description: P0686C03.43 [Oryza sativa (japonica
  misc_feature (37)..(156): Homolog of NCBI NO: 15229793 NR Description: hypothetical protein [Arabidopsis thaliana]
  misc_feature (24)..(228): Homolog of NCBI NO: 9294810 NR Description: MTD1 [Medicago truncatula]
  misc_feature (170)..(264): Homolog of NCBI NO: 26451772 NR Description: unknown protein [Arabidopsis thaliana]
  misc_feature (1)..(264): Homolog of NCBI NO: 22326936 NR Description: expressed protein [Arabidopsis thaliana]

SEQ ID NO: 31964 - protein, 246 aa, Arabidopsis thaliana; identical to SEQ ID NO: 28374
  peptide (1)..(246): Ceres Seq. ID no. 13488420
  misc_feature (12)..(123): Homolog of NCBI NO: 15724184 NR Description: At2g24550/F25P17.15 [Arabidopsis thaliana]
  misc_feature (12)..(123): Homolog of NCBI NO: 25412223 NR Description: hypothetical protein At2g24550 [imported] -
  misc_feature (12)..(123): Homolog of NCBI NO: 18400574 NR Description: expressed protein [Arabidopsis thaliana]
  misc_feature (20)..(131): Homolog of NCBI NO: 28393161 NR Description: unknown protein [Arabidopsis thaliana]
  misc_feature (20)..(131): Homolog of NCBI NO: 15238642 NR Description: expressed protein [Arabidopsis thaliana]
  misc_feature (12)..(118): Homolog of NCBI NO: 34905120 NR Description: P0686C03.43 [Oryza sativa (japonica
  misc_feature (19)..(138): Homolog of NCBI NO: 15229793 NR Description: hypothetical protein [Arabidopsis thaliana]
  misc_feature (6)..(210): Homolog of NCBI NO: 9294810 NR Description: MTD1 [Medicago truncatula]
  misc_feature (152)..(246): Homolog of NCBI NO: 26451772 NR Description: unknown protein [Arabidopsis thaliana]
  misc_feature (1)..(246): Homolog of NCBI NO: 22326936 NR Description: expressed protein [Arabidopsis thaliana]

SEQ ID NO: 31965 - protein, 188 aa, Arabidopsis thaliana; identical to SEQ ID NO: 28375
  peptide (1)..(188): Ceres Seq. ID no. 13488421
  misc_feature (1)..(65): Homolog of NCBI NO: 15724184 NR Description: At2g24550/F25P17.15 [Arabidopsis thaliana]
  misc_feature (1)..(65): Homolog of NCBI NO: 25412223 NR Description: hypothetical protein At2g24550 [imported] -
  misc_feature (1)..(65): Homolog of NCBI NO: 18400574 NR Description: expressed protein [Arabidopsis thaliana]
  misc_feature (1)..(73): Homolog of NCBI NO: 28393161 NR Description: unknown protein [Arabidopsis thaliana]
  misc_feature (1)..(73): Homolog of NCBI NO: 15238642 NR Description: expressed protein [Arabidopsis thaliana]
  misc_feature (1)..(60): Homolog of NCBI NO: 34905120 NR Description: P0686C03.43 [Oryza sativa (japonica
  misc_feature (1)..(80): Homolog of NCBI NO: 15229793 NR Description: hypothetical protein [Arabidopsis thaliana]
  misc_feature (1)..(152): Homolog of NCBI NO: 9294810 NR Description: MTD1 [Medicago truncatula]
  misc_feature (94)..(188): Homolog of NCBI NO: 26451772 NR Description: unknown protein [Arabidopsis thaliana]
  misc_feature (1)..(188): Homolog of NCBI NO: 22326936 NR Description: expressed protein [Arabidopsis thaliana]

SEQ ID NO: 31966 - DNA, 810 bp, Arabidopsis thaliana; identical to SEQ ID NO: 28376
  misc_feature (1)..(810): Ceres Seq. ID no. 12343497
  misc_feature: MA Experiment ID: 108434 Result: Up-regulated in Transcription
  misc_feature: MA Experiment 108434 PARAMETER Experiment Name: At_Root_Tips_cDNA_P Parameter: Tissue Value: Root Tips
  misc_feature: MA Experiment ID: 108435 Result: Up-regulated in Transcription
  misc_feature: MA Experiment 108435 PARAMETER Experiment Name: At_stm_Mutants_cDNA_P Parameter: Plant Line Value: wt Landsburg vs stm
  misc_feature: MA Experiment 108435 PARAMETER Experiment Name: At_stm_Mutants_cDNA_P Parameter: Tissue Value: Shoot Apical Meristem Region
  misc_feature: MA Experiment ID: 108461 Result: Up-regulated in Transcription
  misc_feature: MA Experiment 108461 PARAMETER Experiment Name: At_Germinating_Seeds_cDNA_P Parameter: Age (day) Value: 1 vs. 0
  misc_feature: MA Experiment 108461 PARAMETER Experiment Name: At_Germinating_Seeds_cDNA_P Parameter: Tissue Value: Germinating Seeds
  misc_feature: MA Experiment ID: 20000144 Result: Down-regulated in Transcription
  misc_feature: MA Experiment 20000144 PARAMETER Experiment Name: At_42deg_Heat_cDNA_P Parameter: Temperature (deg C) Value: 42 vs. 22
  misc_feature: MA Experiment 20000144 PARAMETER Experiment Name: At_42deg_Heat_cDNA_P Parameter: Timepoint (hr) Value: 1
  misc_feature: MA Experiment 20000144 PARAMETER Experiment Name: At_42deg_Heat_cDNA_P Parameter: Tissue Value: Aerial
  misc_feature: MA Experiment ID: 20000171 Result: Down-regulated in Transcription
  misc_feature: MA Experiment 20000171 PARAMETER Experiment Name: At_42deg_Heat_P Parameter: Age (day) Value: 14
  misc_feature: MA Experiment 20000171 PARAMETER Experiment Name: At_42deg_Heat_P Parameter: Organism Value: A. thaliana
  misc_feature: MA Experiment 20000171 PARAMETER Experiment Name: At_42deg_Heat_P Parameter: Plant Line Value: WS
  misc_feature: MA Experiment 20000171 PARAMETER Experiment Name: At_42deg_Heat_P Parameter: Temperature (deg C) Value: 42 vs. 22
  misc_feature: MA Experiment 20000171 PARAMETER Experiment Name: At_42deg_Heat_P Parameter: Timepoint (hr) Value: 1
  misc_feature: MA Experiment 20000171 PARAMETER Experiment Name: At_42deg_Heat_P Parameter: Tissue Value: Aerial
  misc_feature: MA Experiment ID: 20000173 Result: Down-regulated in Transcription
  misc_feature: MA Experiment 20000173 PARAMETER Experiment Name: At_42deg_Heat_P Parameter: Age (day) Value: 14
  misc_feature: MA Experiment 20000173 PARAMETER Experiment Name: At_42deg_Heat_P Parameter: Organism Value: A. thaliana
  misc_feature: MA Experiment 20000173 PARAMETER Experiment Name: At_42deg_Heat_P Parameter: Plant Line Value: WS
  misc_feature: MA Experiment 20000173 PARAMETER Experiment Name: At_42deg_Heat_P Parameter: Temperature (deg C) Value: 42 vs. 22
  misc_feature: MA Experiment 20000173 PARAMETER Experiment Name: At_42deg_Heat_P Parameter: Timepoint (hr) Value: 6
  misc_feature: MA Experiment 20000173 PARAMETER Experiment Name: At_42deg_Heat_P Parameter: Tissue Value: Aerial
  misc_feature: MA Experiment ID: 20000234 Result: Up-regulated in Transcription
  misc_feature: MA Experiment 20000234 PARAMETER Experiment Name: At_Siliques_P Parameter: Age (day) Value: 21
  misc_feature: MA Experiment 20000234 PARAMETER Experiment Name: At_Siliques_P Parameter: Organism Value: A. thaliana
  misc_feature: MA Experiment 20000234 PARAMETER Experiment Name: At_Siliques_P Parameter: Plant Line Value: WS
  misc_feature: MA Experiment 20000234 PARAMETER Experiment Name: At_Siliques_P Parameter: Tissue Value: Less Than 5mm Siliques vs. Whole Plant
  misc_feature: MA Experiment ID: 20000264 Result: Up-regulated in Transcription
  misc_feature: MA Experiment 20000264 PARAMETER Experiment Name: At_Open_Flower_P Parameter: Age (day) Value: 21
  misc_feature: MA Experiment 20000264 PARAMETER Experiment Name: At_Open_Flower_P Parameter: Plant Line Value: WS
  misc_feature: MA Experiment 20000264 PARAMETER Experiment Name: At_Open_Flower_P Parameter: Tissue Value: Open Flower vs. Whole Plant
  misc_feature: MA Experiment ID: 20000265 Result: Up-regulated in Transcription
  misc_feature: MA Experiment 20000265 PARAMETER Experiment Name: At_Open_Flower_P Parameter: Age (day) Value: 21
  misc_feature: MA Experiment 20000265 PARAMETER Experiment Name: At_Open_Flower_P Parameter: Plant Line Value: WS
  misc_feature: MA Experiment 20000265 PARAMETER Experiment Name: At_Open_Flower_P Parameter: Tissue Value: Closed Flower vs. Whole Plant
  misc_feature: MA Experiment ID: 20000437 Result: Down-regulated in Transcription
  misc_feature: MA Experiment 20000437 PARAMETER Experiment Name: At_Drought_P Parameter: Age (day) Value: 8
  misc_feature: MA Experiment 20000437 PARAMETER Experiment Name: At_Drought_P Parameter: Organism Value: A. thaliana
  misc_feature: MA Experiment 20000437 PARAMETER Experiment Name: At_Drought_P Parameter: Plant Line Value: WS
  misc_feature: MA Experiment 20000437 PARAMETER Experiment Name: At_Drought_P Parameter: Timepoint (hr) Value: 24
  misc_feature: MA Experiment 20000437 PARAMETER Experiment Name: At_Drought_P Parameter: Tissue Value: Whole Plant
  misc_feature: MA Experiment 20000437 PARAMETER Experiment Name: At_Drought_P Parameter: Treatment Value: Drought vs. No Drought
  misc_feature: MA Experiment ID: 20000495 Result: Up-regulated in Transcription
  misc_feature: MA Experiment 20000495 PARAMETER Experiment Name: At_Guard_Cells_P Parameter: Harvest Date Value: 8/2/2002
  misc_feature: MA Experiment 20000495 PARAMETER Experiment Name: At_Guard_Cells_P Parameter: Organism Value: A. thaliana
  misc_feature: MA Experiment 20000495 PARAMETER Experiment Name: At_Guard_Cells_P Parameter: Tissue Value: Guard Cells vs. Leaves
  misc_feature: MA Experiment ID: 20001450 Result: Down-regulated in Transcription
  misc_feature: MA Experiment 20001450 PARAMETER Experiment Name: At_Far-red-induction_P Parameter: Age (day) Value: 7
  misc_feature: MA Experiment 20001450 PARAMETER Experiment Name: At_Far-red-induction_P Parameter: Light Value: Far-red vs. White
  misc_feature: MA Experiment 20001450 PARAMETER Experiment Name: At_Far-red-induction_P Parameter: Organism Value: A. thaliana
  misc_feature: MA Experiment 20001450 PARAMETER Experiment Name: At_Far-red-induction_P Parameter: Plant Line Value: Columbia
  misc_feature: MA Experiment 20001450 PARAMETER Experiment Name: At_Far-red-induction_P Parameter: Timepoint (hr) Value: 8
  misc_feature: MA Experiment 20001450 PARAMETER Experiment Name: At_Far-red-induction_P Parameter: Tissue Value: Whole Plant
  misc_feature: MA Experiment ID: 20001451 Result: Down-regulated in Transcription
  misc_feature: MA Experiment 20001451 PARAMETER Experiment Name: At_Far-red-induction_P Parameter: Age (day) Value: 7
  misc_feature: MA Experiment 20001451 PARAMETER Experiment Name: At_Far-red-induction_P Parameter: Light Value: Far-red vs. White
  misc_feature: MA Experiment 20001451 PARAMETER Experiment Name: At_Far-red-induction_P Parameter: Organism Value: A. thaliana
  misc_feature: MA Experiment 20001451 PARAMETER Experiment Name: At_Far-red-induction_P Parameter: Plant Line Value: Columbia
  misc_feature: MA Experiment 20001451 PARAMETER Experiment Name: At_Far-red-induction_P Parameter: Timepoint (hr) Value: 24
  misc_feature: MA Experiment 20001451 PARAMETER Experiment Name: At_Far-red-induction_P Parameter: Tissue Value: Whole Plant
  misc_feature: MA Experiment ID: 20001560 Result: Up-regulated in Transcription
  misc_feature: MA Experiment 20001560 PARAMETER Experiment Name: At_Drought_Soil_Dry_P Parameter: Age (day) Value: 28
  misc_feature: MA Experiment 20001560 PARAMETER Experiment Name: At_Drought_Soil_Dry_P Parameter: Organism Value: A. thaliana
  misc_feature: MA Experiment 20001560 PARAMETER Experiment Name: At_Drought_Soil_Dry_P Parameter: Plant Line Value: WS
  misc_feature: MA Experiment 20001560 PARAMETER Experiment Name: At_Drought_Soil_Dry_P Parameter: Post Timepoint (hr) Value: None
  misc_feature: MA Experiment 20001560 PARAMETER Experiment Name: At_Drought_Soil_Dry_P Parameter: Post-Treatment Value: None
  misc_feature: MA Experiment 20001560 PARAMETER Experiment Name: At_Drought_Soil_Dry_P Parameter: Timepoint (day) Value: 14
  misc_feature: MA Experiment 20001560 PARAMETER Experiment Name: At_Drought_Soil_Dry_P Parameter: Treatment Value: Drought vs. No Drought
  misc_feature: MA Experiment ID: 20001911 Result: Down-regulated in Transcription
  misc_feature: MA Experiment 20001911 PARAMETER Experiment Name: At_Drought_Reproduction_P Parameter: Age (day) Value: 40
  misc_feature: MA Experiment 20001911 PARAMETER Experiment Name: At_Drought_Reproduction_P Parameter: Organism Value: A. thaliana
  misc_feature: MA Experiment 20001911 PARAMETER Experiment Name: At_Drought_Reproduction_P Parameter: Plant Line Value: WS
  misc_feature: MA Experiment 20001911 PARAMETER Experiment Name: At_Drought_Reproduction_P Parameter: Timepoint (day) Value: 10
  misc_feature: MA Experiment 20001911 PARAMETER Experiment Name: At_Drought_Reproduction_P Parameter: Tissue Value: Flowers
  misc_feature: MA Experiment 20001911 PARAMETER Experiment Name: At_Drought_Reproduction_P Parameter: Treatment Value: Drought vs. No Drought

SEQ ID NO: 31967 - protein, 180 aa, Arabidopsis thaliana; identical to SEQ ID NO: 28377
  peptide (1)..(180): Ceres Seq. ID no. 12343498
  misc_feature (20)..(176): Homolog of NCBI NO: 24663332 NR Description: vihar CG10682-PA
  misc_feature (8)..(176): Homolog of NCBI NO: 31216813 NR Description: ENSANGP00000020629 [Anopheles gambiae]
  misc_feature (28)..(176): Homolog of NCBI NO: 4388942 NR Description: E2-C, An Ubiquitin Conjugating Enzyme Required
  misc_feature (16)..(176): Homolog of NCBI NO: 3915196 NR Description: Ubiquitin-conjugating enzyme E2-C
  misc_feature (10)..(177): Homolog of NCBI NO: 34903234 NR Description: unnamed protein product [Oryza sativa (japonica
  misc_feature (1)..(180): Homolog of NCBI NO: 18402475 NR Description: E2, ubiquitin-conjugating enzyme, putative
  misc_feature (36)..(180): Homolog of NCBI NO: 9454557 NR Description: Putative ubiquitin carrier protein [Arabidopsis
  misc_feature (1)..(180): Homolog of NCBI NO: 25293673 NR Description: hypothetical protein F17J6.3 [imported] -
  misc_feature (1)..(180): Homolog of NCBI NO: 18403097 NR Description: E2, ubiquitin-conjugating enzyme, putative
  misc_feature (1)..(180): Homolog of NCBI NO: 21618179 NR Description: E2, ubiquitin-conjugating enzyme, putative

SEQ ID NO: 31968 - protein, 136 aa, Arabidopsis thaliana; identical to SEQ ID NO: 28378
  peptide (1)..(136): Ceres Seq. ID no. 12343499
  misc_feature (1)..(132): Homolog of NCBI NO: 24663332 NR Description: vihar CG10682-PA
  misc_feature (1)..(132): Homolog of NCBI NO: 31216813 NR Description: ENSANGP00000020629 [Anopheles gambiae]
  misc_feature (1)..(132): Homolog of NCBI NO: 4388942 NR Description: E2-C, An Ubiquitin Conjugating Enzyme Required
  misc_feature (1)..(132): Homolog of NCBI NO: 3915196 NR Description: Ubiquitin-conjugating enzyme E2-C
  misc_feature (1)..(133): Homolog of NCBI NO: 34903234 NR Description: unnamed protein product [Oryza sativa (japonica
  misc_feature (1)..(136): Homolog of NCBI NO: 18402475 NR Description: E2, ubiquitin-conjugating enzyme, putative
  misc_feature (1)..(136): Homolog of NCBI NO: 9454557 NR Description: Putative ubiquitin carrier protein [Arabidopsis
  misc_feature (1)..(136): Homolog of NCBI NO: 25293673 NR Description: hypothetical protein F17J6.3 [imported] -
  misc_feature (1)..(136): Homolog of NCBI NO: 18403097 NR Description: E2, ubiquitin-conjugating enzyme, putative
  misc_feature (1)..(136): Homolog of NCBI NO: 21618179 NR Description: E2, ubiquitin-conjugating enzyme, putative

SEQ ID NO: 31969 - protein, 133 aa, Arabidopsis thaliana; identical to SEQ ID NO: 28379
  peptide (1)..(133): Ceres Seq. ID no. 12343500
  misc_feature (1)..(129): Homolog of NCBI NO: 24663332 NR Description: vihar CG10682-PA
  misc_feature (1)..(129): Homolog of NCBI NO: 31216813 NR Description: ENSANGP00000020629 [Anopheles gambiae]
  misc_feature (1)..(129): Homolog of NCBI NO: 4388942 NR Description: E2-C, An Ubiquitin Conjugating Enzyme Required
  misc_feature (1)..(129): Homolog of NCBI NO: 3915196 NR Description: Ubiquitin-conjugating enzyme E2-C
  misc_feature (1)..(130): Homolog of NCBI NO: 34903234 NR Description: unnamed protein product [Oryza sativa (japonica
  misc_feature (1)..(133): Homolog of NCBI NO: 18402475 NR Description: E2, ubiquitin-conjugating enzyme, putative
  misc_feature (1)..(133): Homolog of NCBI NO: 9454557 NR Description: Putative ubiquitin carrier protein [Arabidopsis
  misc_feature (1)..(133): Homolog of NCBI NO: 25293673 NR Description: hypothetical protein F17J6.3 [imported] -
  misc_feature (1)..(133): Homolog of NCBI NO: 18403097 NR Description: E2, ubiquitin-conjugating enzyme, putative
  misc_feature (1)..(133): Homolog of NCBI NO: 21618179 NR Description: E2, ubiquitin-conjugating enzyme, putative

SEQ ID NO: 31970 - DNA, 1008 bp, Arabidopsis thaliana; identical to SEQ ID NO: 28380
  misc_feature (1)..(1008): Ceres Seq. ID no. 13496808
  misc_feature: MA Experiment ID: 108434 Result: Up-regulated in Transcription
  misc_feature: MA Experiment 108434 PARAMETER Experiment Name: At_Root_Tips_cDNA_P Parameter: Tissue Value: Root Tips
  misc_feature: MA Experiment ID: 108461 Result: Down-regulated in Transcription
  misc_feature: MA Experiment 108461 PARAMETER Experiment Name: At_Germinating_Seeds_cDNA_P Parameter: Age (day) Value: 1 vs. 0
  misc_feature: MA Experiment 108461 PARAMETER Experiment Name: At_Germinating_Seeds_cDNA_P Parameter: Tissue Value: Germinating Seeds
  misc_feature: MA Experiment ID: 108462 Result: Down-regulated in Transcription
  misc_feature: MA Experiment 108462 PARAMETER Experiment Name: At_Germinating_Seeds_cDNA_P Parameter: Age (day) Value: 2 vs. 0
  misc_feature: MA Experiment 108462 PARAMETER Experiment Name: At_Germinating_Seeds_cDNA_P Parameter: Tissue Value: Germinating Seeds
  misc_feature: MA Experiment ID: 108463 Result: Down-regulated in Transcription
  misc_feature: MA Experiment 108463 PARAMETER Experiment Name: At_Germinating_Seeds_cDNA_P Parameter: Age (day) Value: 3 vs. 0
  misc_feature: MA Experiment 108463 PARAMETER Experiment Name: At_Germinating_Seeds_cDNA_P Parameter: Tissue Value: Germinating Seeds
  misc_feature: MA Experiment ID: 108464 Result: Down-regulated in Transcription
  misc_feature: MA Experiment 108464 PARAMETER Experiment Name: At_Germinating_Seeds_cDNA_P Parameter: Age (day) Value: 4 vs. 0
  misc_feature: MA Experiment 108464 PARAMETER Experiment Name: At_Germinating_Seeds_cDNA_P Parameter: Tissue Value: Germinating Seeds
  misc_feature: MA Experiment ID: 20000179 Result: Down-regulated in Transcription
  misc_feature: MA Experiment 20000179 PARAMETER Experiment Name: At_Germinating_Seeds_P Parameter: Age (hr) Value: 6 vs. 0
  misc_feature: MA Experiment 20000179 PARAMETER Experiment Name: At_Germinating_Seeds_P Parameter: Tissue Value: Germinating Seeds

SEQ ID NO: 31971 - protein, 246 aa, Arabidopsis thaliana; identical to SEQ ID NO: 28381
  peptide (1)..(246): Ceres Seq. ID no. 13496809
  misc_feature (32)..(220): Pfam Name: Proteasome A-type and B-type Pfam Description: Proteasome A-type and B-type
  misc_feature (1)..(246): Homolog of NCBI NO: 15224993 NR Description: 20S proteasome alpha subunit A2 (PAA2)
  misc_feature (1)..(246): Homolog of NCBI NO: 3421070 NR Description: 20S proteasome subunit PAA1 [Arabidopsis thaliana]
  misc_feature (2)..(246): Homolog of NCBI NO: 2511588 NR Description: multicatalytic endopeptidase complex, proteasome
  misc_feature (1)..(246): Homolog of NCBI NO: 15238554 NR Description: 20S proteasome alpha subunit A1 (PAA1)
  misc_feature (1)..(246): Homolog of NCBI NO: 20260140 NR Description: multicatalytic endopeptidase complex alpha

SEQ ID NO: 31972 - protein, 138 aa, Arabidopsis thaliana; identical to SEQ ID NO: 28382
  peptide (1)..(138): Ceres Seq. ID no. 13496810
  misc_feature (1)..(112): Pfam Name: Proteasome A-type and B-type Pfam Description: Proteasome A-type and B-type
  misc_feature (1)..(138): Homolog of NCBI NO: 15224993 NR Description: 20S proteasome alpha subunit A2 (PAA2)
  misc_feature (1)..(138): Homolog of NCBI NO: 3421070 NR Description: 20S proteasome subunit PAA1 [Arabidopsis thaliana]
  misc_feature (1)..(138): Homolog of NCBI NO: 2511588 NR Description: multicatalytic endopeptidase complex, proteasome
  misc_feature (1)..(138): Homolog of NCBI NO: 15238554 NR Description: 20S proteasome alpha subunit A1 (PAA1)
  misc_feature (1)..(138): Homolog of NCBI NO: 20260140 NR Description: multicatalytic endopeptidase complex alpha

SEQ ID NO: 31973 - DNA, 772 bp, Arabidopsis thaliana; identical to SEQ ID NO: 28383
  misc_feature (1)..(772): Ceres Seq. ID no. 12394403
  misc_feature: MA Experiment ID: 108435 Result: Down-regulated in Transcription
  misc_feature: MA Experiment 108435 PARAMETER Experiment Name: At_stm_Mutants_cDNA_P Parameter: Plant Line Value: wt Landsburg vs stm
  misc_feature: MA Experiment 108435 PARAMETER Experiment Name: At_stm_Mutants_cDNA_P Parameter: Tissue Value: Shoot Apical Meristem Region
  misc_feature: MA Experiment ID: 108462 Result: Up-regulated in Transcription
  misc_feature: MA Experiment 108462 PARAMETER Experiment Name: At_Germinating_Seeds_cDNA_P Parameter: Age (day) Value: 2 vs. 0
  misc_feature: MA Experiment 108462 PARAMETER Experiment Name: At_Germinating_Seeds_cDNA_P Parameter: Tissue Value: Germinating Seeds
  misc_feature: MA Experiment ID: 108463 Result: Up-regulated in Transcription
  misc_feature: MA Experiment 108463 PARAMETER Experiment Name: At_Germinating_Seeds_cDNA_P Parameter: Age (day) Value: 3 vs. 0
  misc_feature: MA Experiment 108463 PARAMETER Experiment Name: At_Germinating_Seeds_cDNA_P Parameter: Tissue Value: Germinating Seeds
  misc_feature: MA Experiment ID: 108488 Result: Up-regulated in Transcription
  misc_feature: MA Experiment ID: 108489 Result: Down-regulated in Transcription
  misc_feature: MA Experiment ID: 108585 Result: Down-regulated in Transcription
  misc_feature: MA Experiment 108585 PARAMETER Experiment Name: At_5mM_NaNP_cDNA_P Parameter: Timepoint (hr) Value: 6
  misc_feature: MA Experiment 108585 PARAMETER Experiment Name: At_5mM_NaNP_cDNA_P Parameter: Tissue Value: Aerial
  misc_feature: MA Experiment 108585 PARAMETER Experiment Name: At_5mM_NaNP_cDNA_P Parameter: Treatment Value: null
  misc_feature: MA Experiment ID: 108594 Result: Down-regulated in Transcription
  misc_feature: MA Experiment 108594 PARAMETER Experiment Name: At_Ler-rhl_Root_cDNA_P Parameter: Plant Line Value: null
  misc_feature: MA Experiment ID: 108595 Result: Down-regulated in Transcription
  misc_feature: MA Experiment 108595 PARAMETER Experiment Name: At_Ler-pi_Ovule_cDNA_P Parameter: Plant Line Value: null
  misc_feature: MA Experiment ID: 20000184 Result: Up-regulated in Transcription
  misc_feature: MA Experiment 20000184 PARAMETER Experiment Name: At_Shoots__P Parameter: Age (day) Value: 7
  misc_feature: MA Experiment 20000184 PARAMETER Experiment Name: At_Shoots__P Parameter: Tissue Value: Shoots vs. Whole Plant
  misc_feature: MA Experiment ID: 20000224 Result: Down-regulated in Transcription
  misc_feature: MA Experiment ID: 20000438 Result: Up-regulated in Transcription
  misc_feature: MA Experiment 20000438 PARAMETER Experiment Name: At_Shoots__P Parameter: Age (day) Value: 14
  misc_feature: MA Experiment 20000438 PARAMETER Experiment Name: At_Shoots__P Parameter: Tissue Value: Shoots vs. Whole Plant
  misc_feature: MA Experiment ID: 20000439 Result: Down-regulated in Transcription
  misc_feature: MA Experiment 20000439 PARAMETER Experiment Name: At_Roots__P Parameter: Age (day) Value: 14 vs. 21
  misc_feature: MA Experiment 20000439 PARAMETER Experiment Name: At_Roots__P Parameter: Organism Value: A. thaliana
  misc_feature: MA Experiment 20000439 PARAMETER Experiment Name: At_Roots__P Parameter: Tissue Value: Roots vs. Whole Plant
  misc_feature: MA Experiment ID: 20000794 Result: Down-regulated in Transcription
  misc_feature: MA Experiment 20000794 PARAMETER Experiment Name: At_Petals_P Parameter: Age (day) Value: 23-25 days
  misc_feature: MA Experiment 20000794 PARAMETER Experiment Name: At_Petals_P Parameter: Plant Line Value: WS
  misc_feature: MA Experiment 20000794 PARAMETER Experiment Name: At_Petals_P Parameter: Tissue Value: Petals vs. Whole plant
  misc_feature: MA Experiment ID: 20001557 Result: Down-regulated in Transcription
  misc_feature: MA Experiment 20001557 PARAMETER Experiment Name: At_Drought_Soil_Dry_P Parameter: Age (day) Value: 27
  misc_feature: MA Experiment 20001557 PARAMETER Experiment Name: At_Drought_Soil_Dry_P Parameter: Organism Value: A. thaliana
  misc_feature: MA Experiment 20001557 PARAMETER Experiment Name: At_Drought_Soil_Dry_P Parameter: Plant Line Value: WS
  misc_feature: MA Experiment 20001557 PARAMETER Experiment Name: At_Drought_Soil_Dry_P Parameter: Post Timepoint (hr) Value: 3
  misc_feature: MA Experiment 20001557 PARAMETER Experiment Name: At_Drought_Soil_Dry_P Parameter: Post-Treatment Value: Re-Water vs. No Drought
  misc_feature: MA Experiment 20001557 PARAMETER Experiment Name: At_Drought_Soil_Dry_P Parameter: Timepoint (day) Value: 13
  misc_feature: MA Experiment 20001557 PARAMETER Experiment Name: At_Drought_Soil_Dry_P Parameter: Treatment Value: Drought vs. No Drought
  misc_feature: MA Experiment ID: 20001757 Result: Up-regulated in Transcription
  misc_feature: MA Experiment 20001757 PARAMETER Experiment Name: At_50mM_NH4NO3_L-to-H_P Parameter: Timepoint (hr) Value: 6
  misc_feature: MA Experiment 20001757 PARAMETER Experiment Name: At_50mM_NH4NO3_L-to-H_P Parameter: Tissue Value: Leaf
  misc_feature: MA Experiment 20001757 PARAMETER Experiment Name: At_50mM_NH4NO3_L-to-H_P Parameter: Treatment Value: 50mM NH4NO3 vs 100mM Mannitol

SEQ ID NO: 31974 - protein, 181 aa, Arabidopsis thaliana; identical to SEQ ID NO: 28384
  peptide (1)..(181): Ceres Seq. ID no. 12394404
  misc_feature (1)..(181): Homolog of NCBI NO: 15230505 NR Description: putative protein

SEQ ID NO: 31975 - DNA, 2336 bp, Arabidopsis thaliana; identical to SEQ ID NO: 28385
  misc_feature (1)..(2336): Ceres Seq. ID no. 13491856
  misc_feature: MA Experiment ID: 20000173 Result: Down-regulated in Transcription
  misc_feature: MA Experiment 20000173 PARAMETER Experiment Name: At_42deg_Heat_P Parameter: Age (day) Value: 14
  misc_feature: MA Experiment 20000173 PARAMETER Experiment Name: At_42deg_Heat_P Parameter: Organism Value: A. thaliana
  misc_feature: MA Experiment 20000173 PARAMETER Experiment Name: At_42deg_Heat_P Parameter: Plant Line Value: WS
  misc_feature: MA Experiment 20000173 PARAMETER Experiment Name: At_42deg_Heat_P Parameter: Temperature (deg C) Value: 42 vs. 22
  misc_feature: MA Experiment 20000173 PARAMETER Experiment Name: At_42deg_Heat_P Parameter: Timepoint (hr) Value: 6
  misc_feature: MA Experiment 20000173 PARAMETER Experiment Name: At_42deg_Heat_P Parameter: Tissue Value: Aerial

SEQ ID NO: 31976 - protein, 602 aa, Arabidopsis thaliana; identical to SEQ ID NO: 28386
  peptide (1)..(602): Ceres Seq. ID no. 13491857
  misc_feature (12)..(130): Pfam Name: Putative GTPase activating protein for Arf Pfam Description: Putative GTPase activating protein for Arf
  misc_feature (6)..(141): Homolog of NCBI NO: 38570132 NR Description: HIV-1 Rev binding protein
  misc_feature (6)..(141): Homolog of NCBI NO: 950051 NR Description: nucleoporin-like protein [Homo sapiens]
  misc_feature (6)..(141): Homolog of NCBI NO: 26325842 NR Description: unnamed protein product [Mus musculus]
  misc_feature (9)..(146): Homolog of NCBI NO: 28850338 NR Description: hypothetical protein [Dictyostelium discoideum]
  misc_feature (5)..(508): Homolog of NCBI NO: 15233867 NR Description: hypothetical protein [Arabidopsis thaliana]
  misc_feature (1)..(102): Homolog of NCBI NO: 7485983 NR Description: hypothetical protein F22O13.17 - Arabidopsis
  misc_feature (3)..(53): Homolog of NCBI NO: 9802557 NR Description: F22O13.16 [Arabidopsis thaliana]
  misc_feature (53)..(134): Homolog of NCBI NO: 9802557 NR Description: F22O13.16 [Arabidopsis thaliana]
  misc_feature (1)..(597): Homolog of NCBI NO: 30680774 NR Description: ARF GAP-like zinc finger-containing protein
  misc_feature (1)..(597): Homolog of NCBI NO: 30680768 NR Description: ARF GAP-like zinc finger-containing protein

SEQ ID NO: 31977 - protein, 537 aa, Arabidopsis thaliana; identical to SEQ ID NO: 28387
  peptide (1)..(537): Ceres Seq. ID no. 13491858
  misc_feature (1)..(65): Pfam Name: Putative GTPase activating protein for Arf Pfam Description: Putative GTPase activating protein for Arf
  misc_feature (1)..(67): Homolog of NCBI NO: 29245305 NR Description: GLP_333_15386_14190 [Giardia lamblia ATCC 50803]
  misc_feature (1)..(76): Homolog of NCBI NO: 38570132 NR Description: HIV-1 Rev binding protein
  misc_feature (1)..(76): Homolog of NCBI NO: 950051 NR Description: nucleoporin-like protein [Homo sapiens]
  misc_feature (1)..(76): Homolog of NCBI NO: 26325842 NR Description: unnamed protein product [Mus musculus]
  misc_feature (1)..(81): Homolog of NCBI NO: 28850338 NR Description: hypothetical protein [Dictyostelium discoideum]
  misc_feature (1)..(443): Homolog of NCBI NO: 15233867 NR Description: hypothetical protein [Arabidopsis thaliana]
  misc_feature (1)..(37): Homolog of NCBI NO: 7485983 NR Description: hypothetical protein F22O13.17 - Arabidopsis
  misc_feature (1)..(69): Homolog of NCBI NO: 9802557 NR Description: F22O13.16 [Arabidopsis thaliana]
  misc_feature (1)..(532): Homolog of NCBI NO: 30680774 NR Description: ARF GAP-like zinc finger-containing protein
  misc_feature (1)..(532): Homolog of NCBI NO: 30680768 NR Description: ARF GAP-like zinc finger-containing protein

SEQ ID NO: 31978 - protein, 336 aa, Arabidopsis thaliana; identical to SEQ ID NO: 28388
  peptide (1)..(336): Ceres Seq. ID no. 13491859
  misc_feature (1)..(251): Homolog of NCBI NO: 34909220 NR Description: putative ARF GAP-like zinc finger-containing
  misc_feature (1)..(237): Homolog of NCBI NO: 24651922 NR Description: CG8243-PA [Drosophila melanogaster]
  misc_feature (1)..(33): Homolog of NCBI NO: 16303736 NR Description: stromal membrane-associated protein SMAP1A [Homo
  misc_feature (1)..(37): Homolog of NCBI NO: 18423615 NR Description: ARF GAP-like zinc finger-containing protein
  misc_feature (1)..(37): Homolog of NCBI NO: 10441352 NR Description: ARF GAP-like zinc finger-containing protein ZIGA3
  misc_feature (1)..(37): Homolog of NCBI NO: 21618169 NR Description: ARF GAP-like zinc finger-containing protein ZIGA3
  misc_feature (1)..(104): Homolog of NCBI NO: 30039690 NR Description: RIKEN cDNA A630095P14
  misc_feature (1)..(242): Homolog of NCBI NO: 15233867 NR Description: hypothetical protein [Arabidopsis thaliana]
  misc_feature (1)..(331): Homolog of NCBI NO: 30680774 NR Description: ARF GAP-like zinc finger-containing protein
  misc_feature (1)..(331): Homolog of NCBI NO: 30680768 NR Description: ARF GAP-like zinc finger-containing protein

SEQ ID NO: 31979 - DNA, 750 bp, Arabidopsis thaliana; identical to SEQ ID NO: 28389
  misc_feature (1)..(750): Ceres Seq. ID no. 12394399
  misc_feature: MA Experiment ID: 108488 Result: Down-regulated in Transcription
  misc_feature: MA Experiment ID: 108561 Result: Up-regulated in Transcription
  misc_feature: MA Experiment 108561 PARAMETER Experiment Name: At_100uM_ABA_cDNA_P Parameter: Timepoint (hr) Value: 6
  misc_feature: MA Experiment 108561 PARAMETER Experiment Name: At_100uM_ABA_cDNA_P Parameter: Tissue Value: Aerial
  misc_feature: MA Experiment 108561 PARAMETER Experiment Name: At_100uM_ABA_cDNA_P Parameter: Treatment Value: 100uM ABA vs. No Treatment
  misc_feature: MA Experiment ID: 108573 Result: Up-regulated in Transcription
  misc_feature: MA Experiment 108573 PARAMETER Experiment Name: At_Drought_cDNA_P Parameter: Timepoint (hr) Value: 6
  misc_feature: MA Experiment 108573 PARAMETER Experiment Name: At_Drought_cDNA_P Parameter: Tissue Value: Aerial
  misc_feature: MA Experiment 108573 PARAMETER Experiment Name: At_Drought_cDNA_P Parameter: Treatment Value: Drought vs. No Drought
  misc_feature: MA Experiment ID: 108585 Result: Up-regulated in Transcription
  misc_feature: MA Experiment 108585 PARAMETER Experiment Name: At_5mM_NaNP_cDNA_P Parameter: Timepoint (hr) Value: 6
  misc_feature: MA Experiment 108585 PARAMETER Experiment Name: At_5mM_NaNP_cDNA_P Parameter: Tissue Value: Aerial
  misc_feature: MA Experiment 108585 PARAMETER Experiment Name: At_5mM_NaNP_cDNA_P Parameter: Treatment Value: null
  misc_feature: MA Experiment ID: 108605 Result: Up-regulated in Transcription
  misc_feature: MA Experiment 108605 PARAMETER Experiment Name: At_100uM_ABA_cDNA_P Parameter: Timepoint (hr) Value: 6
  misc_feature: MA Experiment 108605 PARAMETER Experiment Name: At_100uM_ABA_cDNA_P Parameter: Tissue Value: Aerial
  misc_feature: MA Experiment 108605 PARAMETER Experiment Name: At_100uM_ABA_cDNA_P Parameter: Treatment Value: 100uM ABA vs. No Treatment
  misc_feature: MA Experiment ID: 108607 Result: Up-regulated in Transcription
  misc_feature: MA Experiment 108607 PARAMETER Experiment Name: At_100uM_ABA_cDNA_P Parameter: Timepoint (hr) Value: 4
  misc_feature: MA Experiment 108607 PARAMETER Experiment Name: At_100uM_ABA_cDNA_P Parameter: Tissue Value: Aerial
  misc_feature: MA Experiment 108607 PARAMETER Experiment Name: At_100uM_ABA_cDNA_P Parameter: Treatment Value: 100uM ABA vs. No Treatment
  misc_feature: MA Experiment ID: 20000069 Result: Up-regulated in Transcription
  misc_feature: MA Experiment 20000069 PARAMETER Experiment Name: At_100uM_ABA_Mutants_cDNA_P Parameter: Plant Line Value: CS23
  misc_feature: MA Experiment 20000069 PARAMETER Experiment Name: At_100uM_ABA_Mutants_cDNA_P Parameter: Timepoint (hr) Value: 6
  misc_feature: MA Experiment 20000069 PARAMETER Experiment Name: At_100uM_ABA_Mutants_cDNA_P Parameter: Tissue Value: Aerial
  misc_feature: MA Experiment 20000069 PARAMETER Experiment Name: At_100uM_ABA_Mutants_cDNA_P Parameter: Treatment Value: 100uM ABA vs. No Treatment
  misc_feature: MA Experiment ID: 20000070 Result: Up-regulated in Transcription
  misc_feature: MA Experiment 20000070 PARAMETER Experiment Name: At_100uM_ABA_Mutants_cDNA_P Parameter: Plant Line Value: CS24
  misc_feature: MA Experiment 20000070 PARAMETER Experiment Name: At_100uM_ABA_Mutants_cDNA_P Parameter: Timepoint (hr) Value: 6
  misc_feature: MA Experiment 20000070 PARAMETER Experiment Name: At_100uM_ABA_Mutants_cDNA_P Parameter: Tissue Value: Aerial
  misc_feature: MA Experiment 20000070 PARAMETER Experiment Name: At_100uM_ABA_Mutants_cDNA_P Parameter: Treatment Value: 100uM ABA vs. No Treatment
  misc_feature: MA Experiment ID: 20000071 Result: Up-regulated in Transcription
  misc_feature: MA Experiment 20000071 PARAMETER Experiment Name: At_100uM_ABA_Mutants_cDNA_P Parameter: Plant Line Value: CS8104
  misc_feature: MA Experiment 20000071 PARAMETER Experiment Name: At_100uM_ABA_Mutants_cDNA_P Parameter: Timepoint (hr) Value: 6
  misc_feature: MA Experiment 20000071 PARAMETER Experiment Name: At_100uM_ABA_Mutants_cDNA_P Parameter: Tissue Value: Aerial
  misc_feature: MA Experiment 20000071 PARAMETER Experiment Name: At_100uM_ABA_Mutants_cDNA_P Parameter: Treatment Value: 100uM ABA vs. No Treatment
  misc_feature: MA Experiment ID: 20000072 Result: Up-regulated in Transcription
  misc_feature: MA Experiment 20000072 PARAMETER Experiment Name: At_100uM_ABA_Mutants_cDNA_P Parameter: Plant Line Value: CS8105
  misc_feature: MA Experiment 20000072 PARAMETER Experiment Name: At_100uM_ABA_Mutants_cDNA_P Parameter: Timepoint (hr) Value: 6
  misc_feature: MA Experiment 20000072 PARAMETER Experiment Name: At_100uM_ABA_Mutants_cDNA_P Parameter: Tissue Value: Aerial
  misc_feature: MA Experiment 20000072 PARAMETER Experiment Name: At_100uM_ABA_Mutants_cDNA_P Parameter: Treatment Value: 100uM ABA vs. No Treatment
  misc_feature: MA Experiment ID: 20000087 Result: Up-regulated in Transcription
  misc_feature: MA Experiment 20000087 PARAMETER Experiment Name: At_100uM_ABA_Mutants_cDNA_P Parameter: Plant Line Value: WS
  misc_feature: MA Experiment 20000087 PARAMETER Experiment Name: At_100uM_ABA_Mutants_cDNA_P Parameter: Timepoint (hr) Value: 6
  misc_feature: MA Experiment 20000087 PARAMETER Experiment Name: At_100uM_ABA_Mutants_cDNA_P Parameter: Tissue Value: Aerial
  misc_feature: MA Experiment 20000087 PARAMETER Experiment Name: At_100uM_ABA_Mutants_cDNA_P Parameter: Treatment Value: 100uM ABA vs. No Treatment
  misc_feature: MA Experiment ID: 20000117 Result: Up-regulated in Transcription
  misc_feature: MA Experiment 20000117 PARAMETER Experiment Name: At_100uM_ABA_Mutants_cDNA_P Parameter: Plant Line Value: Columbia
  misc_feature: MA Experiment 20000117 PARAMETER Experiment Name: At_100uM_ABA_Mutants_cDNA_P Parameter: Timepoint (hr) Value: 6
  misc_feature: MA Experiment 20000117 PARAMETER Experiment Name: At_100uM_ABA_Mutants_cDNA_P Parameter: Tissue Value: Aerial
  misc_feature: MA Experiment 20000117 PARAMETER Experiment Name: At_100uM_ABA_Mutants_cDNA_P Parameter: Treatment Value: 100uM ABA vs. No Treatment
  misc_feature: MA Experiment ID: 20000437 Result: Up-regulated in Transcription
  misc_feature: MA Experiment 20000437 PARAMETER Experiment Name: At_Drought_P Parameter: Age (day) Value: 8
  misc_feature: MA Experiment 20000437 PARAMETER Experiment Name: At_Drought_P Parameter: Organism Value: A. thaliana
  misc_feature: MA Experiment 20000437 PARAMETER Experiment Name: At_Drought_P Parameter: Plant Line Value: WS
  misc_feature: MA Experiment 20000437 PARAMETER Experiment Name: At_Drought_P Parameter: Timepoint (hr) Value: 24
  misc_feature: MA Experiment 20000437 PARAMETER Experiment Name: At_Drought_P Parameter: Tissue Value: Whole Plant
  misc_feature: MA Experiment 20000437 PARAMETER Experiment Name: At_Drought_P Parameter: Treatment Value: Drought vs. No Drought
  misc_feature: MA Experiment ID: 20000496 Result: Up-regulated in Transcription
  misc_feature: MA Experiment 20000496 PARAMETER Experiment Name: At_Guard_Cells_P Parameter: Harvest Date Value: 7/19/2002
  misc_feature: MA Experiment 20000496 PARAMETER Experiment Name: At_Guard_Cells_P Parameter: Organism Value: Canola
  misc_feature: MA Experiment 20000496 PARAMETER Experiment Name: At_Guard_Cells_P Parameter: Tissue Value: Guard Cells vs. Leaves
  misc_feature: MA Experiment ID: 20001906 Result: Up-regulated in Transcription
  misc_feature: MA Experiment 20001906 PARAMETER Experiment Name: At_Drought_Reproduction_P Parameter: Age (day) Value: 35
  misc_feature: MA Experiment 20001906 PARAMETER Experiment Name: At_Drought_Reproduction_P Parameter: Organism Value: A. thaliana
  misc_feature: MA Experiment 20001906 PARAMETER Experiment Name: At_Drought_Reproduction_P Parameter: Plant Line Value: WS
  misc_feature: MA Experiment 20001906 PARAMETER Experiment Name: At_Drought_Reproduction_P Parameter: Timepoint (day) Value: 5
  misc_feature: MA Experiment 20001906 PARAMETER Experiment Name: At_Drought_Reproduction_P Parameter: Tissue Value: Siliques
  misc_feature: MA Experiment 20001906 PARAMETER Experiment Name: At_Drought_Reproduction_P Parameter: Treatment Value: Drought vs. No Drought

SEQ ID NO: 31980 - protein, 148 aa, Arabidopsis thaliana; identical to SEQ ID NO: 28390
  peptide (1)..(148): Ceres Seq. ID no. 12394400
  misc_feature (1)..(148): Homolog of NCBI NO: 18408001 NR Description: E2, ubiquitin-conjugating enzyme, putative
  misc_feature (1)..(148): Homolog of NCBI NO: 456568 NR Description: ubiquitin conjugating enzyme
  misc_feature (1)..(148): Homolog of NCBI NO: 5762457 NR Description: ubiquitin-conjugating enzyme UBC2
  misc_feature (1)..(148): Homolog of NCBI NO: 18423829 NR Description: E2, ubiquitin-conjugating enzyme, putative

SEQ ID NO: 31981 - protein, 119 aa, Arabidopsis thaliana; identical to SEQ ID NO: 28391
  peptide (1)..(119): Ceres Seq. ID no. 12394401
  misc_feature (1)..(119): Homolog of NCBI NO: 18408001 NR Description: E2, ubiquitin-conjugating enzyme, putative
  misc_feature (1)..(119): Homolog of NCBI NO: 456568 NR Description: ubiquitin conjugating enzyme
  misc_feature (1)..(119): Homolog of NCBI NO: 5762457 NR Description: ubiquitin-conjugating enzyme UBC2
  misc_feature (1)..(119): Homolog of NCBI NO: 18423829 NR Description: E2, ubiquitin-conjugating enzyme, putative

SEQ ID NO: 31982 - protein, 116 aa, Arabidopsis thaliana; identical to SEQ ID NO: 28392
  peptide (1)..(116): Ceres Seq. ID no. 12394402

SEQ ID NO: 31983 - DNA, 964 bp, Arabidopsis thaliana; identical to SEQ ID NO: 22782
  misc_feature (1)..(964): Ceres Seq. ID no. 13509136
  misc_feature: MA Experiment ID: 108434 Result: Up-regulated in Transcription
  misc_feature: MA Experiment 108434 PARAMETER Experiment Name: At_Root_Tips_cDNA_P Parameter: Tissue Value: Root Tips
  misc_feature: MA Experiment ID: 108462 Result: Down-regulated in Transcription
  misc_feature: MA Experiment 108462 PARAMETER Experiment Name: At_Germinating_Seeds_cDNA_P Parameter: Age (day) Value: 2 vs. 0
  misc_feature: MA Experiment 108462 PARAMETER Experiment Name: At_Germinating_Seeds_cDNA_P Parameter: Tissue Value: Germinating Seeds
  misc_feature: MA Experiment ID: 108463 Result: Down-regulated in Transcription
  misc_feature: MA Experiment 108463 PARAMETER Experiment Name: At_Germinating_Seeds_cDNA_P Parameter: Age (day) Value: 3 vs. 0
  misc_feature: MA Experiment 108463 PARAMETER Experiment Name: At_Germinating_Seeds_cDNA_P Parameter: Tissue Value: Germinating Seeds
  misc_feature: MA Experiment ID: 108464 Result: Down-regulated in Transcription
  misc_feature: MA Experiment 108464 PARAMETER Experiment Name: At_Germinating_Seeds_cDNA_P Parameter: Age (day) Value: 4 vs. 0
  misc_feature: MA Experiment 108464 PARAMETER Experiment Name: At_Germinating_Seeds_cDNA_P Parameter: Tissue Value: Germinating Seeds
  misc_feature: MA Experiment ID: 108488 Result: Up-regulated in Transcription
  misc_feature: MA Experiment ID: 20000113 Result: Up-regulated in Transcription
  misc_feature: MA Experiment 20000113 PARAMETER Experiment Name: At_42deg_Heat_cDNA_P Parameter: Temperature (deg C) Value: 42 vs. 22
  misc_feature: MA Experiment 20000113 PARAMETER Experiment Name: At_42deg_Heat_cDNA_P Parameter: Timepoint (hr) Value: 8
  misc_feature: MA Experiment 20000113 PARAMETER Experiment Name: At_42deg_Heat_cDNA_P Parameter: Tissue Value: Aerial

SEQ ID NO: 31984 - protein, 233 aa, Arabidopsis thaliana; identical to SEQ ID NO: 22783
  peptide (1)..(233): Ceres Seq. ID no. 13509137
  misc_feature (126)..(233): Pfam Name: Ribosomal protein L6e Pfam Description: Ribosomal protein L6e
  misc_feature (126)..(233): Pfam Name: Ribosomal protein L6e Pfam Description: Ribosomal protein L6e
  misc_feature (4)..(61): Homolog of NCBI NO: 18088374 NR Description: Similar to ribosomal protein L6 [Homo sapiens]
  misc_feature (58)..(233): Homolog of NCBI NO: 18088374 NR Description: Similar to ribosomal protein L6 [Homo sapiens]
  misc_feature (49)..(233): Homolog of NCBI NO: 6012952 NR Description: 60S ribosomal protein L6 (YL 16 like) [Cyanophora
  misc_feature (16)..(233): Homolog of NCBI NO: 38344818 NR Description: OSJNBb0022F23.11 [Oryza sativa (japonica
  misc_feature (1)..(233): Homolog of NCBI NO: 7208784 NR Description: 60S ribosomal protein L6 [Cicer arietinum]
  misc_feature (4)..(61): Homolog of NCBI NO: 18088374 NR Description: Similar to ribosomal protein L6 [Homo sapiens]
  misc_feature (49)..(233): Homolog of NCBI NO: 6012952 NR Description: 60S ribosomal protein L6 (YL 16 like) [Cyanophora
  misc_feature (1)..(233): Homolog of NCBI NO: 7208784 NR Description: 60S ribosomal protein L6 [Cicer arietinum]
  misc_feature (1)..(233): Homolog of NCBI NO: 15221126 NR Description: 60S ribosomal protein L6 (RPL6C) [Arabidopsis
  misc_feature (1)..(233): Homolog of NCBI NO: 15221127 NR Description: 60S ribosomal protein L6 (RPL6B) [Arabidopsis
  misc_feature (1)..(233): Homolog of NCBI NO: 15221798 NR Description: 60S ribosomal protein L6 (RPL6A) [Arabidopsis
  misc_feature (1)..(233): Homolog of NCBI NO: 21593910 NR Description: 60S ribosomal protein L6, putative [Arabidopsis
  misc_feature (3)..(233): Homolog of NCBI NO: 464621 NR Description: 60S RIBOSOMAL PROTEIN L6 (YL16-LIKE)
  misc_feature (16)..(233): Homolog of NCBI NO: 38344818 NR Description: OSJNBb0022F23.11 [Oryza sativa (japonica
  misc_feature (58)..(233): Homolog of NCBI NO: 18088374 NR Description: Similar to ribosomal protein L6 [Homo sapiens]
  misc_feature (3)..(233): Homolog of NCBI NO: 464621 NR Description: 60S RIBOSOMAL PROTEIN L6 (YL16-LIKE)
  misc_feature (1)..(233): Homolog of NCBI NO: 21593910 NR Description: 60S ribosomal protein L6, putative [Arabidopsis
  misc_feature (1)..(233): Homolog of NCBI NO: 15221798 NR Description: 60S ribosomal protein L6 (RPL6A) [Arabidopsis
  misc_feature (1)..(233): Homolog of NCBI NO: 15221127 NR Description: 60S ribosomal protein L6 (RPL6B) [Arabidopsis
  misc_feature (1)..(233): Homolog of NCBI NO: 15221126 NR Description: 60S ribosomal protein L6 (RPL6C) [Arabidopsis

SEQ ID NO: 31985 - protein, 206 aa, Arabidopsis thaliana; identical to SEQ ID NO: 22784
  peptide (1)..(206): Ceres Seq. ID no. 13509138
  misc_feature (99)..(206): Pfam Name: Ribosomal protein L6e Pfam Description: Ribosomal protein L6e
  misc_feature (99)..(206): Pfam Name: Ribosomal protein L6e Pfam Description: Ribosomal protein L6e
  misc_feature (1)..(34): Homolog of NCBI NO: 18088374 NR Description: Similar to ribosomal protein L6 [Homo sapiens]
  misc_feature (31)..(206): Homolog of NCBI NO: 18088374 NR Description: Similar to ribosomal protein L6 [Homo sapiens]
  misc_feature (22)..(206): Homolog of NCBI NO: 6012952 NR Description: 60S ribosomal protein L6 (YL 16 like) [Cyanophora
  misc_feature (1)..(206): Homolog of NCBI NO: 38344818 NR Description: OSJNBb0022F23.11 [Oryza sativa (japonica
  misc_feature (1)..(206): Homolog of NCBI NO: 7208784 NR Description: 60S ribosomal protein L6 [Cicer arietinum]
  misc_feature (1)..(34): Homolog of NCBI NO: 18088374 NR Description: Similar to ribosomal protein L6 [Homo sapiens]
  misc_feature (22)..(206): Homolog of NCBI NO: 6012952 NR Description: 60S ribosomal protein L6 (YL 16 like) [Cyanophora
  misc_feature (1)..(206): Homolog of NCBI NO: 7208784 NR Description: 60S ribosomal protein L6 [Cicer arietinum]
  misc_feature (1)..(206): Homolog of NCBI NO: 15221126 NR Description: 60S ribosomal protein L6 (RPL6C) [Arabidopsis
  misc_feature (1)..(206): Homolog of NCBI NO: 15221127 NR Description: 60S ribosomal protein L6 (RPL6B) [Arabidopsis
  misc_feature (1)..(206): Homolog of NCBI NO: 15221798 NR Description: 60S ribosomal protein L6 (RPL6A) [Arabidopsis
  misc_feature (1)..(206): Homolog of NCBI NO: 21593910 NR Description: 60S ribosomal protein L6, putative [Arabidopsis
  misc_feature (1)..(206): Homolog of NCBI NO: 464621 NR Description: 60S RIBOSOMAL PROTEIN L6 (YL16-LIKE)
  misc_feature (1)..(206): Homolog of NCBI NO: 38344818 NR Description: OSJNBb0022F23.11 [Oryza sativa (japonica
  misc_feature (31)..(206): Homolog of NCBI NO: 18088374 NR Description: Similar to ribosomal protein L6 [Homo sapiens]
  misc_feature (1)..(206): Homolog of NCBI NO: 464621 NR Description: 60S RIBOSOMAL PROTEIN L6 (YL16-LIKE)
  misc_feature (1)..(206): Homolog of NCBI NO: 21593910 NR Description: 60S ribosomal protein L6, putative [Arabidopsis
  misc_feature (1)..(206): Homolog of NCBI NO: 15221798 NR Description: 60S ribosomal protein L6 (RPL6A) [Arabidopsis
  misc_feature (1)..(206): Homolog of NCBI NO: 15221127 NR Description: 60S ribosomal protein L6 (RPL6B) [Arabidopsis
  misc_feature (1)..(206): Homolog of NCBI NO: 15221126 NR Description: 60S ribosomal protein L6 (RPL6C) [Arabidopsis

SEQ ID NO: 31986 - DNA, 971 bp, Arabidopsis thaliana; identical to SEQ ID NO: 28396
  misc_feature (1)..(971): Ceres Seq. ID no. 12332975
  misc_feature: MA Experiment ID: 108462 Result: Down-regulated in Transcription
  misc_feature: MA Experiment 108462 PARAMETER Experiment Name: At_Germinating_Seeds_cDNA_P Parameter: Age (day) Value: 2 vs. 0
  misc_feature: MA Experiment 108462 PARAMETER Experiment Name: At_Germinating_Seeds_cDNA_P Parameter: Tissue Value: Germinating Seeds
  misc_feature: MA Experiment ID: 108463 Result: Down-regulated in Transcription
  misc_feature: MA Experiment 108463 PARAMETER Experiment Name: At_Germinating_Seeds_cDNA_P Parameter: Age (day) Value: 3 vs. 0
  misc_feature: MA Experiment 108463 PARAMETER Experiment Name: At_Germinating_Seeds_cDNA_P Parameter: Tissue Value: Germinating Seeds
  misc_feature: MA Experiment ID: 108501 Result: Down-regulated in Transcription
  misc_feature: MA Experiment 108501 PARAMETER Experiment Name: At_ap2_floral_buds_cDNA_P Parameter: Plant Line Value: ap2 (Ler.)
  misc_feature: MA Experiment 108501 PARAMETER Experiment Name: At_ap2_floral_buds_cDNA_P Parameter: Tissue Value: Closed Flower
  misc_feature: MA Experiment ID: 108585 Result: Down-regulated in Transcription
  misc_feature: MA Experiment 108585 PARAMETER Experiment Name: At_5mM_NaNP_cDNA_P Parameter: Timepoint (hr) Value: 6
  misc_feature: MA Experiment 108585 PARAMETER Experiment Name: At_5mM_NaNP_cDNA_P Parameter: Tissue Value: Aerial
  misc_feature: MA Experiment 108585 PARAMETER Experiment Name: At_5mM_NaNP_cDNA_P Parameter: Treatment Value: null
  misc_feature: MA Experiment ID: 20000173 Result: Down-regulated in Transcription
  misc_feature: MA Experiment 20000173 PARAMETER Experiment Name: At_42deg_Heat_P Parameter: Age (day) Value: 14
  misc_feature: MA Experiment 20000173 PARAMETER Experiment Name: At_42deg_Heat_P Parameter: Organism Value: A. thaliana
  misc_feature: MA Experiment 20000173 PARAMETER Experiment Name: At_42deg_Heat_P Parameter: Plant Line Value: WS
  misc_feature: MA Experiment 20000173 PARAMETER Experiment Name: At_42deg_Heat_P Parameter: Temperature (deg C) Value: 42 vs. 22
  misc_feature: MA Experiment 20000173 PARAMETER Experiment Name: At_42deg_Heat_P Parameter: Timepoint (hr) Value: 6
  misc_feature: MA Experiment 20000173 PARAMETER Experiment Name: At_42deg_Heat_P Parameter: Tissue Value: Aerial
  misc_feature: MA Experiment ID: 20000184 Result: Down-regulated in Transcription
  misc_feature: MA Experiment 20000184 PARAMETER Experiment Name: At_Shoots__P Parameter: Age (day) Value: 7
  misc_feature: MA Experiment 20000184 PARAMETER Experiment Name: At_Shoots__P Parameter: Tissue Value: Shoots vs. Whole Plant
  misc_feature: MA Experiment ID: 20000185 Result: Down-regulated in Transcription
  misc_feature: MA Experiment 20000185 PARAMETER Experiment Name: At_Roots__P Parameter: Age (day) Value: 7 vs. 21
  misc_feature: MA Experiment 20000185 PARAMETER Experiment Name: At_Roots__P Parameter: Organism Value: A. thaliana
  misc_feature: MA Experiment 20000185 PARAMETER Experiment Name: At_Roots__P Parameter: Tissue Value: Roots vs. Whole Plant
  misc_feature: MA Experiment ID: 20000234 Result: Down-regulated in Transcription
  misc_feature: MA Experiment 20000234 PARAMETER Experiment Name: At_Siliques_P Parameter: Age (day) Value: 21
  misc_feature: MA Experiment 20000234 PARAMETER Experiment Name: At_Siliques_P Parameter: Organism Value: A. thaliana
  misc_feature: MA Experiment 20000234 PARAMETER Experiment Name: At_Siliques_P Parameter: Plant Line Value: WS
  misc_feature: MA Experiment 20000234 PARAMETER Experiment Name: At_Siliques_P Parameter: Tissue Value: Less Than 5mm Siliques vs. Whole Plant
  misc_feature: MA Experiment ID: 20000235 Result: Down-regulated in Transcription
  misc_feature: MA Experiment 20000235 PARAMETER Experiment Name: At_Siliques_P Parameter: Age (day) Value: 21
  misc_feature: MA Experiment 20000235 PARAMETER Experiment Name: At_Siliques_P Parameter: Organism Value: A. thaliana
  misc_feature: MA Experiment 20000235 PARAMETER Experiment Name: At_Siliques_P Parameter: Plant Line Value: WS
  misc_feature: MA Experiment 20000235 PARAMETER Experiment Name: At_Siliques_P Parameter: Tissue Value: 5-10mm Siliques vs. Whole Plant
  misc_feature: MA Experiment ID: 20000265 Result: Up-regulated in Transcription
  misc_feature: MA Experiment 20000265 PARAMETER Experiment Name: At_Open_Flower_P Parameter: Age (day) Value: 21
  misc_feature: MA Experiment 20000265 PARAMETER Experiment Name: At_Open_Flower_P Parameter: Plant Line Value: WS
  misc_feature: MA Experiment 20000265 PARAMETER Experiment Name: At_Open_Flower_P Parameter: Tissue Value: Closed Flower vs. Whole Plant
  misc_feature: MA Experiment ID: 20000439 Result: Down-regulated in Transcription
  misc_feature: MA Experiment 20000439 PARAMETER Experiment Name: At_Roots__P Parameter: Age (day) Value: 14 vs. 21
  misc_feature: MA Experiment 20000439 PARAMETER Experiment Name: At_Roots__P Parameter: Organism Value: A. thaliana
  misc_feature: MA Experiment 20000439 PARAMETER Experiment Name: At_Roots__P Parameter: Tissue Value: Roots vs. Whole Plant
  misc_feature: MA Experiment ID: 20001247 Result: Down-regulated in Transcription
  misc_feature: MA Experiment 20001247 PARAMETER Experiment Name: At_Far-red-induction_P Parameter: Age (day) Value: 7
  misc_feature: MA Experiment 20001247 PARAMETER Experiment Name: At_Far-red-induction_P Parameter: Light Value: Far-red vs. White
  misc_feature: MA Experiment 20001247 PARAMETER Experiment Name: At_Far-red-induction_P Parameter: Organism Value: A. thaliana
  misc_feature: MA Experiment 20001247 PARAMETER Experiment Name: At_Far-red-induction_P Parameter: Plant Line Value: Columbia
  misc_feature: MA Experiment 20001247 PARAMETER Experiment Name: At_Far-red-induction_P Parameter: Timepoint (hr) Value: 1
  misc_feature: MA Experiment 20001247 PARAMETER Experiment Name: At_Far-red-induction_P Parameter: Tissue Value: Whole Plant
  misc_feature: MA Experiment ID: 20001556 Result: Up-regulated in Transcription
  misc_feature: MA Experiment 20001556 PARAMETER Experiment Name: At_Drought_Soil_Dry_P Parameter: Age (day) Value: 26
  misc_feature: MA Experiment 20001556 PARAMETER Experiment Name: At_Drought_Soil_Dry_P Parameter: Organism Value: A. thaliana
  misc_feature: MA Experiment 20001556 PARAMETER Experiment Name: At_Drought_Soil_Dry_P Parameter: Plant Line Value: WS
  misc_feature: MA Experiment 20001556 PARAMETER Experiment Name: At_Drought_Soil_Dry_P Parameter: Post Timepoint (hr) Value: None
  misc_feature: MA Experiment 20001556 PARAMETER Experiment Name: At_Drought_Soil_Dry_P Parameter: Post-Treatment Value: None
  misc_feature: MA Experiment 20001556 PARAMETER Experiment Name: At_Drought_Soil_Dry_P Parameter: Timepoint (day) Value: 12
  misc_feature: MA Experiment 20001556 PARAMETER Experiment Name: At_Drought_Soil_Dry_P Parameter: Treatment Value: Drought vs. No Drought
  misc_feature: MA Experiment ID: 20001910 Result: Down-regulated in Transcription
  misc_feature: MA Experiment 20001910 PARAMETER Experiment Name: At_Drought_Reproduction_P Parameter: Age (day) Value: 37
  misc_feature: MA Experiment 20001910 PARAMETER Experiment Name: At_Drought_Reproduction_P Parameter: Organism Value: A. thaliana
  misc_feature: MA Experiment 20001910 PARAMETER Experiment Name: At_Drought_Reproduction_P Parameter: Plant Line Value: WS
  misc_feature: MA Experiment 20001910 PARAMETER Experiment Name: At_Drought_Reproduction_P Parameter: Timepoint (day) Value: 7
  misc_feature: MA Experiment 20001910 PARAMETER Experiment Name: At_Drought_Reproduction_P Parameter: Tissue Value: Flowers
  misc_feature: MA Experiment 20001910 PARAMETER Experiment Name: At_Drought_Reproduction_P Parameter: Treatment Value: Drought vs. No Drought

SEQ ID NO: 31987 - protein, 291 aa, Arabidopsis thaliana; identical to SEQ ID NO: 28397
  peptide (1)..(291): Ceres Seq. ID no. 12332976
  misc_feature (15)..(283): Homolog of NCBI NO: 28868436 NR Description: oxidoreductase, short chain
  misc_feature (15)..(283): Homolog of NCBI NO: 23058177 NR Description: hypothetical protein [Pseudomonas fluorescens
  misc_feature (52)..(285): Homolog of NCBI NO: 38567881 NR Description: OSJNBa0036B21.7 [Oryza sativa (japonica
  misc_feature (10)..(122): Homolog of NCBI NO: 11358313 NR Description: hypothetical protein T31P16.40 - Arabidopsis
  misc_feature (113)..(286): Homolog of NCBI NO: 11358313 NR Description: hypothetical protein T31P16.40 - Arabidopsis
  misc_feature (10)..(286): Homolog of NCBI NO: 26453106 NR Description: unknown protein [Arabidopsis thaliana]
  misc_feature (10)..(286): Homolog of NCBI NO: 30682984 NR Description: short-chain dehydrogenase/reductase family
  misc_feature (52)..(291): Homolog of NCBI NO: 26450169 NR Description: unknown protein [Arabidopsis thaliana]
  misc_feature (7)..(291): Homolog of NCBI NO: 10178182 NR Description: contains similarity to
  misc_feature (7)..(291): Homolog of NCBI NO: 18424923 NR Description: Expressed protein

SEQ ID NO: 31988 - protein, 285 aa, Arabidopsis thaliana; identical to SEQ ID NO: 28398
  peptide (1)..(285): Ceres Seq. ID no. 12332977
  misc_feature (9)..(277): Homolog of NCBI NO: 28868436 NR Description: oxidoreductase, short chain
  misc_feature (9)..(277): Homolog of NCBI NO: 23058177 NR Description: hypothetical protein [Pseudomonas fluorescens
  misc_feature (46)..(279): Homolog of NCBI NO: 38567881 NR Description: OSJNBa0036B21.7 [Oryza sativa (japonica
  misc_feature (4)..(116): Homolog of NCBI NO: 11358313 NR Description: hypothetical protein T31P16.40 - Arabidopsis
  misc_feature (107)..(280): Homolog of NCBI NO: 11358313 NR Description: hypothetical protein T31P16.40 - Arabidopsis
  misc_feature (4)..(280): Homolog of NCBI NO: 26453106 NR Description: unknown protein [Arabidopsis thaliana]
  misc_feature (4)..(280): Homolog of NCBI NO: 30682984 NR Description: short-chain dehydrogenase/reductase family
  misc_feature (46)..(285): Homolog of NCBI NO: 26450169 NR Description: unknown protein [Arabidopsis thaliana]
  misc_feature (1)..(285): Homolog of NCBI NO: 10178182 NR Description: contains similarity to
  misc_feature (1)..(285): Homolog of NCBI NO: 18424923 NR Description: Expressed protein

SEQ ID NO: 31989 - protein, 240 aa, Arabidopsis thaliana; identical to SEQ ID NO: 28399
  peptide (1)..(240): Ceres Seq. ID no. 12332978
  misc_feature (1)..(232): Homolog of NCBI NO: 28868436 NR Description: oxidoreductase, short chain
  misc_feature (1)..(232): Homolog of NCBI NO: 23058177 NR Description: hypothetical protein [Pseudomonas fluorescens
  misc_feature (1)..(234): Homolog of NCBI NO: 38567881 NR Description: OSJNBa0036B21.7 [Oryza sativa (japonica
  misc_feature (1)..(71): Homolog of NCBI NO: 11358313 NR Description: hypothetical protein T31P16.40 - Arabidopsis
  misc_feature (62)..(235): Homolog of NCBI NO: 11358313 NR Description: hypothetical protein T31P16.40 - Arabidopsis
  misc_feature (1)..(235): Homolog of NCBI NO: 26453106 NR Description: unknown protein [Arabidopsis thaliana]
  misc_feature (1)..(235): Homolog of NCBI NO: 30682984 NR Description: short-chain dehydrogenase/reductase family
  misc_feature (1)..(240): Homolog of NCBI NO: 26450169 NR Description: unknown protein [Arabidopsis thaliana]
  misc_feature (1)..(240): Homolog of NCBI NO: 10178182 NR Description: contains similarity to
  misc_feature (1)..(240): Homolog of NCBI NO: 18424923 NR Description: Expressed protein

SEQ ID NO: 31990 - DNA, 908 bp, Arabidopsis thaliana; identical to SEQ ID NO: 28400
  misc_feature (1)..(908): Ceres Seq. ID no. 13491283
  misc_feature: MA Experiment ID: 108434 Result: Down-regulated in Transcription
  misc_feature: MA Experiment 108434 PARAMETER Experiment Name: At_Root_Tips_cDNA_P Parameter: Tissue Value: Root Tips
  misc_feature: MA Experiment ID: 108595 Result: Up-regulated in Transcription
  misc_feature: MA Experiment 108595 PARAMETER Experiment Name: At_Ler-pi_Ovule_cDNA_P Parameter: Plant Line Value: null
  misc_feature: MA Experiment ID: 20000185 Result: Down-regulated in Transcription
  misc_feature: MA Experiment 20000185 PARAMETER Experiment Name: At_Roots__P Parameter: Age (day) Value: 7 vs. 21
  misc_feature: MA Experiment 20000185 PARAMETER Experiment Name: At_Roots__P Parameter: Organism Value: A. thaliana
  misc_feature: MA Experiment 20000185 PARAMETER Experiment Name: At_Roots__P Parameter: Tissue Value: Roots vs. Whole Plant
  misc_feature: MA Experiment ID: 20000234 Result: Down-regulated in Transcription
  misc_feature: MA Experiment 20000234 PARAMETER Experiment Name: At_Siliques_P Parameter: Age (day) Value: 21
  misc_feature: MA Experiment 20000234 PARAMETER Experiment Name: At_Siliques_P Parameter: Organism Value: A. thaliana
  misc_feature: MA Experiment 20000234 PARAMETER Experiment Name: At_Siliques_P Parameter: Plant Line Value: WS
  misc_feature: MA Experiment 20000234 PARAMETER Experiment Name: At_Siliques_P Parameter: Tissue Value: Less Than 5mm Siliques vs. Whole Plant
  misc_feature: MA Experiment ID: 20000264 Result: Down-regulated in Transcription
  misc_feature: MA Experiment 20000264 PARAMETER Experiment Name: At_Open_Flower_P Parameter: Age (day) Value: 21
  misc_feature: MA Experiment 20000264 PARAMETER Experiment Name: At_Open_Flower_P Parameter: Plant Line Value: WS
  misc_feature: MA Experiment 20000264 PARAMETER Experiment Name: At_Open_Flower_P Parameter: Tissue Value: Open Flower vs. Whole Plant
  misc_feature: MA Experiment ID: 20000265 Result: Down-regulated in Transcription
  misc_feature: MA Experiment 20000265 PARAMETER Experiment Name: At_Open_Flower_P Parameter: Age (day) Value: 21
  misc_feature: MA Experiment 20000265 PARAMETER Experiment Name: At_Open_Flower_P Parameter: Plant Line Value: WS
  misc_feature: MA Experiment 20000265 PARAMETER Experiment Name: At_Open_Flower_P Parameter: Tissue Value: Closed Flower vs. Whole Plant
  misc_feature: MA Experiment ID: 20000286 Result: Down-regulated in Transcription
  misc_feature: MA Experiment 20000286 PARAMETER Experiment Name: At_Open_Flower_P Parameter: Age (day) Value: 21
  misc_feature: MA Experiment 20000286 PARAMETER Experiment Name: At_Open_Flower_P Parameter: Plant Line Value: WS
  misc_feature: MA Experiment 20000286 PARAMETER Experiment Name: At_Open_Flower_P Parameter: Tissue Value: Half Open vs. Whole Plant
  misc_feature: MA Experiment ID: 20000438 Result: Down-regulated in Transcription
  misc_feature: MA Experiment 20000438 PARAMETER Experiment Name: At_Shoots__P Parameter: Age (day) Value: 14
  misc_feature: MA Experiment 20000438 PARAMETER Experiment Name: At_Shoots__P Parameter: Tissue Value: Shoots vs. Whole Plant
  misc_feature: MA Experiment ID: 20000439 Result: Down-regulated in Transcription
  misc_feature: MA Experiment 20000439 PARAMETER Experiment Name: At_Roots__P Parameter: Age (day) Value: 14 vs. 21
  misc_feature: MA Experiment 20000439 PARAMETER Experiment Name: At_Roots__P Parameter: Organism Value: A. thaliana
  misc_feature: MA Experiment 20000439 PARAMETER Experiment Name: At_Roots__P Parameter: Tissue Value: Roots vs. Whole Plant
  misc_feature: MA Experiment ID: 20000794 Result: Down-regulated in Transcription
  misc_feature: MA Experiment 20000794 PARAMETER Experiment Name: At_Petals_P Parameter: Age (day) Value: 23-25 days
  misc_feature: MA Experiment 20000794 PARAMETER Experiment Name: At_Petals_P Parameter: Plant Line Value: WS
  misc_feature: MA Experiment 20000794 PARAMETER Experiment Name: At_Petals_P Parameter: Tissue Value: Petals vs. Whole plant
  misc_feature: MA Experiment ID: 20001556 Result: Down-regulated in Transcription
  misc_feature: MA Experiment 20001556 PARAMETER Experiment Name: At_Drought_Soil_Dry_P Parameter: Age (day) Value: 26
  misc_feature: MA Experiment 20001556 PARAMETER Experiment Name: At_Drought_Soil_Dry_P Parameter: Organism Value: A. thaliana
  misc_feature: MA Experiment 20001556 PARAMETER Experiment Name: At_Drought_Soil_Dry_P Parameter: Plant Line Value: WS
  misc_feature: MA Experiment 20001556 PARAMETER Experiment Name: At_Drought_Soil_Dry_P Parameter: Post Timepoint (hr) Value: None
  misc_feature: MA Experiment 20001556 PARAMETER Experiment Name: At_Drought_Soil_Dry_P Parameter: Post-Treatment Value: None
  misc_feature: MA Experiment 20001556 PARAMETER Experiment Name: At_Drought_Soil_Dry_P Parameter: Timepoint (day) Value: 12
  misc_feature: MA Experiment 20001556 PARAMETER Experiment Name: At_Drought_Soil_Dry_P Parameter: Treatment Value: Drought vs. No Drought
  misc_feature: MA Experiment ID: 20001773 Result: Up-regulated in Transcription
  misc_feature: MA Experiment 20001773 PARAMETER Experiment Name: At_Far-red-enriched-adult_P Parameter: Age (day) Value: 30
  misc_feature: MA Experiment 20001773 PARAMETER Experiment Name: At_Far-red-enriched-adult_P Parameter: Light Value: Far-red enriched vs. White
  misc_feature: MA Experiment 20001773 PARAMETER Experiment Name: At_Far-red-enriched-adult_P Parameter: Organism Value: A. thaliana
  misc_feature: MA Experiment 20001773 PARAMETER Experiment Name: At_Far-red-enriched-adult_P Parameter: Plant Line Value: Columbia
  misc_feature: MA Experiment 20001773 PARAMETER Experiment Name: At_Far-red-enriched-adult_P Parameter: Timepoint (hr) Value: 48
  misc_feature: MA Experiment 20001773 PARAMETER Experiment Name: At_Far-red-enriched-adult_P Parameter: Tissue Value: Aerial
  misc_feature: MA Experiment ID: 20001906 Result: Down-regulated in Transcription
  misc_feature: MA Experiment 20001906 PARAMETER Experiment Name: At_Drought_Reproduction_P Parameter: Age (day) Value: 35
  misc_feature: MA Experiment 20001906 PARAMETER Experiment Name: At_Drought_Reproduction_P Parameter: Organism Value: A. thaliana
  misc_feature: MA Experiment 20001906 PARAMETER Experiment Name: At_Drought_Reproduction_P Parameter: Plant Line Value: WS
  misc_feature: MA Experiment 20001906 PARAMETER Experiment Name: At_Drought_Reproduction_P Parameter: Timepoint (day) Value: 5
  misc_feature: MA Experiment 20001906 PARAMETER Experiment Name: At_Drought_Reproduction_P Parameter: Tissue Value: Siliques
  misc_feature: MA Experiment 20001906 PARAMETER Experiment Name: At_Drought_Reproduction_P Parameter: Treatment Value: Drought vs. No Drought
  misc_feature: MA Experiment ID: 20001908 Result: Down-regulated in Transcription
  misc_feature: MA Experiment 20001908 PARAMETER Experiment Name: At_Drought_Reproduction_P Parameter: Age (day) Value: 40
  misc_feature: MA Experiment 20001908 PARAMETER Experiment Name: At_Drought_Reproduction_P Parameter: Organism Value: A. thaliana
  misc_feature: MA Experiment 20001908 PARAMETER Experiment Name: At_Drought_Reproduction_P Parameter: Plant Line Value: WS
  misc_feature: MA Experiment 20001908 PARAMETER Experiment Name: At_Drought_Reproduction_P Parameter: Timepoint (day) Value: 10
  misc_feature: MA Experiment 20001908 PARAMETER Experiment Name: At_Drought_Reproduction_P Parameter: Tissue Value: Siliques
  misc_feature: MA Experiment 20001908 PARAMETER Experiment Name: At_Drought_Reproduction_P Parameter: Treatment Value: Drought vs. No Drought

SEQ ID NO: 31991 - protein, 173 aa, Arabidopsis thaliana; identical to SEQ ID NO: 22629
  peptide (1)..(173): Ceres Seq. ID no. 13491284
  misc_feature (1)..(169): Homolog of NCBI NO: 18391509 NR Description: expressed protein [Arabidopsis thaliana]
  misc_feature (6)..(169): Homolog of NCBI NO: 22748411 NR Description: hypothetical protein [Oryza sativa (japonica
  misc_feature (1)..(172): Homolog of NCBI NO: 38344206 NR Description: OSJNBa0064G10.22 [Oryza sativa (japonica
  misc_feature (1)..(159): Homolog of NCBI NO: 21554630 NR Description: unknown [Arabidopsis thaliana]
  misc_feature (1)..(159): Homolog of NCBI NO: 18407003 NR Description: expressed protein [Arabidopsis thaliana]
  misc_feature (1)..(173): Homolog of NCBI NO: 34394069 NR Description: unknown protein [Oryza sativa (japonica
  misc_feature (1)..(172): Homolog of NCBI NO: 18400781 NR Description: expressed protein [Arabidopsis thaliana]
  misc_feature (1)..(173): Homolog of NCBI NO: 18404242 NR Description: expressed protein [Arabidopsis thaliana]
  misc_feature (1)..(173): Homolog of NCBI NO: 38016521 NR Description: fiber protein Fb34 [Gossypium barbadense]
  misc_feature (1)..(173): Homolog of NCBI NO: 18416991 NR Description: expressed protein [Arabidopsis thaliana]

SEQ ID NO: 31992 - protein, 104 aa, Arabidopsis thaliana; identical to SEQ ID NO: 22630
  peptide (1)..(104): Ceres Seq. ID no. 13491285
  misc_feature (1)..(100): Homolog of NCBI NO: 18391509 NR Description: expressed protein [Arabidopsis thaliana]
  misc_feature (1)..(100): Homolog of NCBI NO: 22748411 NR Description: hypothetical protein [Oryza sativa (japonica
  misc_feature (1)..(103): Homolog of NCBI NO: 38344206 NR Description: OSJNBa0064G10.22 [Oryza sativa (japonica
  misc_feature (1)..(90): Homolog of NCBI NO: 21554630 NR Description: unknown [Arabidopsis thaliana]
  misc_feature (1)..(90): Homolog of NCBI NO: 18407003 NR Description: expressed protein [Arabidopsis thaliana]
  misc_feature (1)..(104): Homolog of NCBI NO: 34394069 NR Description: unknown protein [Oryza sativa (japonica
  misc_feature (1)..(103): Homolog of NCBI NO: 18400781 NR Description: expressed protein [Arabidopsis thaliana]
  misc_feature (1)..(104): Homolog of NCBI NO: 18404242 NR Description: expressed protein [Arabidopsis thaliana]
  misc_feature (1)..(104): Homolog of NCBI NO: 38016521 NR Description: fiber protein Fb34 [Gossypium barbadense]
  misc_feature (1)..(104): Homolog of NCBI NO: 18416991 NR Description: expressed protein [Arabidopsis thaliana]

SEQ ID NO: 31993 - DNA, 1701 bp, Arabidopsis thaliana; identical to SEQ ID NO: 28403
  misc_feature (1)..(1701): Ceres Seq. ID no. 13496299
  misc_feature: MA Experiment ID: 108434 Result: Up-regulated in Transcription
  misc_feature: MA Experiment 108434 PARAMETER Experiment Name: At_Root_Tips_cDNA_P Parameter: Tissue Value: Root Tips
  misc_feature: MA Experiment ID: 108435 Result: Up-regulated in Transcription
  misc_feature: MA Experiment 108435 PARAMETER Experiment Name: At_stm_Mutants_cDNA_P Parameter: Plant Line Value: wt Landsburg vs stm
  misc_feature: MA Experiment 108435 PARAMETER Experiment Name: At_stm_Mutants_cDNA_P Parameter: Tissue Value: Shoot Apical Meristem Region
  misc_feature: MA Experiment ID: 20000184 Result: Up-regulated in Transcription
  misc_feature: MA Experiment 20000184 PARAMETER Experiment Name: At_Shoots__P Parameter: Age (day) Value: 7
  misc_feature: MA Experiment 20000184 PARAMETER Experiment Name: At_Shoots__P Parameter: Tissue Value: Shoots vs. Whole Plant
  misc_feature: MA Experiment ID: 20000185 Result: Up-regulated in Transcription
  misc_feature: MA Experiment 20000185 PARAMETER Experiment Name: At_Roots__P Parameter: Age (day) Value: 7 vs. 21
  misc_feature: MA Experiment 20000185 PARAMETER Experiment Name: At_Roots__P Parameter: Organism Value: A. thaliana
  misc_feature: MA Experiment 20000185 PARAMETER Experiment Name: At_Roots__P Parameter: Tissue Value: Roots vs. Whole Plant
  misc_feature: MA Experiment ID: 20000234 Result: Up-regulated in Transcription
  misc_feature: MA Experiment 20000234 PARAMETER Experiment Name: At_Siliques_P Parameter: Age (day) Value: 21
  misc_feature: MA Experiment 20000234 PARAMETER Experiment Name: At_Siliques_P Parameter: Organism Value: A. thaliana
  misc_feature: MA Experiment 20000234 PARAMETER Experiment Name: At_Siliques_P Parameter: Plant Line Value: WS
  misc_feature: MA Experiment 20000234 PARAMETER Experiment Name: At_Siliques_P Parameter: Tissue Value: Less Than 5mm Siliques vs. Whole Plant
  misc_feature: MA Experiment ID: 20000235 Result: Up-regulated in Transcription
  misc_feature: MA Experiment 20000235 PARAMETER Experiment Name: At_Siliques_P Parameter: Age (day) Value: 21
  misc_feature: MA Experiment 20000235 PARAMETER Experiment Name: At_Siliques_P Parameter: Organism Value: A. thaliana
  misc_feature: MA Experiment 20000235 PARAMETER Experiment Name: At_Siliques_P Parameter: Plant Line Value: WS
  misc_feature: MA Experiment 20000235 PARAMETER Experiment Name: At_Siliques_P Parameter: Tissue Value: 5-10mm Siliques vs. Whole Plant
  misc_feature: MA Experiment ID: 20000264 Result: Up-regulated in Transcription
  misc_feature: MA Experiment 20000264 PARAMETER Experiment Name: At_Open_Flower_P Parameter: Age (day) Value: 21
  misc_feature: MA Experiment 20000264 PARAMETER Experiment Name: At_Open_Flower_P Parameter: Plant Line Value: WS
  misc_feature: MA Experiment 20000264 PARAMETER Experiment Name: At_Open_Flower_P Parameter: Tissue Value: Open Flower vs. Whole Plant
  misc_feature: MA Experiment ID: 20000265 Result: Up-regulated in Transcription
  misc_feature: MA Experiment 20000265 PARAMETER Experiment Name: At_Open_Flower_P Parameter: Age (day) Value: 21
  misc_feature: MA Experiment 20000265 PARAMETER Experiment Name: At_Open_Flower_P Parameter: Plant Line Value: WS
  misc_feature: MA Experiment 20000265 PARAMETER Experiment Name: At_Open_Flower_P Parameter: Tissue Value: Closed Flower vs. Whole Plant
  misc_feature: MA Experiment ID: 20000286 Result: Up-regulated in Transcription
  misc_feature: MA Experiment 20000286 PARAMETER Experiment Name: At_Open_Flower_P Parameter: Age (day) Value: 21
  misc_feature: MA Experiment 20000286 PARAMETER Experiment Name: At_Open_Flower_P Parameter: Plant Line Value: WS
  misc_feature: MA Experiment 20000286 PARAMETER Experiment Name: At_Open_Flower_P Parameter: Tissue Value: Half Open vs. Whole Plant
  misc_feature: MA Experiment ID: 20000439 Result: Up-regulated in Transcription
  misc_feature: MA Experiment 20000439 PARAMETER Experiment Name: At_Roots__P Parameter: Age (day) Value: 14 vs. 21
  misc_feature: MA Experiment 20000439 PARAMETER Experiment Name: At_Roots__P Parameter: Organism Value: A. thaliana
  misc_feature: MA Experiment 20000439 PARAMETER Experiment Name: At_Roots__P Parameter: Tissue Value: Roots vs. Whole Plant
  misc_feature: MA Experiment ID: 20000495 Result: Up-regulated in Transcription
  misc_feature: MA Experiment 20000495 PARAMETER Experiment Name: At_Guard_Cells_P Parameter: Harvest Date Value: 8/2/2002
  misc_feature: MA Experiment 20000495 PARAMETER Experiment Name: At_Guard_Cells_P Parameter: Organism Value: A. thaliana
  misc_feature: MA Experiment 20000495 PARAMETER Experiment Name: At_Guard_Cells_P Parameter: Tissue Value: Guard Cells vs. Leaves

SEQ ID NO: 31994 - protein, 422 aa, Arabidopsis thaliana; identical to SEQ ID NO: 28404
  peptide (1)..(422): Ceres Seq. ID no. 13496300
  misc_feature (237)..(398): Pfam Name: Glyceraldehyde 3-phosphate dehydrogenase, Pfam Description: Glyceraldehyde 3-phosphate dehydrogenase,
  misc_feature (67)..(422): Homolog of NCBI NO: 3059122 NR Description: glyeraldehyde-3-phosphate dehydrogenase [Marsilea
  misc_feature (60)..(420): Homolog of NCBI NO: 3059140 NR Description: NAD-dependent glyceraldehyde-3-phosphate
  misc_feature (1)..(420): Homolog of NCBI NO: 2129472 NR Description: glyceraldehyde-3-phosphate dehydrogenase
  misc_feature (1)..(420): Homolog of NCBI NO: 2129471 NR Description: glyceraldehyde-3-phosphate dehydrogenase
  misc_feature (1)..(421): Homolog of NCBI NO: 18072805 NR Description: glyceraldehyde-3-phosphate dehydrogenase
  misc_feature (1)..(421): Homolog of NCBI NO: 25284351 NR Description: hypothetical protein F3O9.10 - Arabidopsis
  misc_feature (1)..(421): Homolog of NCBI NO: 27754473 NR Description: putative glyceraldehyde-3-phosphate dehydrogenase
  misc_feature (1)..(421): Homolog of NCBI NO: 21618027 NR Description: putative glyceraldehyde-3-phosphate dehydrogenase
  misc_feature (1)..(421): Homolog of NCBI NO: 15219206 NR Description: glyceraldehyde-3-phosphate dehydrogenase -related
  misc_feature (1)..(422): Homolog of NCBI NO: 15219406 NR Description: glyceraldehyde-3-phosphate dehydrogenase -related

SEQ ID NO: 31995 - protein, 297 aa, Arabidopsis thaliana; identical to SEQ ID NO: 28405
  peptide (1)..(297): Ceres Seq. ID no. 13496301
  misc_feature (112)..(273): Pfam Name: Glyceraldehyde 3-phosphate dehydrogenase, Pfam Description: Glyceraldehyde 3-phosphate dehydrogenase,
  misc_feature (1)..(297): Homolog of NCBI NO: 3059122 NR Description: glyeraldehyde-3-phosphate dehydrogenase [Marsilea
  misc_feature (1)..(295): Homolog of NCBI NO: 3059140 NR Description: NAD-dependent glyceraldehyde-3-phosphate
  misc_feature (1)..(295): Homolog of NCBI NO: 2129472 NR Description: glyceraldehyde-3-phosphate dehydrogenase
  misc_feature (1)..(295): Homolog of NCBI NO: 2129471 NR Description: glyceraldehyde-3-phosphate dehydrogenase
  misc_feature (1)..(296): Homolog of NCBI NO: 18072805 NR Description: glyceraldehyde-3-phosphate dehydrogenase
  misc_feature (1)..(296): Homolog of NCBI NO: 25284351 NR Description: hypothetical protein F3O9.10 - Arabidopsis
  misc_feature (1)..(296): Homolog of NCBI NO: 27754473 NR Description: putative glyceraldehyde-3-phosphate dehydrogenase
  misc_feature (1)..(296): Homolog of NCBI NO: 21618027 NR Description: putative glyceraldehyde-3-phosphate dehydrogenase
  misc_feature (1)..(296): Homolog of NCBI NO: 15219206 NR Description: glyceraldehyde-3-phosphate dehydrogenase -related
  misc_feature (1)..(297): Homolog of NCBI NO: 15219406 NR Description: glyceraldehyde-3-phosphate dehydrogenase -related

SEQ ID NO: 31996 - protein, 294 aa, Arabidopsis thaliana; identical to SEQ ID NO: 28406
  peptide (1)..(294): Ceres Seq. ID no. 13496302
  misc_feature (109)..(270): Pfam Name: Glyceraldehyde 3-phosphate dehydrogenase, Pfam Description: Glyceraldehyde 3-phosphate dehydrogenase,
  misc_feature (1)..(294): Homolog of NCBI NO: 3059122 NR Description: glyeraldehyde-3-phosphate dehydrogenase [Marsilea
  misc_feature (1)..(292): Homolog of NCBI NO: 3059140 NR Description: NAD-dependent glyceraldehyde-3-phosphate
  misc_feature (1)..(292): Homolog of NCBI NO: 2129472 NR Description: glyceraldehyde-3-phosphate dehydrogenase
  misc_feature (1)..(292): Homolog of NCBI NO: 2129471 NR Description: glyceraldehyde-3-phosphate dehydrogenase
  misc_feature (1)..(293): Homolog of NCBI NO: 18072805 NR Description: glyceraldehyde-3-phosphate dehydrogenase
  misc_feature (1)..(293): Homolog of NCBI NO: 25284351 NR Description: hypothetical protein F3O9.10 - Arabidopsis
  misc_feature (1)..(293): Homolog of NCBI NO: 27754473 NR Description: putative glyceraldehyde-3-phosphate dehydrogenase
  misc_feature (1)..(293): Homolog of NCBI NO: 21618027 NR Description: putative glyceraldehyde-3-phosphate dehydrogenase
  misc_feature (1)..(293): Homolog of NCBI NO: 15219206 NR Description: glyceraldehyde-3-phosphate dehydrogenase -related
  misc_feature (1)..(294): Homolog of NCBI NO: 15219406 NR Description: glyceraldehyde-3-phosphate dehydrogenase -related

SEQ ID NO: 31997 - DNA, 1134 bp, Arabidopsis thaliana; identical to SEQ ID NO: 28407
  misc_feature (1)..(1134): Ceres Seq. ID no. 12370160
  misc_feature: MA Experiment ID: 108434 Result: Down-regulated in Transcription
  misc_feature: MA Experiment 108434 PARAMETER Experiment Name: At_Root_Tips_cDNA_P Parameter: Tissue Value: Root Tips
  misc_feature: MA Experiment ID: 108463 Result: Up-regulated in Transcription
  misc_feature: MA Experiment 108463 PARAMETER Experiment Name: At_Germinating_Seeds_cDNA_P Parameter: Age (day) Value: 3 vs. 0
  misc_feature: MA Experiment 108463 PARAMETER Experiment Name: At_Germinating_Seeds_cDNA_P Parameter: Tissue Value: Germinating Seeds
  misc_feature: MA Experiment ID: 108489 Result: Up-regulated in Transcription
  misc_feature: MA Experiment ID: 108594 Result: Down-regulated in Transcription
  misc_feature: MA Experiment 108594 PARAMETER Experiment Name: At_Ler-rhl_Root_cDNA_P Parameter: Plant Line Value: null
  misc_feature: MA Experiment ID: 20000439 Result: Up-regulated in Transcription
  misc_feature: MA Experiment 20000439 PARAMETER Experiment Name: At_Roots__P Parameter: Age (day) Value: 14 vs. 21
  misc_feature: MA Experiment 20000439 PARAMETER Experiment Name: At_Roots__P Parameter: Organism Value: A. thaliana
  misc_feature: MA Experiment 20000439 PARAMETER Experiment Name: At_Roots__P Parameter: Tissue Value: Roots vs. Whole Plant
  misc_feature: MA Experiment ID: 20000451 Result: Up-regulated in Transcription
  misc_feature: MA Experiment 20000451 PARAMETER Experiment Name: At_CS6879_Shoots-Roots_P Parameter: Age (day) Value: 14
  misc_feature: MA Experiment 20000451 PARAMETER Experiment Name: At_CS6879_Shoots-Roots_P Parameter: Organism Value: A. thaliana
  misc_feature: MA Experiment 20000451 PARAMETER Experiment Name: At_CS6879_Shoots-Roots_P Parameter: Plant Line Value: CS6879 vs. WS
  misc_feature: MA Experiment 20000451 PARAMETER Experiment Name: At_CS6879_Shoots-Roots_P Parameter: Tissue Value: Roots
  misc_feature: MA Experiment ID: 20000527 Result: Down-regulated in Transcription
  misc_feature: MA Experiment 20000527 PARAMETER Experiment Name: At_10percent_PEG_P Parameter: Age (day) Value: 20
  misc_feature: MA Experiment 20000527 PARAMETER Experiment Name: At_10percent_PEG_P Parameter: Organism Value: A. thaliana
  misc_feature: MA Experiment 20000527 PARAMETER Experiment Name: At_10percent_PEG_P Parameter: Plant Line Value: WS
  misc_feature: MA Experiment 20000527 PARAMETER Experiment Name: At_10percent_PEG_P Parameter: Timepoint (day) Value: 20
  misc_feature: MA Experiment 20000527 PARAMETER Experiment Name: At_10percent_PEG_P Parameter: Tissue Value: Whole Plant
  misc_feature: MA Experiment 20000527 PARAMETER Experiment Name: At_10percent_PEG_P Parameter: Treatment Value: 10percent PEG vs. No Treatment

SEQ ID NO: 31998 - protein, 241 aa, Arabidopsis thaliana; identical to SEQ ID NO: 28408
  peptide (1)..(241): Ceres Seq. ID no. 12370161
  misc_feature (61)..(240): Pfam Name: Calcineurin-like phosphoesterase Pfam Description: Calcineurin-like phosphoesterase
  misc_feature (21)..(240): Homolog of NCBI NO: 26452681 NR Description: putative purple acid phosphatase [Arabidopsis
  misc_feature (21)..(240): Homolog of NCBI NO: 22325417 NR Description: putative purple acid phosphatase
  misc_feature (21)..(171): Homolog of NCBI NO: 25752252 NR Description: probable acid phosphatase (EC 3.1.3.2) At2g01880

SEQ ID NO: 31999 - protein, 221 aa, Arabidopsis thaliana; identical to SEQ ID NO: 28409
  peptide (1)..(221): Ceres Seq. ID no. 12370162
  misc_feature (41)..(220): Pfam Name: Calcineurin-like phosphoesterase Pfam Description: Calcineurin-like phosphoesterase
  misc_feature (1)..(220): Homolog of NCBI NO: 26452681 NR Description: putative purple acid phosphatase [Arabidopsis
  misc_feature (1)..(220): Homolog of NCBI NO: 22325417 NR Description: putative purple acid phosphatase
  misc_feature (1)..(151): Homolog of NCBI NO: 25752252 NR Description: probable acid phosphatase (EC 3.1.3.2) At2g01880

SEQ ID NO: 32000 - protein, 219 aa, Arabidopsis thaliana; identical to SEQ ID NO: 28410
  peptide (1)..(219): Ceres Seq. ID no. 12370163
  misc_feature (39)..(218): Pfam Name: Calcineurin-like phosphoesterase Pfam Description: Calcineurin-like phosphoesterase
  misc_feature (1)..(218): Homolog of NCBI NO: 26452681 NR Description: putative purple acid phosphatase [Arabidopsis
  misc_feature (1)..(218): Homolog of NCBI NO: 22325417 NR Description: putative purple acid phosphatase
  misc_feature (1)..(149): Homolog of NCBI NO: 25752252 NR Description: probable acid phosphatase (EC 3.1.3.2) At2g01880

SEQ ID NO: 32001 - DNA, 741 bp, Arabidopsis thaliana; identical to SEQ ID NO: 28411
  misc_feature (1)..(741): Ceres Seq. ID no. 13497018
  misc_feature: MA Experiment ID: 108462 Result: Down-regulated in Transcription
  misc_feature: MA Experiment 108462 PARAMETER Experiment Name: At_Germinating_Seeds_cDNA_P Parameter: Age (day) Value: 2 vs. 0
  misc_feature: MA Experiment 108462 PARAMETER Experiment Name: At_Germinating_Seeds_cDNA_P Parameter: Tissue Value: Germinating Seeds
  misc_feature: MA Experiment ID: 108463 Result: Down-regulated in Transcription
  misc_feature: MA Experiment 108463 PARAMETER Experiment Name: At_Germinating_Seeds_cDNA_P Parameter: Age (day) Value: 3 vs. 0
  misc_feature: MA Experiment 108463 PARAMETER Experiment Name: At_Germinating_Seeds_cDNA_P Parameter: Tissue Value: Germinating Seeds
  misc_feature: MA Experiment ID: 108464 Result: Down-regulated in Transcription
  misc_feature: MA Experiment 108464 PARAMETER Experiment Name: At_Germinating_Seeds_cDNA_P Parameter: Age (day) Value: 4 vs. 0
  misc_feature: MA Experiment 108464 PARAMETER Experiment Name: At_Germinating_Seeds_cDNA_P Parameter: Tissue Value: Germinating Seeds
  misc_feature: MA Experiment ID: 20000315 Result: Down-regulated in Transcription
  misc_feature: MA Experiment 20000315 PARAMETER Experiment Name: At_14day_Shoots-Roots_Sub_P Parameter: Age (day) Value: 14
  misc_feature: MA Experiment 20000315 PARAMETER Experiment Name: At_14day_Shoots-Roots_Sub_P Parameter: Organism Value: A. thaliana
  misc_feature: MA Experiment 20000315 PARAMETER Experiment Name: At_14day_Shoots-Roots_Sub_P Parameter: Plant Line Value: WS
  misc_feature: MA Experiment 20000315 PARAMETER Experiment Name: At_14day_Shoots-Roots_Sub_P Parameter: Tissue Value: Shoots vs. Whole Plant

SEQ ID NO: 32002 - protein, 174 aa, Arabidopsis thaliana; identical to SEQ ID NO: 28412
  peptide (1)..(174): Ceres Seq. ID no. 13497019
  misc_feature (45)..(128): Pfam Name: Acetyltransferase (GNAT) family Pfam Description: Acetyltransferase (GNAT) family
  misc_feature (1)..(172): Homolog of NCBI NO: 38566006 NR Description: N-acetyltransferase 5 [Silurana tropicalis]
  misc_feature (1)..(172): Homolog of NCBI NO: 28278699 NR Description: Unknown (protein for MGC:53877) [Xenopus laevis]
  misc_feature (1)..(172): Homolog of NCBI NO: 7705823 NR Description: N-terminal acetyltransferase complex ard1subunit
  misc_feature (1)..(172): Homolog of NCBI NO: 19920354 NR Description: CG14222-PA [Drosophila melanogaster]
  misc_feature (1)..(174): Homolog of NCBI NO: 28273362 NR Description: silencing group B protein [Oryza sativa (japonica
  misc_feature (1)..(174): Homolog of NCBI NO: 14550118 NR Description: silencing group B protein [Zea mays]
  misc_feature (116)..(174): Homolog of NCBI NO: 25518612 NR Description: hypothetical protein F10O3.2 [imported] -
  misc_feature (1)..(124): Homolog of NCBI NO: 25518612 NR Description: hypothetical protein F10O3.2 [imported] -
  misc_feature (1)..(174): Homolog of NCBI NO: 18379062 NR Description: GCN5-related N-acetyltransferase (GNAT) family
  misc_feature (1)..(174): Homolog of NCBI NO: 14423552 NR Description: Unknown protein [Arabidopsis thaliana]

SEQ ID NO: 32003 - protein, 146 aa, Arabidopsis thaliana; identical to SEQ ID NO: 28413
  peptide (1)..(146): Ceres Seq. ID no. 13497020
  misc_feature (17)..(100): Pfam Name: Acetyltransferase (GNAT) family Pfam Description: Acetyltransferase (GNAT) family
  misc_feature (1)..(144): Homolog of NCBI NO: 38566006 NR Description: N-acetyltransferase 5 [Silurana tropicalis]
  misc_feature (1)..(144): Homolog of NCBI NO: 28278699 NR Description: Unknown (protein for MGC:53877) [Xenopus laevis]
  misc_feature (1)..(144): Homolog of NCBI NO: 7705823 NR Description: N-terminal acetyltransferase complex ard1subunit
  misc_feature (1)..(144): Homolog of NCBI NO: 19920354 NR Description: CG14222-PA [Drosophila melanogaster]
  misc_feature (1)..(146): Homolog of NCBI NO: 28273362 NR Description: silencing group B protein [Oryza sativa (japonica
  misc_feature (1)..(146): Homolog of NCBI NO: 14550118 NR Description: silencing group B protein [Zea mays]
  misc_feature (88)..(146): Homolog of NCBI NO: 25518612 NR Description: hypothetical protein F10O3.2 [imported] -
  misc_feature (1)..(96): Homolog of NCBI NO: 25518612 NR Description: hypothetical protein F10O3.2 [imported] -
  misc_feature (1)..(146): Homolog of NCBI NO: 18379062 NR Description: GCN5-related N-acetyltransferase (GNAT) family
  misc_feature (1)..(146): Homolog of NCBI NO: 14423552 NR Description: Unknown protein [Arabidopsis thaliana]

SEQ ID NO: 32004 - protein, 142 aa, Arabidopsis thaliana; identical to SEQ ID NO: 28414
  peptide (1)..(142): Ceres Seq. ID no. 13497021
  misc_feature (13)..(96): Pfam Name: Acetyltransferase (GNAT) family Pfam Description: Acetyltransferase (GNAT) family
  misc_feature (1)..(140): Homolog of NCBI NO: 38566006 NR Description: N-acetyltransferase 5 [Silurana tropicalis]
  misc_feature (1)..(140): Homolog of NCBI NO: 28278699 NR Description: Unknown (protein for MGC:53877) [Xenopus laevis]
  misc_feature (1)..(140): Homolog of NCBI NO: 7705823 NR Description: N-terminal acetyltransferase complex ard1subunit
  misc_feature (1)..(140): Homolog of NCBI NO: 19920354 NR Description: CG14222-PA [Drosophila melanogaster]
  misc_feature (1)..(142): Homolog of NCBI NO: 28273362 NR Description: silencing group B protein [Oryza sativa (japonica
  misc_feature (1)..(142): Homolog of NCBI NO: 14550118 NR Description: silencing group B protein [Zea mays]
  misc_feature (84)..(142): Homolog of NCBI NO: 25518612 NR Description: hypothetical protein F10O3.2 [imported] -
  misc_feature (1)..(92): Homolog of NCBI NO: 25518612 NR Description: hypothetical protein F10O3.2 [imported] -
  misc_feature (1)..(142): Homolog of NCBI NO: 18379062 NR Description: GCN5-related N-acetyltransferase (GNAT) family
  misc_feature (1)..(142): Homolog of NCBI NO: 14423552 NR Description: Unknown protein [Arabidopsis thaliana]

SEQ ID NO: 32005 - DNA, 1195 bp, Arabidopsis thaliana; identical to SEQ ID NO: 28415
  misc_feature (1)..(1195): Ceres Seq. ID no. 13486843
  misc_feature: MA Experiment ID: 20000227 Result: Up-regulated in Transcription
  misc_feature: MA Experiment 20000227 PARAMETER Experiment Name: At_Root-Tips-vs-Tops_P Parameter: Tissue Value: Root Tips vs. Root Tops
  misc_feature: MA Experiment ID: 20000234 Result: Up-regulated in Transcription
  misc_feature: MA Experiment 20000234 PARAMETER Experiment Name: At_Siliques_P Parameter: Age (day) Value: 21
  misc_feature: MA Experiment 20000234 PARAMETER Experiment Name: At_Siliques_P Parameter: Organism Value: A. thaliana
  misc_feature: MA Experiment 20000234 PARAMETER Experiment Name: At_Siliques_P Parameter: Plant Line Value: WS
  misc_feature: MA Experiment 20000234 PARAMETER Experiment Name: At_Siliques_P Parameter: Tissue Value: Less Than 5mm Siliques vs. Whole Plant
  misc_feature: MA Experiment ID: 20001451 Result: Down-regulated in Transcription
  misc_feature: MA Experiment 20001451 PARAMETER Experiment Name: At_Far-red-induction_P Parameter: Age (day) Value: 7
  misc_feature: MA Experiment 20001451 PARAMETER Experiment Name: At_Far-red-induction_P Parameter: Light Value: Far-red vs. White
  misc_feature: MA Experiment 20001451 PARAMETER Experiment Name: At_Far-red-induction_P Parameter: Organism Value: A. thaliana
  misc_feature: MA Experiment 20001451 PARAMETER Experiment Name: At_Far-red-induction_P Parameter: Plant Line Value: Columbia
  misc_feature: MA Experiment 20001451 PARAMETER Experiment Name: At_Far-red-induction_P Parameter: Timepoint (hr) Value: 24
  misc_feature: MA Experiment 20001451 PARAMETER Experiment Name: At_Far-red-induction_P Parameter: Tissue Value: Whole Plant
  misc_feature: MA Experiment ID: 20001557 Result: Up-regulated in Transcription
  misc_feature: MA Experiment 20001557 PARAMETER Experiment Name: At_Drought_Soil_Dry_P Parameter: Age (day) Value: 27
  misc_feature: MA Experiment 20001557 PARAMETER Experiment Name: At_Drought_Soil_Dry_P Parameter: Organism Value: A. thaliana
  misc_feature: MA Experiment 20001557 PARAMETER Experiment Name: At_Drought_Soil_Dry_P Parameter: Plant Line Value: WS
  misc_feature: MA Experiment 20001557 PARAMETER Experiment Name: At_Drought_Soil_Dry_P Parameter: Post Timepoint (hr) Value: 3
  misc_feature: MA Experiment 20001557 PARAMETER Experiment Name: At_Drought_Soil_Dry_P Parameter: Post-Treatment Value: Re-Water vs. No Drought
  misc_feature: MA Experiment 20001557 PARAMETER Experiment Name: At_Drought_Soil_Dry_P Parameter: Timepoint (day) Value: 13
  misc_feature: MA Experiment 20001557 PARAMETER Experiment Name: At_Drought_Soil_Dry_P Parameter: Treatment Value: Drought vs. No Drought
  misc_feature: MA Experiment ID: 20001558 Result: Up-regulated in Transcription
  misc_feature: MA Experiment 20001558 PARAMETER Experiment Name: At_Drought_Soil_Dry_P Parameter: Age (day) Value: 27
  misc_feature: MA Experiment 20001558 PARAMETER Experiment Name: At_Drought_Soil_Dry_P Parameter: Organism Value: A. thaliana
  misc_feature: MA Experiment 20001558 PARAMETER Experiment Name: At_Drought_Soil_Dry_P Parameter: Plant Line Value: WS
  misc_feature: MA Experiment 20001558 PARAMETER Experiment Name: At_Drought_Soil_Dry_P Parameter: Post Timepoint (hr) Value: 6
  misc_feature: MA Experiment 20001558 PARAMETER Experiment Name: At_Drought_Soil_Dry_P Parameter: Post-Treatment Value: Re-Water vs. No Drought
  misc_feature: MA Experiment 20001558 PARAMETER Experiment Name: At_Drought_Soil_Dry_P Parameter: Timepoint (day) Value: 13
  misc_feature: MA Experiment 20001558 PARAMETER Experiment Name: At_Drought_Soil_Dry_P Parameter: Treatment Value: Drought vs. No Drought
  misc_feature: MA Experiment ID: 20001757 Result: Up-regulated in Transcription
  misc_feature: MA Experiment 20001757 PARAMETER Experiment Name: At_50mM_NH4NO3_L-to-H_P Parameter: Timepoint (hr) Value: 6
  misc_feature: MA Experiment 20001757 PARAMETER Experiment Name: At_50mM_NH4NO3_L-to-H_P Parameter: Tissue Value: Leaf
  misc_feature: MA Experiment 20001757 PARAMETER Experiment Name: At_50mM_NH4NO3_L-to-H_P Parameter: Treatment Value: 50mM NH4NO3 vs 100mM Mannitol

SEQ ID NO: 32006 - protein, 306 aa, Arabidopsis thaliana; identical to SEQ ID NO: 28416
  peptide (1)..(306): Ceres Seq. ID no. 13486844
  misc_feature (124)..(243): Pfam Name: AMP-binding enzyme Pfam Description: AMP-binding enzyme
  misc_feature (124)..(243): Pfam Name: AMP-binding enzyme Pfam Description: AMP-binding enzyme
  misc_feature (1)..(269): Homolog of NCBI NO: 7716950 NR Description: histone deacetylase 2 isoform c [Zea mays]
  misc_feature (1)..(285): Homolog of NCBI NO: 7716948 NR Description: histone deacetylase 2 isoform b [Zea mays]
  misc_feature (1)..(282): Homolog of NCBI NO: 7489751 NR Description: histone deacetylase (EC 3.5.1.-) HD2-p39,
  misc_feature (1)..(301): Homolog of NCBI NO: 7804960 NR Description: putative histone deacetylase HD2 [Oryza sativa]
  misc_feature (1)..(285): Homolog of NCBI NO: 7716948 NR Description: histone deacetylase 2 isoform b [Zea mays]
  misc_feature (1)..(301): Homolog of NCBI NO: 7804960 NR Description: putative histone deacetylase HD2 [Oryza sativa]
  misc_feature (1)..(306): Homolog of NCBI NO: 25352191 NR Description: probable histone deacetylase (EC 3.5.1.-)
  misc_feature (1)..(306): Homolog of NCBI NO: 30688577 NR Description: histone deacetylase-related protein [Arabidopsis
  misc_feature (95)..(306): Homolog of NCBI NO: 30688581 NR Description: histone deacetylase-related protein [Arabidopsis
  misc_feature (1)..(282): Homolog of NCBI NO: 7489751 NR Description: histone deacetylase (EC 3.5.1.-) HD2-p39,
  misc_feature (1)..(269): Homolog of NCBI NO: 7716950 NR Description: histone deacetylase 2 isoform c [Zea mays]
  misc_feature (95)..(306): Homolog of NCBI NO: 30688581 NR Description: histone deacetylase-related protein [Arabidopsis
  misc_feature (1)..(306): Homolog of NCBI NO: 25352191 NR Description: probable histone deacetylase (EC 3.5.1.-)
  misc_feature (1)..(306): Homolog of NCBI NO: 30688577 NR Description: histone deacetylase-related protein [Arabidopsis

SEQ ID NO: 32007 - DNA, 731 bp, Arabidopsis thaliana; identical to SEQ ID NO: 28417
  misc_feature (1)..(731): Ceres Seq. ID no. 13490081
  misc_feature: MA Experiment ID: 108434 Result: Down-regulated in Transcription
  misc_feature: MA Experiment 108434 PARAMETER Experiment Name: At_Root_Tips_cDNA_P Parameter: Tissue Value: Root Tips
  misc_feature: MA Experiment ID: 108435 Result: Down-regulated in Transcription
  misc_feature: MA Experiment 108435 PARAMETER Experiment Name: At_stm_Mutants_cDNA_P Parameter: Plant Line Value: wt Landsburg vs stm
  misc_feature: MA Experiment 108435 PARAMETER Experiment Name: At_stm_Mutants_cDNA_P Parameter: Tissue Value: Shoot Apical Meristem Region
  misc_feature: MA Experiment ID: 108462 Result: Up-regulated in Transcription
  misc_feature: MA Experiment 108462 PARAMETER Experiment Name: At_Germinating_Seeds_cDNA_P Parameter: Age (day) Value: 2 vs. 0
  misc_feature: MA Experiment 108462 PARAMETER Experiment Name: At_Germinating_Seeds_cDNA_P Parameter: Tissue Value: Germinating Seeds
  misc_feature: MA Experiment ID: 108469 Result: Down-regulated in Transcription
  misc_feature: MA Experiment ID: 108489 Result: Down-regulated in Transcription
  misc_feature: MA Experiment ID: 108572 Result: Down-regulated in Transcription
  misc_feature: MA Experiment 108572 PARAMETER Experiment Name: At_Drought_cDNA_P Parameter: Timepoint (hr) Value: 1
  misc_feature: MA Experiment 108572 PARAMETER Experiment Name: At_Drought_cDNA_P Parameter: Tissue Value: Aerial
  misc_feature: MA Experiment 108572 PARAMETER Experiment Name: At_Drought_cDNA_P Parameter: Treatment Value: Drought vs. No Drought
  misc_feature: MA Experiment ID: 108573 Result: Down-regulated in Transcription
  misc_feature: MA Experiment 108573 PARAMETER Experiment Name: At_Drought_cDNA_P Parameter: Timepoint (hr) Value: 6
  misc_feature: MA Experiment 108573 PARAMETER Experiment Name: At_Drought_cDNA_P Parameter: Tissue Value: Aerial
  misc_feature: MA Experiment 108573 PARAMETER Experiment Name: At_Drought_cDNA_P Parameter: Treatment Value: Drought vs. No Drought
  misc_feature: MA Experiment ID: 108577 Result: Down-regulated in Transcription
  misc_feature: MA Experiment 108577 PARAMETER Experiment Name: At_42deg_Heat_cDNA_P Parameter: Temperature (deg C) Value: 42 vs. 22
  misc_feature: MA Experiment 108577 PARAMETER Experiment Name: At_42deg_Heat_cDNA_P Parameter: Timepoint (hr) Value: 6
  misc_feature: MA Experiment 108577 PARAMETER Experiment Name: At_42deg_Heat_cDNA_P Parameter: Tissue Value: Aerial
  misc_feature: MA Experiment ID: 108579 Result: Up-regulated in Transcription
  misc_feature: MA Experiment 108579 PARAMETER Experiment Name: At_4deg_Cold_cDNA_P Parameter: Temperature (deg C) Value: 4 vs. 22
  misc_feature: MA Experiment 108579 PARAMETER Experiment Name: At_4deg_Cold_cDNA_P Parameter: Timepoint (hr) Value: 6
  misc_feature: MA Experiment 108579 PARAMETER Experiment Name: At_4deg_Cold_cDNA_P Parameter: Tissue Value: Aerial
  misc_feature: MA Experiment ID: 108605 Result: Down-regulated in Transcription
  misc_feature: MA Experiment 108605 PARAMETER Experiment Name: At_100uM_ABA_cDNA_P Parameter: Timepoint (hr) Value: 6
  misc_feature: MA Experiment 108605 PARAMETER Experiment Name: At_100uM_ABA_cDNA_P Parameter: Tissue Value: Aerial
  misc_feature: MA Experiment 108605 PARAMETER Experiment Name: At_100uM_ABA_cDNA_P Parameter: Treatment Value: 100uM ABA vs. No Treatment
  misc_feature: MA Experiment ID: 108668 Result: Down-regulated in Transcription
  misc_feature: MA Experiment 108668 PARAMETER Experiment Name: At_2mM_SA_cDNA_P Parameter: Plant Line Value: WS
  misc_feature: MA Experiment 108668 PARAMETER Experiment Name: At_2mM_SA_cDNA_P Parameter: Timepoint (hr) Value: 6
  misc_feature: MA Experiment 108668 PARAMETER Experiment Name: At_2mM_SA_cDNA_P Parameter: Treatment Value: 2mM SA vs. No Treatment
  misc_feature: MA Experiment ID: 20000069 Result: Up-regulated in Transcription
  misc_feature: MA Experiment 20000069 PARAMETER Experiment Name: At_100uM_ABA_Mutants_cDNA_P Parameter: Plant Line Value: CS23
  misc_feature: MA Experiment 20000069 PARAMETER Experiment Name: At_100uM_ABA_Mutants_cDNA_P Parameter: Timepoint (hr) Value: 6
  misc_feature: MA Experiment 20000069 PARAMETER Experiment Name: At_100uM_ABA_Mutants_cDNA_P Parameter: Tissue Value: Aerial
  misc_feature: MA Experiment 20000069 PARAMETER Experiment Name: At_100uM_ABA_Mutants_cDNA_P Parameter: Treatment Value: 100uM ABA vs. No Treatment
  misc_feature: MA Experiment ID: 20000070 Result: Up-regulated in Transcription
  misc_feature: MA Experiment 20000070 PARAMETER Experiment Name: At_100uM_ABA_Mutants_cDNA_P Parameter: Plant Line Value: CS24
  misc_feature: MA Experiment 20000070 PARAMETER Experiment Name: At_100uM_ABA_Mutants_cDNA_P Parameter: Timepoint (hr) Value: 6
  misc_feature: MA Experiment 20000070 PARAMETER Experiment Name: At_100uM_ABA_Mutants_cDNA_P Parameter: Tissue Value: Aerial
  misc_feature: MA Experiment 20000070 PARAMETER Experiment Name: At_100uM_ABA_Mutants_cDNA_P Parameter: Treatment Value: 100uM ABA vs. No Treatment
  misc_feature: MA Experiment ID: 20000071 Result: Up-regulated in Transcription
  misc_feature: MA Experiment 20000071 PARAMETER Experiment Name: At_100uM_ABA_Mutants_cDNA_P Parameter: Plant Line Value: CS8104
  misc_feature: MA Experiment 20000071 PARAMETER Experiment Name: At_100uM_ABA_Mutants_cDNA_P Parameter: Timepoint (hr) Value: 6
  misc_feature: MA Experiment 20000071 PARAMETER Experiment Name: At_100uM_ABA_Mutants_cDNA_P Parameter: Tissue Value: Aerial
  misc_feature: MA Experiment 20000071 PARAMETER Experiment Name: At_100uM_ABA_Mutants_cDNA_P Parameter: Treatment Value: 100uM ABA vs. No Treatment
  misc_feature: MA Experiment ID: 20000072 Result: Up-regulated in Transcription
  misc_feature: MA Experiment 20000072 PARAMETER Experiment Name: At_100uM_ABA_Mutants_cDNA_P Parameter: Plant Line Value: CS8105
  misc_feature: MA Experiment 20000072 PARAMETER Experiment Name: At_100uM_ABA_Mutants_cDNA_P Parameter: Timepoint (hr) Value: 6
  misc_feature: MA Experiment 20000072 PARAMETER Experiment Name: At_100uM_ABA_Mutants_cDNA_P Parameter: Tissue Value: Aerial
  misc_feature: MA Experiment 20000072 PARAMETER Experiment Name: At_100uM_ABA_Mutants_cDNA_P Parameter: Treatment Value: 100uM ABA vs. No Treatment
  misc_feature: MA Experiment ID: 20000086 Result: Up-regulated in Transcription
  misc_feature: MA Experiment 20000086 PARAMETER Experiment Name: At_100uM_ABA_Mutants_cDNA_P Parameter: Plant Line Value: CS22
  misc_feature: MA Experiment 20000086 PARAMETER Experiment Name: At_100uM_ABA_Mutants_cDNA_P Parameter: Timepoint (hr) Value: 6
  misc_feature: MA Experiment 20000086 PARAMETER Experiment Name: At_100uM_ABA_Mutants_cDNA_P Parameter: Tissue Value: Aerial
  misc_feature: MA Experiment 20000086 PARAMETER Experiment Name: At_100uM_ABA_Mutants_cDNA_P Parameter: Treatment Value: 100uM ABA vs. No Treatment
  misc_feature: MA Experiment ID: 20000087 Result: Up-regulated in Transcription
  misc_feature: MA Experiment 20000087 PARAMETER Experiment Name: At_100uM_ABA_Mutants_cDNA_P Parameter: Plant Line Value: WS
  misc_feature: MA Experiment 20000087 PARAMETER Experiment Name: At_100uM_ABA_Mutants_cDNA_P Parameter: Timepoint (hr) Value: 6
  misc_feature: MA Experiment 20000087 PARAMETER Experiment Name: At_100uM_ABA_Mutants_cDNA_P Parameter: Tissue Value: Aerial
  misc_feature: MA Experiment 20000087 PARAMETER Experiment Name: At_100uM_ABA_Mutants_cDNA_P Parameter: Treatment Value: 100uM ABA vs. No Treatment
  misc_feature: MA Experiment ID: 20000089 Result: Up-regulated in Transcription
  misc_feature: MA Experiment ID: 20000090 Result: Up-regulated in Transcription
  misc_feature: MA Experiment ID: 20000111 Result: Down-regulated in Transcription
  misc_feature: MA Experiment 20000111 PARAMETER Experiment Name: At_42deg_Heat_cDNA_P Parameter: Temperature (deg C) Value: 42 vs. 22
  misc_feature: MA Experiment 20000111 PARAMETER Experiment Name: At_42deg_Heat_cDNA_P Parameter: Timepoint (hr) Value: 6
  misc_feature: MA Experiment 20000111 PARAMETER Experiment Name: At_42deg_Heat_cDNA_P Parameter: Tissue Value: Aerial
  misc_feature: MA Experiment ID: 20000112 Result: Down-regulated in Transcription
  misc_feature: MA Experiment 20000112 PARAMETER Experiment Name: At_42deg_Heat_cDNA_P Parameter: Temperature (deg C) Value: 42 vs. 22
  misc_feature: MA Experiment 20000112 PARAMETER Experiment Name: At_42deg_Heat_cDNA_P Parameter: Timepoint (hr) Value: 2
  misc_feature: MA Experiment 20000112 PARAMETER Experiment Name: At_42deg_Heat_cDNA_P Parameter: Tissue Value: Aerial
  misc_feature: MA Experiment ID: 20000113 Result: Down-regulated in Transcription
  misc_feature: MA Experiment 20000113 PARAMETER Experiment Name: At_42deg_Heat_cDNA_P Parameter: Temperature (deg C) Value: 42 vs. 22
  misc_feature: MA Experiment 20000113 PARAMETER Experiment Name: At_42deg_Heat_cDNA_P Parameter: Timepoint (hr) Value: 8
  misc_feature: MA Experiment 20000113 PARAMETER Experiment Name: At_42deg_Heat_cDNA_P Parameter: Tissue Value: Aerial
  misc_feature: MA Experiment ID: 20000117 Result: Up-regulated in Transcription
  misc_feature: MA Experiment 20000117 PARAMETER Experiment Name: At_100uM_ABA_Mutants_cDNA_P Parameter: Plant Line Value: Columbia
  misc_feature: MA Experiment 20000117 PARAMETER Experiment Name: At_100uM_ABA_Mutants_cDNA_P Parameter: Timepoint (hr) Value: 6
  misc_feature: MA Experiment 20000117 PARAMETER Experiment Name: At_100uM_ABA_Mutants_cDNA_P Parameter: Tissue Value: Aerial
  misc_feature: MA Experiment 20000117 PARAMETER Experiment Name: At_100uM_ABA_Mutants_cDNA_P Parameter: Treatment Value: 100uM ABA vs. No Treatment
  misc_feature: MA Experiment ID: 20000166 Result: Up-regulated in Transcription
  misc_feature: MA Experiment 20000166 PARAMETER Experiment Name: At_100uM_ABA_P Parameter: Age (day) Value: 14
  misc_feature: MA Experiment 20000166 PARAMETER Experiment Name: At_100uM_ABA_P Parameter: Organism Value: A. thaliana
  misc_feature: MA Experiment 20000166 PARAMETER Experiment Name: At_100uM_ABA_P Parameter: Plant Line Value: WS
  misc_feature: MA Experiment 20000166 PARAMETER Experiment Name: At_100uM_ABA_P Parameter: Timepoint (hr) Value: 1
  misc_feature: MA Experiment 20000166 PARAMETER Experiment Name: At_100uM_ABA_P Parameter: Tissue Value: Aerial
  misc_feature: MA Experiment 20000166 PARAMETER Experiment Name: At_100uM_ABA_P Parameter: Treatment Value: 100uM ABA vs. No Treatment
  misc_feature: MA Experiment ID: 20000173 Result: Down-regulated in Transcription
  misc_feature: MA Experiment 20000173 PARAMETER Experiment Name: At_42deg_Heat_P Parameter: Age (day) Value: 14
  misc_feature: MA Experiment 20000173 PARAMETER Experiment Name: At_42deg_Heat_P Parameter: Organism Value: A. thaliana
  misc_feature: MA Experiment 20000173 PARAMETER Experiment Name: At_42deg_Heat_P Parameter: Plant Line Value: WS
  misc_feature: MA Experiment 20000173 PARAMETER Experiment Name: At_42deg_Heat_P Parameter: Temperature (deg C) Value: 42 vs. 22
  misc_feature: MA Experiment 20000173 PARAMETER Experiment Name: At_42deg_Heat_P Parameter: Timepoint (hr) Value: 6
  misc_feature: MA Experiment 20000173 PARAMETER Experiment Name: At_42deg_Heat_P Parameter: Tissue Value: Aerial
  misc_feature: MA Experiment ID: 20000182 Result: Down-regulated in Transcription
  misc_feature: MA Experiment 20000182 PARAMETER Experiment Name: At_2mM_SA_P Parameter: Age (day) Value: 14
  misc_feature: MA Experiment 20000182 PARAMETER Experiment Name: At_2mM_SA_P Parameter: Organism Value: A. thaliana
  misc_feature: MA Experiment 20000182 PARAMETER Experiment Name: At_2mM_SA_P Parameter: Plant Line Value: WS
  misc_feature: MA Experiment 20000182 PARAMETER Experiment Name: At_2mM_SA_P Parameter: Timepoint (hr) Value: 6
  misc_feature: MA Experiment 20000182 PARAMETER Experiment Name: At_2mM_SA_P Parameter: Tissue Value: Aerial
  misc_feature: MA Experiment 20000182 PARAMETER Experiment Name: At_2mM_SA_P Parameter: Treatment Value: 2mM SA vs. No Treatment
  misc_feature: MA Experiment ID: 20000184 Result: Down-regulated in Transcription
  misc_feature: MA Experiment 20000184 PARAMETER Experiment Name: At_Shoots__P Parameter: Age (day) Value: 7
  misc_feature: MA Experiment 20000184 PARAMETER Experiment Name: At_Shoots__P Parameter: Tissue Value: Shoots vs. Whole Plant
  misc_feature: MA Experiment ID: 20000185 Result: Down-regulated in Transcription
  misc_feature: MA Experiment 20000185 PARAMETER Experiment Name: At_Roots__P Parameter: Age (day) Value: 7 vs. 21
  misc_feature: MA Experiment 20000185 PARAMETER Experiment Name: At_Roots__P Parameter: Organism Value: A. thaliana
  misc_feature: MA Experiment 20000185 PARAMETER Experiment Name: At_Roots__P Parameter: Tissue Value: Roots vs. Whole Plant
  misc_feature: MA Experiment ID: 20000224 Result: Up-regulated in Transcription
  misc_feature: MA Experiment ID: 20000234 Result: Up-regulated in Transcription
  misc_feature: MA Experiment 20000234 PARAMETER Experiment Name: At_Siliques_P Parameter: Age (day) Value: 21
  misc_feature: MA Experiment 20000234 PARAMETER Experiment Name: At_Siliques_P Parameter: Organism Value: A. thaliana
  misc_feature: MA Experiment 20000234 PARAMETER Experiment Name: At_Siliques_P Parameter: Plant Line Value: WS
  misc_feature: MA Experiment 20000234 PARAMETER Experiment Name: At_Siliques_P Parameter: Tissue Value: Less Than 5mm Siliques vs. Whole Plant
  misc_feature: MA Experiment ID: 20000235 Result: Up-regulated in Transcription
  misc_feature: MA Experiment 20000235 PARAMETER Experiment Name: At_Siliques_P Parameter: Age (day) Value: 21
  misc_feature: MA Experiment 20000235 PARAMETER Experiment Name: At_Siliques_P Parameter: Organism Value: A. thaliana
  misc_feature: MA Experiment 20000235 PARAMETER Experiment Name: At_Siliques_P Parameter: Plant Line Value: WS
  misc_feature: MA Experiment 20000235 PARAMETER Experiment Name: At_Siliques_P Parameter: Tissue Value: 5-10mm Siliques vs. Whole Plant
  misc_feature: MA Experiment ID: 20000308 Result: Up-regulated in Transcription
  misc_feature: MA Experiment 20000308 PARAMETER Experiment Name: At_100mM_NaCl__P Parameter: Age (day) Value: 17
  misc_feature: MA Experiment 20000308 PARAMETER Experiment Name: At_100mM_NaCl__P Parameter: Organism Value: A. thaliana
  misc_feature: MA Experiment 20000308 PARAMETER Experiment Name: At_100mM_NaCl__P Parameter: Plant Line Value: WS
  misc_feature: MA Experiment 20000308 PARAMETER Experiment Name: At_100mM_NaCl__P Parameter: Timepoint (hr) Value: 72
  misc_feature: MA Experiment 20000308 PARAMETER Experiment Name: At_100mM_NaCl__P Parameter: Tissue Value: Whole Plant
  misc_feature: MA Experiment 20000308 PARAMETER Experiment Name: At_100mM_NaCl__P Parameter: Treatment Value: 100mM NaCl vs. No Treatment
  misc_feature: MA Experiment ID: 20000437 Result: Up-regulated in Transcription
  misc_feature: MA Experiment 20000437 PARAMETER Experiment Name: At_Drought_P Parameter: Age (day) Value: 8
  misc_feature: MA Experiment 20000437 PARAMETER Experiment Name: At_Drought_P Parameter: Organism Value: A. thaliana
  misc_feature: MA Experiment 20000437 PARAMETER Experiment Name: At_Drought_P Parameter: Plant Line Value: WS
  misc_feature: MA Experiment 20000437 PARAMETER Experiment Name: At_Drought_P Parameter: Timepoint (hr) Value: 24
  misc_feature: MA Experiment 20000437 PARAMETER Experiment Name: At_Drought_P Parameter: Tissue Value: Whole Plant
  misc_feature: MA Experiment 20000437 PARAMETER Experiment Name: At_Drought_P Parameter: Treatment Value: Drought vs. No Drought
  misc_feature: MA Experiment ID: 20000438 Result: Down-regulated in Transcription
  misc_feature: MA Experiment 20000438 PARAMETER Experiment Name: At_Shoots__P Parameter: Age (day) Value: 14
  misc_feature: MA Experiment 20000438 PARAMETER Experiment Name: At_Shoots__P Parameter: Tissue Value: Shoots vs. Whole Plant
  misc_feature: MA Experiment ID: 20000439 Result: Down-regulated in Transcription
  misc_feature: MA Experiment 20000439 PARAMETER Experiment Name: At_Roots__P Parameter: Age (day) Value: 14 vs. 21
  misc_feature: MA Experiment 20000439 PARAMETER Experiment Name: At_Roots__P Parameter: Organism Value: A. thaliana
  misc_feature: MA Experiment 20000439 PARAMETER Experiment Name: At_Roots__P Parameter: Tissue Value: Roots vs. Whole Plant
  misc_feature: MA Experiment ID: 20000441 Result: Down-regulated in Transcription
  misc_feature: MA Experiment 20000441 PARAMETER Experiment Name: At_1uM_BR-BRZ__P Parameter: Tissue Value: Shoot Apices
  misc_feature: MA Experiment 20000441 PARAMETER Experiment Name: At_1uM_BR-BRZ__P Parameter: Treatment Value: 1uM BR vs. No Treatment
  misc_feature: MA Experiment ID: 20000443 Result: Down-regulated in Transcription
  misc_feature: MA Experiment 20000443 PARAMETER Experiment Name: At_1uM_BR-BRZ__P Parameter: Tissue Value: Shoot Apices
  misc_feature: MA Experiment 20000443 PARAMETER Experiment Name: At_1uM_BR-BRZ__P Parameter: Treatment Value: 1uM BRZ vs. No Treatment
  misc_feature: MA Experiment ID: 20000495 Result: Down-regulated in Transcription
  misc_feature: MA Experiment 20000495 PARAMETER Experiment Name: At_Guard_Cells_P Parameter: Harvest Date Value: 8/2/2002
  misc_feature: MA Experiment 20000495 PARAMETER Experiment Name: At_Guard_Cells_P Parameter: Organism Value: A. thaliana
  misc_feature: MA Experiment 20000495 PARAMETER Experiment Name: At_Guard_Cells_P Parameter: Tissue Value: Guard Cells vs. Leaves
  misc_feature: MA Experiment ID: 20000794 Result: Down-regulated in Transcription
  misc_feature: MA Experiment 20000794 PARAMETER Experiment Name: At_Petals_P Parameter: Age (day) Value: 23-25 days
  misc_feature: MA Experiment 20000794 PARAMETER Experiment Name: At_Petals_P Parameter: Plant Line Value: WS
  misc_feature: MA Experiment 20000794 PARAMETER Experiment Name: At_Petals_P Parameter: Tissue Value: Petals vs. Whole plant
  misc_feature: MA Experiment ID: 20001247 Result: Down-regulated in Transcription
  misc_feature: MA Experiment 20001247 PARAMETER Experiment Name: At_Far-red-induction_P Parameter: Age (day) Value: 7
  misc_feature: MA Experiment 20001247 PARAMETER Experiment Name: At_Far-red-induction_P Parameter: Light Value: Far-red vs. White
  misc_feature: MA Experiment 20001247 PARAMETER Experiment Name: At_Far-red-induction_P Parameter: Organism Value: A. thaliana
  misc_feature: MA Experiment 20001247 PARAMETER Experiment Name: At_Far-red-induction_P Parameter: Plant Line Value: Columbia
  misc_feature: MA Experiment 20001247 PARAMETER Experiment Name: At_Far-red-induction_P Parameter: Timepoint (hr) Value: 1
  misc_feature: MA Experiment 20001247 PARAMETER Experiment Name: At_Far-red-induction_P Parameter: Tissue Value: Whole Plant
  misc_feature: MA Experiment ID: 20001248 Result: Up-regulated in Transcription
  misc_feature: MA Experiment 20001248 PARAMETER Experiment Name: At_Far-red-induction_P Parameter: Age (day) Value: 7
  misc_feature: MA Experiment 20001248 PARAMETER Experiment Name: At_Far-red-induction_P Parameter: Light Value: Far-red vs. White
  misc_feature: MA Experiment 20001248 PARAMETER Experiment Name: At_Far-red-induction_P Parameter: Organism Value: A. thaliana
  misc_feature: MA Experiment 20001248 PARAMETER Experiment Name: At_Far-red-induction_P Parameter: Plant Line Value: Columbia
  misc_feature: MA Experiment 20001248 PARAMETER Experiment Name: At_Far-red-induction_P Parameter: Timepoint (hr) Value: 4
  misc_feature: MA Experiment 20001248 PARAMETER Experiment Name: At_Far-red-induction_P Parameter: Tissue Value: Whole Plant
  misc_feature: MA Experiment ID: 20001557 Result: Up-regulated in Transcription
  misc_feature: MA Experiment 20001557 PARAMETER Experiment Name: At_Drought_Soil_Dry_P Parameter: Age (day) Value: 27
  misc_feature: MA Experiment 20001557 PARAMETER Experiment Name: At_Drought_Soil_Dry_P Parameter: Organism Value: A. thaliana
  misc_feature: MA Experiment 20001557 PARAMETER Experiment Name: At_Drought_Soil_Dry_P Parameter: Plant Line Value: WS
  misc_feature: MA Experiment 20001557 PARAMETER Experiment Name: At_Drought_Soil_Dry_P Parameter: Post Timepoint (hr) Value: 3
  misc_feature: MA Experiment 20001557 PARAMETER Experiment Name: At_Drought_Soil_Dry_P Parameter: Post-Treatment Value: Re-Water vs. No Drought
  misc_feature: MA Experiment 20001557 PARAMETER Experiment Name: At_Drought_Soil_Dry_P Parameter: Timepoint (day) Value: 13
  misc_feature: MA Experiment 20001557 PARAMETER Experiment Name: At_Drought_Soil_Dry_P Parameter: Treatment Value: Drought vs. No Drought
  misc_feature: MA Experiment ID: 20001905 Result: Down-regulated in Transcription
  misc_feature: MA Experiment 20001905 PARAMETER Experiment Name: At_Drought_Reproduction_P Parameter: Age (day) Value: 40
  misc_feature: MA Experiment 20001905 PARAMETER Experiment Name: At_Drought_Reproduction_P Parameter: Organism Value: A. thaliana
  misc_feature: MA Experiment 20001905 PARAMETER Experiment Name: At_Drought_Reproduction_P Parameter: Plant Line Value: WS
  misc_feature: MA Experiment 20001905 PARAMETER Experiment Name: At_Drought_Reproduction_P Parameter: Timepoint (day) Value: 10
  misc_feature: MA Experiment 20001905 PARAMETER Experiment Name: At_Drought_Reproduction_P Parameter: Tissue Value: Rosettes
  misc_feature: MA Experiment 20001905 PARAMETER Experiment Name: At_Drought_Reproduction_P Parameter: Treatment Value: Drought vs. No Drought

SEQ ID NO: 32008 - protein, 148 aa, Arabidopsis thaliana; identical to SEQ ID NO: 28418
  peptide (1)..(148): Ceres Seq. ID no. 13490082
  misc_feature (18)..(146): Pfam Name: Tim17/Tim22/Tim23 family Pfam Description: Tim17/Tim22/Tim23 family
  misc_feature (55)..(144): Homolog of NCBI NO: 18414605 NR Description: pore protein homolog [Arabidopsis thaliana]
  misc_feature (37)..(146): Homolog of NCBI NO: 34905526 NR Description: B1146F03.20 [Oryza sativa (japonica
  misc_feature (44)..(143): Homolog of NCBI NO: 16555405 NR Description: stress-inducible membrane pore protein [Bromus
  misc_feature (20)..(144): Homolog of NCBI NO: 7485023 NR Description: hypothetical protein - Arabidopsis thaliana
  misc_feature (1)..(38): Homolog of NCBI NO: 34906056 NR Description: P0698H10.23 [Oryza sativa (japonica
  misc_feature (101)..(143): Homolog of NCBI NO: 34906056 NR Description: P0698H10.23 [Oryza sativa (japonica
  misc_feature (1)..(143): Homolog of NCBI NO: 3758827 NR Description: amino acid selective channel protein
  misc_feature (1)..(143): Homolog of NCBI NO: 7488792 NR Description: core protein - garden pea
  misc_feature (1)..(148): Homolog of NCBI NO: 21536521 NR Description: putative membrane channel protein [Arabidopsis
  misc_feature (1)..(148): Homolog of NCBI NO: 15226998 NR Description: membrane channel protein -related [Arabidopsis

SEQ ID NO: 32009 - protein, 128 aa, Arabidopsis thaliana; identical to SEQ ID NO: 28419
  peptide (1)..(128): Ceres Seq. ID no. 13490083
  misc_feature (1)..(126): Pfam Name: Tim17/Tim22/Tim23 family Pfam Description: Tim17/Tim22/Tim23 family
  misc_feature (35)..(124): Homolog of NCBI NO: 18414605 NR Description: pore protein homolog [Arabidopsis thaliana]
  misc_feature (17)..(126): Homolog of NCBI NO: 34905526 NR Description: B1146F03.20 [Oryza sativa (japonica
  misc_feature (24)..(123): Homolog of NCBI NO: 16555405 NR Description: stress-inducible membrane pore protein [Bromus
  misc_feature (1)..(124): Homolog of NCBI NO: 7485023 NR Description: hypothetical protein - Arabidopsis thaliana
  misc_feature (1)..(18): Homolog of NCBI NO: 34906056 NR Description: P0698H10.23 [Oryza sativa (japonica
  misc_feature (81)..(123): Homolog of NCBI NO: 34906056 NR Description: P0698H10.23 [Oryza sativa (japonica
  misc_feature (1)..(123): Homolog of NCBI NO: 3758827 NR Description: amino acid selective channel protein
  misc_feature (1)..(123): Homolog of NCBI NO: 7488792 NR Description: core protein - garden pea
  misc_feature (1)..(128): Homolog of NCBI NO: 21536521 NR Description: putative membrane channel protein [Arabidopsis
  misc_feature (1)..(128): Homolog of NCBI NO: 15226998 NR Description: membrane channel protein -related [Arabidopsis

SEQ ID NO: 32010 - protein, 74 aa, Arabidopsis thaliana; identical to SEQ ID NO: 28420
  peptide (1)..(74): Ceres Seq. ID no. 13490084

SEQ ID NO: 32011 - DNA, 777 bp, Arabidopsis thaliana; identical to SEQ ID NO: 28421
  misc_feature (1)..(777): Ceres Seq. ID no. 12331800
  misc_feature: MA Experiment ID: 108434 Result: Up-regulated in Transcription
  misc_feature: MA Experiment 108434 PARAMETER Experiment Name: At_Root_Tips_cDNA_P Parameter: Tissue Value: Root Tips
  misc_feature: MA Experiment ID: 108579 Result: Down-regulated in Transcription
  misc_feature: MA Experiment 108579 PARAMETER Experiment Name: At_4deg_Cold_cDNA_P Parameter: Temperature (deg C) Value: 4 vs. 22
  misc_feature: MA Experiment 108579 PARAMETER Experiment Name: At_4deg_Cold_cDNA_P Parameter: Timepoint (hr) Value: 6
  misc_feature: MA Experiment 108579 PARAMETER Experiment Name: At_4deg_Cold_cDNA_P Parameter: Tissue Value: Aerial
  misc_feature: MA Experiment ID: 20000224 Result: Down-regulated in Transcription
  misc_feature: MA Experiment ID: 20000794 Result: Down-regulated in Transcription
  misc_feature: MA Experiment 20000794 PARAMETER Experiment Name: At_Petals_P Parameter: Age (day) Value: 23-25 days
  misc_feature: MA Experiment 20000794 PARAMETER Experiment Name: At_Petals_P Parameter: Plant Line Value: WS
  misc_feature: MA Experiment 20000794 PARAMETER Experiment Name: At_Petals_P Parameter: Tissue Value: Petals vs. Whole plant

SEQ ID NO: 32012 - protein, 133 aa, Arabidopsis thaliana; identical to SEQ ID NO: 28422
  peptide (1)..(133): Ceres Seq. ID no. 12331801
  misc_feature (31)..(129): Homolog of NCBI NO: 34872254 NR Description: similar to RIKEN cDNA 1110008F13 [Rattus
  misc_feature (12)..(129): Homolog of NCBI NO: 27704314 NR Description: similar to RIKEN cDNA 1110008F13
  misc_feature (12)..(129): Homolog of NCBI NO: 10047116 NR Description: putative Rab5-interacting protein [Homo sapiens]
  misc_feature (12)..(129): Homolog of NCBI NO: 13385630 NR Description: RIKEN cDNA 1110008F13 [Mus musculus]
  misc_feature (10)..(129): Homolog of NCBI NO: 27503935 NR Description: Similar to RIKEN cDNA 1110008F13 gene [Danio
  misc_feature (1)..(122): Homolog of NCBI NO: 14719336 NR Description: hypothetical protein [Oryza sativa]
  misc_feature (1)..(121): Homolog of NCBI NO: 8885547 NR Description: gb|AAF17201.1~gene_id:F2O15.9~similar to unknown
  misc_feature (1)..(133): Homolog of NCBI NO: 15238396 NR Description: putative Rab5-interacting protein - like; protein
  misc_feature (1)..(133): Homolog of NCBI NO: 18401926 NR Description: expressed protein

SEQ ID NO: 32013 - DNA, 1201 bp, Arabidopsis thaliana; identical to SEQ ID NO: 28423
  misc_feature (1)..(1201): Ceres Seq. ID no. 12680985
  misc_feature: MA Experiment ID: 108461 Result: Up-regulated in Transcription
  misc_feature: MA Experiment 108461 PARAMETER Experiment Name: At_Germinating_Seeds_cDNA_P Parameter: Age (day) Value: 1 vs. 0
  misc_feature: MA Experiment 108461 PARAMETER Experiment Name: At_Germinating_Seeds_cDNA_P Parameter: Tissue Value: Germinating Seeds
  misc_feature: MA Experiment ID: 108488 Result: Down-regulated in Transcription
  misc_feature: MA Experiment ID: 108573 Result: Up-regulated in Transcription
  misc_feature: MA Experiment 108573 PARAMETER Experiment Name: At_Drought_cDNA_P Parameter: Timepoint (hr) Value: 6
  misc_feature: MA Experiment 108573 PARAMETER Experiment Name: At_Drought_cDNA_P Parameter: Tissue Value: Aerial
  misc_feature: MA Experiment 108573 PARAMETER Experiment Name: At_Drought_cDNA_P Parameter: Treatment Value: Drought vs. No Drought
  misc_feature: MA Experiment ID: 108605 Result: Up-regulated in Transcription
  misc_feature: MA Experiment 108605 PARAMETER Experiment Name: At_100uM_ABA_cDNA_P Parameter: Timepoint (hr) Value: 6
  misc_feature: MA Experiment 108605 PARAMETER Experiment Name: At_100uM_ABA_cDNA_P Parameter: Tissue Value: Aerial
  misc_feature: MA Experiment 108605 PARAMETER Experiment Name: At_100uM_ABA_cDNA_P Parameter: Treatment Value: 100uM ABA vs. No Treatment
  misc_feature: MA Experiment ID: 108607 Result: Up-regulated in Transcription
  misc_feature: MA Experiment 108607 PARAMETER Experiment Name: At_100uM_ABA_cDNA_P Parameter: Timepoint (hr) Value: 4
  misc_feature: MA Experiment 108607 PARAMETER Experiment Name: At_100uM_ABA_cDNA_P Parameter: Tissue Value: Aerial
  misc_feature: MA Experiment 108607 PARAMETER Experiment Name: At_100uM_ABA_cDNA_P Parameter: Treatment Value: 100uM ABA vs. No Treatment
  misc_feature: MA Experiment ID: 20000071 Result: Up-regulated in Transcription
  misc_feature: MA Experiment 20000071 PARAMETER Experiment Name: At_100uM_ABA_Mutants_cDNA_P Parameter: Plant Line Value: CS8104
  misc_feature: MA Experiment 20000071 PARAMETER Experiment Name: At_100uM_ABA_Mutants_cDNA_P Parameter: Timepoint (hr) Value: 6
  misc_feature: MA Experiment 20000071 PARAMETER Experiment Name: At_100uM_ABA_Mutants_cDNA_P Parameter: Tissue Value: Aerial
  misc_feature: MA Experiment 20000071 PARAMETER Experiment Name: At_100uM_ABA_Mutants_cDNA_P Parameter: Treatment Value: 100uM ABA vs. No Treatment
  misc_feature: MA Experiment ID: 20000072 Result: Up-regulated in Transcription
  misc_feature: MA Experiment 20000072 PARAMETER Experiment Name: At_100uM_ABA_Mutants_cDNA_P Parameter: Plant Line Value: CS8105
  misc_feature: MA Experiment 20000072 PARAMETER Experiment Name: At_100uM_ABA_Mutants_cDNA_P Parameter: Timepoint (hr) Value: 6
  misc_feature: MA Experiment 20000072 PARAMETER Experiment Name: At_100uM_ABA_Mutants_cDNA_P Parameter: Tissue Value: Aerial
  misc_feature: MA Experiment 20000072 PARAMETER Experiment Name: At_100uM_ABA_Mutants_cDNA_P Parameter: Treatment Value: 100uM ABA vs. No Treatment
  misc_feature: MA Experiment ID: 20000117 Result: Up-regulated in Transcription
  misc_feature: MA Experiment 20000117 PARAMETER Experiment Name: At_100uM_ABA_Mutants_cDNA_P Parameter: Plant Line Value: Columbia
  misc_feature: MA Experiment 20000117 PARAMETER Experiment Name: At_100uM_ABA_Mutants_cDNA_P Parameter: Timepoint (hr) Value: 6
  misc_feature: MA Experiment 20000117 PARAMETER Experiment Name: At_100uM_ABA_Mutants_cDNA_P Parameter: Tissue Value: Aerial
  misc_feature: MA Experiment 20000117 PARAMETER Experiment Name: At_100uM_ABA_Mutants_cDNA_P Parameter: Treatment Value: 100uM ABA vs. No Treatment
  misc_feature: MA Experiment ID: 20000169 Result: Up-regulated in Transcription
  misc_feature: MA Experiment 20000169 PARAMETER Experiment Name: At_100uM_ABA_P Parameter: Age (day) Value: 14
  misc_feature: MA Experiment 20000169 PARAMETER Experiment Name: At_100uM_ABA_P Parameter: Organism Value: A. thaliana
  misc_feature: MA Experiment 20000169 PARAMETER Experiment Name: At_100uM_ABA_P Parameter: Plant Line Value: WS
  misc_feature: MA Experiment 20000169 PARAMETER Experiment Name: At_100uM_ABA_P Parameter: Timepoint (hr) Value: 6
  misc_feature: MA Experiment 20000169 PARAMETER Experiment Name: At_100uM_ABA_P Parameter: Tissue Value: Aerial
  misc_feature: MA Experiment 20000169 PARAMETER Experiment Name: At_100uM_ABA_P Parameter: Treatment Value: 100uM ABA vs. No Treatment
  misc_feature: MA Experiment ID: 20000180 Result: Up-regulated in Transcription
  misc_feature: MA Experiment 20000180 PARAMETER Experiment Name: At_Germinating_Seeds_P Parameter: Age (hr) Value: 24 vs. 0
  misc_feature: MA Experiment 20000180 PARAMETER Experiment Name: At_Germinating_Seeds_P Parameter: Tissue Value: Germinating Seeds
  misc_feature: MA Experiment ID: 20000267 Result: Up-regulated in Transcription
  misc_feature: MA Experiment 20000267 PARAMETER Experiment Name: At_Drought_P Parameter: Age (day) Value: 7
  misc_feature: MA Experiment 20000267 PARAMETER Experiment Name: At_Drought_P Parameter: Organism Value: A. thaliana
  misc_feature: MA Experiment 20000267 PARAMETER Experiment Name: At_Drought_P Parameter: Plant Line Value: WS
  misc_feature: MA Experiment 20000267 PARAMETER Experiment Name: At_Drought_P Parameter: Timepoint (hr) Value: 6
  misc_feature: MA Experiment 20000267 PARAMETER Experiment Name: At_Drought_P Parameter: Tissue Value: Whole Plant
  misc_feature: MA Experiment 20000267 PARAMETER Experiment Name: At_Drought_P Parameter: Treatment Value: Drought vs. No Drought
  misc_feature: MA Experiment ID: 20000436 Result: Up-regulated in Transcription
  misc_feature: MA Experiment 20000436 PARAMETER Experiment Name: At_Drought_P Parameter: Age (day) Value: 7
  misc_feature: MA Experiment 20000436 PARAMETER Experiment Name: At_Drought_P Parameter: Organism Value: A. thaliana
  misc_feature: MA Experiment 20000436 PARAMETER Experiment Name: At_Drought_P Parameter: Plant Line Value: WS
  misc_feature: MA Experiment 20000436 PARAMETER Experiment Name: At_Drought_P Parameter: Timepoint (hr) Value: 12
  misc_feature: MA Experiment 20000436 PARAMETER Experiment Name: At_Drought_P Parameter: Tissue Value: Whole Plant
  misc_feature: MA Experiment 20000436 PARAMETER Experiment Name: At_Drought_P Parameter: Treatment Value: Drought vs. No Drought
  misc_feature: MA Experiment ID: 20000437 Result: Up-regulated in Transcription
  misc_feature: MA Experiment 20000437 PARAMETER Experiment Name: At_Drought_P Parameter: Age (day) Value: 8
  misc_feature: MA Experiment 20000437 PARAMETER Experiment Name: At_Drought_P Parameter: Organism Value: A. thaliana
  misc_feature: MA Experiment 20000437 PARAMETER Experiment Name: At_Drought_P Parameter: Plant Line Value: WS
  misc_feature: MA Experiment 20000437 PARAMETER Experiment Name: At_Drought_P Parameter: Timepoint (hr) Value: 24
  misc_feature: MA Experiment 20000437 PARAMETER Experiment Name: At_Drought_P Parameter: Tissue Value: Whole Plant
  misc_feature: MA Experiment 20000437 PARAMETER Experiment Name: At_Drought_P Parameter: Treatment Value: Drought vs. No Drought
  misc_feature: MA Experiment ID: 20001558 Result: Down-regulated in Transcription
  misc_feature: MA Experiment 20001558 PARAMETER Experiment Name: At_Drought_Soil_Dry_P Parameter: Age (day) Value: 27
  misc_feature: MA Experiment 20001558 PARAMETER Experiment Name: At_Drought_Soil_Dry_P Parameter: Organism Value: A. thaliana
  misc_feature: MA Experiment 20001558 PARAMETER Experiment Name: At_Drought_Soil_Dry_P Parameter: Plant Line Value: WS
  misc_feature: MA Experiment 20001558 PARAMETER Experiment Name: At_Drought_Soil_Dry_P Parameter: Post Timepoint (hr) Value: 6
  misc_feature: MA Experiment 20001558 PARAMETER Experiment Name: At_Drought_Soil_Dry_P Parameter: Post-Treatment Value: Re-Water vs. No Drought
  misc_feature: MA Experiment 20001558 PARAMETER Experiment Name: At_Drought_Soil_Dry_P Parameter: Timepoint (day) Value: 13
  misc_feature: MA Experiment 20001558 PARAMETER Experiment Name: At_Drought_Soil_Dry_P Parameter: Treatment Value: Drought vs. No Drought
  misc_feature: MA Experiment ID: 20001559 Result: Up-regulated in Transcription
  misc_feature: MA Experiment 20001559 PARAMETER Experiment Name: At_Drought_Soil_Dry_P Parameter: Age (day) Value: 28
  misc_feature: MA Experiment 20001559 PARAMETER Experiment Name: At_Drought_Soil_Dry_P Parameter: Organism Value: A. thaliana
  misc_feature: MA Experiment 20001559 PARAMETER Experiment Name: At_Drought_Soil_Dry_P Parameter: Plant Line Value: WS
  misc_feature: MA Experiment 20001559 PARAMETER Experiment Name: At_Drought_Soil_Dry_P Parameter: Post Timepoint (hr) Value: 29
  misc_feature: MA Experiment 20001559 PARAMETER Experiment Name: At_Drought_Soil_Dry_P Parameter: Post-Treatment Value: Re-Water vs. No Drought
  misc_feature: MA Experiment 20001559 PARAMETER Experiment Name: At_Drought_Soil_Dry_P Parameter: Timepoint (day) Value: 14
  misc_feature: MA Experiment 20001559 PARAMETER Experiment Name: At_Drought_Soil_Dry_P Parameter: Treatment Value: Drought vs. No Drought
  misc_feature: MA Experiment ID: 20001904 Result: Up-regulated in Transcription
  misc_feature: MA Experiment 20001904 PARAMETER Experiment Name: At_Drought_Reproduction_P Parameter: Age (day) Value: 37
  misc_feature: MA Experiment 20001904 PARAMETER Experiment Name: At_Drought_Reproduction_P Parameter: Organism Value: A. thaliana
  misc_feature: MA Experiment 20001904 PARAMETER Experiment Name: At_Drought_Reproduction_P Parameter: Plant Line Value: WS
  misc_feature: MA Experiment 20001904 PARAMETER Experiment Name: At_Drought_Reproduction_P Parameter: Timepoint (day) Value: 7
  misc_feature: MA Experiment 20001904 PARAMETER Experiment Name: At_Drought_Reproduction_P Parameter: Tissue Value: Rosettes
  misc_feature: MA Experiment 20001904 PARAMETER Experiment Name: At_Drought_Reproduction_P Parameter: Treatment Value: Drought vs. No Drought

SEQ ID NO: 32014 - protein, 340 aa, Arabidopsis thaliana; identical to SEQ ID NO: 28424
  peptide (1)..(340): Ceres Seq. ID no. 12680986
  misc_feature (111)..(272): Pfam Name: Isoflavone reductase Pfam Description: Isoflavone reductase
  misc_feature (176)..(331): Homolog of NCBI NO: 8744993 NR Description: hypothetical protein P1295.07 [Leishmania major]
  misc_feature (111)..(310): Homolog of NCBI NO: 23037289 NR Description: hypothetical protein [Oenococcus oeni MCW]
  misc_feature (112)..(335): Homolog of NCBI NO: 37523204 NR Description: probable oxidoreductase [Gloeobacter violaceus]
  misc_feature (191)..(334): Homolog of NCBI NO: 11346175 NR Description: hypothetical protein F1N13_50 - Arabidopsis
  misc_feature (109)..(332): Homolog of NCBI NO: 18398333 NR Description: expressed protein
  misc_feature (109)..(321): Homolog of NCBI NO: 38346147 NR Description: OSJNBb0118P14.7 [Oryza sativa (japonica
  misc_feature (111)..(334): Homolog of NCBI NO: 21592373 NR Description: unknown [Arabidopsis thaliana]
  misc_feature (111)..(334): Homolog of NCBI NO: 18417824 NR Description: putative protein
  misc_feature (54)..(340): Homolog of NCBI NO: 10129651 NR Description: putative protein [Arabidopsis thaliana]
  misc_feature (54)..(340): Homolog of NCBI NO: 18416362 NR Description: putative protein

SEQ ID NO: 32015 - protein, 287 aa, Arabidopsis thaliana; identical to SEQ ID NO: 28425
  peptide (1)..(287): Ceres Seq. ID no. 12680987
  misc_feature (58)..(219): Pfam Name: Isoflavone reductase Pfam Description: Isoflavone reductase
  misc_feature (123)..(278): Homolog of NCBI NO: 8744993 NR Description: hypothetical protein P1295.07 [Leishmania major]
  misc_feature (58)..(257): Homolog of NCBI NO: 23037289 NR Description: hypothetical protein [Oenococcus oeni MCW]
  misc_feature (59)..(282): Homolog of NCBI NO: 37523204 NR Description: probable oxidoreductase [Gloeobacter violaceus]
  misc_feature (138)..(281): Homolog of NCBI NO: 11346175 NR Description: hypothetical protein F1N13_50 - Arabidopsis
  misc_feature (56)..(279): Homolog of NCBI NO: 18398333 NR Description: expressed protein
  misc_feature (56)..(268): Homolog of NCBI NO: 38346147 NR Description: OSJNBb0118P14.7 [Oryza sativa (japonica
  misc_feature (58)..(281): Homolog of NCBI NO: 21592373 NR Description: unknown [Arabidopsis thaliana]
  misc_feature (58)..(281): Homolog of NCBI NO: 18417824 NR Description: putative protein
  misc_feature (1)..(287): Homolog of NCBI NO: 10129651 NR Description: putative protein [Arabidopsis thaliana]
  misc_feature (1)..(287): Homolog of NCBI NO: 18416362 NR Description: putative protein

SEQ ID NO: 32016 - DNA, 1531 bp, Arabidopsis thaliana; identical to SEQ ID NO: 28426
  misc_feature (1)..(1531): Ceres Seq. ID no. 12377341
  misc_feature: MA Experiment ID: 108434 Result: Up-regulated in Transcription
  misc_feature: MA Experiment 108434 PARAMETER Experiment Name: At_Root_Tips_cDNA_P Parameter: Tissue Value: Root Tips
  misc_feature: MA Experiment ID: 108462 Result: Down-regulated in Transcription
  misc_feature: MA Experiment 108462 PARAMETER Experiment Name: At_Germinating_Seeds_cDNA_P Parameter: Age (day) Value: 2 vs. 0
  misc_feature: MA Experiment 108462 PARAMETER Experiment Name: At_Germinating_Seeds_cDNA_P Parameter: Tissue Value: Germinating Seeds
  misc_feature: MA Experiment ID: 108463 Result: Down-regulated in Transcription
  misc_feature: MA Experiment 108463 PARAMETER Experiment Name: At_Germinating_Seeds_cDNA_P Parameter: Age (day) Value: 3 vs. 0
  misc_feature: MA Experiment 108463 PARAMETER Experiment Name: At_Germinating_Seeds_cDNA_P Parameter: Tissue Value: Germinating Seeds
  misc_feature: MA Experiment ID: 108573 Result: Down-regulated in Transcription
  misc_feature: MA Experiment 108573 PARAMETER Experiment Name: At_Drought_cDNA_P Parameter: Timepoint (hr) Value: 6
  misc_feature: MA Experiment 108573 PARAMETER Experiment Name: At_Drought_cDNA_P Parameter: Tissue Value: Aerial
  misc_feature: MA Experiment 108573 PARAMETER Experiment Name: At_Drought_cDNA_P Parameter: Treatment Value: Drought vs. No Drought
  misc_feature: MA Experiment ID: 108595 Result: Down-regulated in Transcription
  misc_feature: MA Experiment 108595 PARAMETER Experiment Name: At_Ler-pi_Ovule_cDNA_P Parameter: Plant Line Value: null
  misc_feature: MA Experiment ID: 20000224 Result: Up-regulated in Transcription
  misc_feature: MA Experiment ID: 20000227 Result: Up-regulated in Transcription
  misc_feature: MA Experiment 20000227 PARAMETER Experiment Name: At_Root-Tips-vs-Tops_P Parameter: Tissue Value: Root Tips vs. Root Tops
  misc_feature: MA Experiment ID: 20000286 Result: Up-regulated in Transcription
  misc_feature: MA Experiment 20000286 PARAMETER Experiment Name: At_Open_Flower_P Parameter: Age (day) Value: 21
  misc_feature: MA Experiment 20000286 PARAMETER Experiment Name: At_Open_Flower_P Parameter: Plant Line Value: WS
  misc_feature: MA Experiment 20000286 PARAMETER Experiment Name: At_Open_Flower_P Parameter: Tissue Value: Half Open vs. Whole Plant
  misc_feature: MA Experiment ID: 20001451 Result: Down-regulated in Transcription
  misc_feature: MA Experiment 20001451 PARAMETER Experiment Name: At_Far-red-induction_P Parameter: Age (day) Value: 7
  misc_feature: MA Experiment 20001451 PARAMETER Experiment Name: At_Far-red-induction_P Parameter: Light Value: Far-red vs. White
  misc_feature: MA Experiment 20001451 PARAMETER Experiment Name: At_Far-red-induction_P Parameter: Organism Value: A. thaliana
  misc_feature: MA Experiment 20001451 PARAMETER Experiment Name: At_Far-red-induction_P Parameter: Plant Line Value: Columbia
  misc_feature: MA Experiment 20001451 PARAMETER Experiment Name: At_Far-red-induction_P Parameter: Timepoint (hr) Value: 24
  misc_feature: MA Experiment 20001451 PARAMETER Experiment Name: At_Far-red-induction_P Parameter: Tissue Value: Whole Plant
  misc_feature: MA Experiment ID: 20001557 Result: Up-regulated in Transcription
  misc_feature: MA Experiment 20001557 PARAMETER Experiment Name: At_Drought_Soil_Dry_P Parameter: Age (day) Value: 27
  misc_feature: MA Experiment 20001557 PARAMETER Experiment Name: At_Drought_Soil_Dry_P Parameter: Organism Value: A. thaliana
  misc_feature: MA Experiment 20001557 PARAMETER Experiment Name: At_Drought_Soil_Dry_P Parameter: Plant Line Value: WS
  misc_feature: MA Experiment 20001557 PARAMETER Experiment Name: At_Drought_Soil_Dry_P Parameter: Post Timepoint (hr) Value: 3
  misc_feature: MA Experiment 20001557 PARAMETER Experiment Name: At_Drought_Soil_Dry_P Parameter: Post-Treatment Value: Re-Water vs. No Drought
  misc_feature: MA Experiment 20001557 PARAMETER Experiment Name: At_Drought_Soil_Dry_P Parameter: Timepoint (day) Value: 13
  misc_feature: MA Experiment 20001557 PARAMETER Experiment Name: At_Drought_Soil_Dry_P Parameter: Treatment Value: Drought vs. No Drought
  misc_feature: MA Experiment ID: 20001558 Result: Up-regulated in Transcription
  misc_feature: MA Experiment 20001558 PARAMETER Experiment Name: At_Drought_Soil_Dry_P Parameter: Age (day) Value: 27
  misc_feature: MA Experiment 20001558 PARAMETER Experiment Name: At_Drought_Soil_Dry_P Parameter: Organism Value: A. thaliana
  misc_feature: MA Experiment 20001558 PARAMETER Experiment Name: At_Drought_Soil_Dry_P Parameter: Plant Line Value: WS
  misc_feature: MA Experiment 20001558 PARAMETER Experiment Name: At_Drought_Soil_Dry_P Parameter: Post Timepoint (hr) Value: 6
  misc_feature: MA Experiment 20001558 PARAMETER Experiment Name: At_Drought_Soil_Dry_P Parameter: Post-Treatment Value: Re-Water vs. No Drought
  misc_feature: MA Experiment 20001558 PARAMETER Experiment Name: At_Drought_Soil_Dry_P Parameter: Timepoint (day) Value: 13
  misc_feature: MA Experiment 20001558 PARAMETER Experiment Name: At_Drought_Soil_Dry_P Parameter: Treatment Value: Drought vs. No Drought

SEQ ID NO: 32017 - protein, 419 aa, Arabidopsis thaliana; identical to SEQ ID NO: 28427
  peptide (1)..(419): Ceres Seq. ID no. 12377342
  misc_feature (1)..(154): Homolog of NCBI NO: 15219546 NR Description: hypothetical protein; protein id: At1g73770.1
  misc_feature (26)..(419): Homolog of NCBI NO: 7485722 NR Description: hypothetical protein F18E5.80 - Arabidopsis
  misc_feature (1)..(419): Homolog of NCBI NO: 18415698 NR Description: putative protein
  misc_feature (1)..(419): Homolog of NCBI NO: 18401816 NR Description: expressed protein

SEQ ID NO: 32018 - protein, 253 aa, Arabidopsis thaliana; identical to SEQ ID NO: 28428
  peptide (1)..(253): Ceres Seq. ID no. 12377343
  misc_feature (1)..(253): Homolog of NCBI NO: 7485722 NR Description: hypothetical protein F18E5.80 - Arabidopsis
  misc_feature (1)..(253): Homolog of NCBI NO: 18415698 NR Description: putative protein
  misc_feature (1)..(253): Homolog of NCBI NO: 18401816 NR Description: expressed protein

SEQ ID NO: 32019 - protein, 245 aa, Arabidopsis thaliana; identical to SEQ ID NO: 28429
  peptide (1)..(245): Ceres Seq. ID no. 12377344
  misc_feature (1)..(245): Homolog of NCBI NO: 7485722 NR Description: hypothetical protein F18E5.80 - Arabidopsis
  misc_feature (1)..(245): Homolog of NCBI NO: 18415698 NR Description: putative protein
  misc_feature (1)..(245): Homolog of NCBI NO: 18401816 NR Description: expressed protein

SEQ ID NO: 32020 - DNA, 799 bp, Arabidopsis thaliana; identical to SEQ ID NO: 28430
  misc_feature (1)..(799): Ceres Seq. ID no. 12393692
  misc_feature: MA Experiment ID: 108434 Result: Down-regulated in Transcription
  misc_feature: MA Experiment 108434 PARAMETER Experiment Name: At_Root_Tips_cDNA_P Parameter: Tissue Value: Root Tips
  misc_feature: MA Experiment ID: 108435 Result: Up-regulated in Transcription
  misc_feature: MA Experiment 108435 PARAMETER Experiment Name: At_stm_Mutants_cDNA_P Parameter: Plant Line Value: wt Landsburg vs stm
  misc_feature: MA Experiment 108435 PARAMETER Experiment Name: At_stm_Mutants_cDNA_P Parameter: Tissue Value: Shoot Apical Meristem Region
  misc_feature: MA Experiment ID: 108461 Result: Down-regulated in Transcription
  misc_feature: MA Experiment 108461 PARAMETER Experiment Name: At_Germinating_Seeds_cDNA_P Parameter: Age (day) Value: 1 vs. 0
  misc_feature: MA Experiment 108461 PARAMETER Experiment Name: At_Germinating_Seeds_cDNA_P Parameter: Tissue Value: Germinating Seeds
  misc_feature: MA Experiment ID: 108462 Result: Down-regulated in Transcription
  misc_feature: MA Experiment 108462 PARAMETER Experiment Name: At_Germinating_Seeds_cDNA_P Parameter: Age (day) Value: 2 vs. 0
  misc_feature: MA Experiment 108462 PARAMETER Experiment Name: At_Germinating_Seeds_cDNA_P Parameter: Tissue Value: Germinating Seeds
  misc_feature: MA Experiment ID: 108463 Result: Down-regulated in Transcription
  misc_feature: MA Experiment 108463 PARAMETER Experiment Name: At_Germinating_Seeds_cDNA_P Parameter: Age (day) Value: 3 vs. 0
  misc_feature: MA Experiment 108463 PARAMETER Experiment Name: At_Germinating_Seeds_cDNA_P Parameter: Tissue Value: Germinating Seeds
  misc_feature: MA Experiment ID: 108573 Result: Up-regulated in Transcription
  misc_feature: MA Experiment 108573 PARAMETER Experiment Name: At_Drought_cDNA_P Parameter: Timepoint (hr) Value: 6
  misc_feature: MA Experiment 108573 PARAMETER Experiment Name: At_Drought_cDNA_P Parameter: Tissue Value: Aerial
  misc_feature: MA Experiment 108573 PARAMETER Experiment Name: At_Drought_cDNA_P Parameter: Treatment Value: Drought vs. No Drought
  misc_feature: MA Experiment ID: 108579 Result: Up-regulated in Transcription
  misc_feature: MA Experiment 108579 PARAMETER Experiment Name: At_4deg_Cold_cDNA_P Parameter: Temperature (deg C) Value: 4 vs. 22
  misc_feature: MA Experiment 108579 PARAMETER Experiment Name: At_4deg_Cold_cDNA_P Parameter: Timepoint (hr) Value: 6
  misc_feature: MA Experiment 108579 PARAMETER Experiment Name: At_4deg_Cold_cDNA_P Parameter: Tissue Value: Aerial
  misc_feature: MA Experiment ID: 20000071 Result: Up-regulated in Transcription
  misc_feature: MA Experiment 20000071 PARAMETER Experiment Name: At_100uM_ABA_Mutants_cDNA_P Parameter: Plant Line Value: CS8104
  misc_feature: MA Experiment 20000071 PARAMETER Experiment Name: At_100uM_ABA_Mutants_cDNA_P Parameter: Timepoint (hr) Value: 6
  misc_feature: MA Experiment 20000071 PARAMETER Experiment Name: At_100uM_ABA_Mutants_cDNA_P Parameter: Tissue Value: Aerial
  misc_feature: MA Experiment 20000071 PARAMETER Experiment Name: At_100uM_ABA_Mutants_cDNA_P Parameter: Treatment Value: 100uM ABA vs. No Treatment
  misc_feature: MA Experiment ID: 20000089 Result: Up-regulated in Transcription
  misc_feature: MA Experiment ID: 20000117 Result: Up-regulated in Transcription
  misc_feature: MA Experiment 20000117 PARAMETER Experiment Name: At_100uM_ABA_Mutants_cDNA_P Parameter: Plant Line Value: Columbia
  misc_feature: MA Experiment 20000117 PARAMETER Experiment Name: At_100uM_ABA_Mutants_cDNA_P Parameter: Timepoint (hr) Value: 6
  misc_feature: MA Experiment 20000117 PARAMETER Experiment Name: At_100uM_ABA_Mutants_cDNA_P Parameter: Tissue Value: Aerial
  misc_feature: MA Experiment 20000117 PARAMETER Experiment Name: At_100uM_ABA_Mutants_cDNA_P Parameter: Treatment Value: 100uM ABA vs. No Treatment
  misc_feature: MA Experiment ID: 20000144 Result: Up-regulated in Transcription
  misc_feature: MA Experiment 20000144 PARAMETER Experiment Name: At_42deg_Heat_cDNA_P Parameter: Temperature (deg C) Value: 42 vs. 22
  misc_feature: MA Experiment 20000144 PARAMETER Experiment Name: At_42deg_Heat_cDNA_P Parameter: Timepoint (hr) Value: 1
  misc_feature: MA Experiment 20000144 PARAMETER Experiment Name: At_42deg_Heat_cDNA_P Parameter: Tissue Value: Aerial
  misc_feature: MA Experiment ID: 20000171 Result: Up-regulated in Transcription
  misc_feature: MA Experiment 20000171 PARAMETER Experiment Name: At_42deg_Heat_P Parameter: Age (day) Value: 14
  misc_feature: MA Experiment 20000171 PARAMETER Experiment Name: At_42deg_Heat_P Parameter: Organism Value: A. thaliana
  misc_feature: MA Experiment 20000171 PARAMETER Experiment Name: At_42deg_Heat_P Parameter: Plant Line Value: WS
  misc_feature: MA Experiment 20000171 PARAMETER Experiment Name: At_42deg_Heat_P Parameter: Temperature (deg C) Value: 42 vs. 22
  misc_feature: MA Experiment 20000171 PARAMETER Experiment Name: At_42deg_Heat_P Parameter: Timepoint (hr) Value: 1
  misc_feature: MA Experiment 20000171 PARAMETER Experiment Name: At_42deg_Heat_P Parameter: Tissue Value: Aerial
  misc_feature: MA Experiment ID: 20000179 Result: Down-regulated in Transcription
  misc_feature: MA Experiment 20000179 PARAMETER Experiment Name: At_Germinating_Seeds_P Parameter: Age (hr) Value: 6 vs. 0
  misc_feature: MA Experiment 20000179 PARAMETER Experiment Name: At_Germinating_Seeds_P Parameter: Tissue Value: Germinating Seeds
  misc_feature: MA Experiment ID: 20000180 Result: Down-regulated in Transcription
  misc_feature: MA Experiment 20000180 PARAMETER Experiment Name: At_Germinating_Seeds_P Parameter: Age (hr) Value: 24 vs. 0
  misc_feature: MA Experiment 20000180 PARAMETER Experiment Name: At_Germinating_Seeds_P Parameter: Tissue Value: Germinating Seeds
  misc_feature: MA Experiment ID: 20000185 Result: Down-regulated in Transcription
  misc_feature: MA Experiment 20000185 PARAMETER Experiment Name: At_Roots__P Parameter: Age (day) Value: 7 vs. 21
  misc_feature: MA Experiment 20000185 PARAMETER Experiment Name: At_Roots__P Parameter: Organism Value: A. thaliana
  misc_feature: MA Experiment 20000185 PARAMETER Experiment Name: At_Roots__P Parameter: Tissue Value: Roots vs. Whole Plant
  misc_feature: MA Experiment ID: 20000214 Result: Up-regulated in Transcription
  misc_feature: MA Experiment 20000214 PARAMETER Experiment Name: At_4deg_Cold_P Parameter: Timepoint (hr) Value: 6
  misc_feature: MA Experiment ID: 20000437 Result: Up-regulated in Transcription
  misc_feature: MA Experiment 20000437 PARAMETER Experiment Name: At_Drought_P Parameter: Age (day) Value: 8
  misc_feature: MA Experiment 20000437 PARAMETER Experiment Name: At_Drought_P Parameter: Organism Value: A. thaliana
  misc_feature: MA Experiment 20000437 PARAMETER Experiment Name: At_Drought_P Parameter: Plant Line Value: WS
  misc_feature: MA Experiment 20000437 PARAMETER Experiment Name: At_Drought_P Parameter: Timepoint (hr) Value: 24
  misc_feature: MA Experiment 20000437 PARAMETER Experiment Name: At_Drought_P Parameter: Tissue Value: Whole Plant
  misc_feature: MA Experiment 20000437 PARAMETER Experiment Name: At_Drought_P Parameter: Treatment Value: Drought vs. No Drought
  misc_feature: MA Experiment ID: 20001248 Result: Up-regulated in Transcription
  misc_feature: MA Experiment 20001248 PARAMETER Experiment Name: At_Far-red-induction_P Parameter: Age (day) Value: 7
  misc_feature: MA Experiment 20001248 PARAMETER Experiment Name: At_Far-red-induction_P Parameter: Light Value: Far-red vs. White
  misc_feature: MA Experiment 20001248 PARAMETER Experiment Name: At_Far-red-induction_P Parameter: Organism Value: A. thaliana
  misc_feature: MA Experiment 20001248 PARAMETER Experiment Name: At_Far-red-induction_P Parameter: Plant Line Value: Columbia
  misc_feature: MA Experiment 20001248 PARAMETER Experiment Name: At_Far-red-induction_P Parameter: Timepoint (hr) Value: 4
  misc_feature: MA Experiment 20001248 PARAMETER Experiment Name: At_Far-red-induction_P Parameter: Tissue Value: Whole Plant

SEQ ID NO: 32021 - protein, 153 aa, Arabidopsis thaliana; identical to SEQ ID NO: 28431
  peptide (1)..(153): Ceres Seq. ID no. 12393693
  misc_feature (38)..(153): Homolog of NCBI NO: 4097553 NR Description: ATFP6 [Arabidopsis thaliana]
  misc_feature (1)..(153): Homolog of NCBI NO: 18418567 NR Description: copper chaperone (CCH)-related
  misc_feature (1)..(153): Homolog of NCBI NO: 21536547 NR Description: farnesylated protein (ATFP6) [Arabidopsis
  misc_feature (1)..(153): Homolog of NCBI NO: 15233937 NR Description: copper chaperone (CCH)-related

SEQ ID NO: 32022 - protein, 144 aa, Arabidopsis thaliana; identical to SEQ ID NO: 28432
  peptide (1)..(144): Ceres Seq. ID no. 12393694
  misc_feature (29)..(144): Homolog of NCBI NO: 4097553 NR Description: ATFP6 [Arabidopsis thaliana]
  misc_feature (1)..(144): Homolog of NCBI NO: 18418567 NR Description: copper chaperone (CCH)-related
  misc_feature (1)..(144): Homolog of NCBI NO: 21536547 NR Description: farnesylated protein (ATFP6) [Arabidopsis
  misc_feature (1)..(144): Homolog of NCBI NO: 15233937 NR Description: copper chaperone (CCH)-related

SEQ ID NO: 32023 - protein, 120 aa, Arabidopsis thaliana; identical to SEQ ID NO: 28433
  peptide (1)..(120): Ceres Seq. ID no. 12393695
  misc_feature (5)..(120): Homolog of NCBI NO: 4097553 NR Description: ATFP6 [Arabidopsis thaliana]
  misc_feature (1)..(120): Homolog of NCBI NO: 18418567 NR Description: copper chaperone (CCH)-related
  misc_feature (1)..(120): Homolog of NCBI NO: 21536547 NR Description: farnesylated protein (ATFP6) [Arabidopsis
  misc_feature (1)..(120): Homolog of NCBI NO: 15233937 NR Description: copper chaperone (CCH)-related

SEQ ID NO: 32024 - DNA, 597 bp, Arabidopsis thaliana; identical to SEQ ID NO: 28434
  misc_feature (1)..(597): Ceres Seq. ID no. 12331802
  misc_feature: MA Experiment ID: 108434 Result: Up-regulated in Transcription
  misc_feature: MA Experiment 108434 PARAMETER Experiment Name: At_Root_Tips_cDNA_P Parameter: Tissue Value: Root Tips
  misc_feature: MA Experiment ID: 108462 Result: Down-regulated in Transcription
  misc_feature: MA Experiment 108462 PARAMETER Experiment Name: At_Germinating_Seeds_cDNA_P Parameter: Age (day) Value: 2 vs. 0
  misc_feature: MA Experiment 108462 PARAMETER Experiment Name: At_Germinating_Seeds_cDNA_P Parameter: Tissue Value: Germinating Seeds
  misc_feature: MA Experiment ID: 108463 Result: Down-regulated in Transcription
  misc_feature: MA Experiment 108463 PARAMETER Experiment Name: At_Germinating_Seeds_cDNA_P Parameter: Age (day) Value: 3 vs. 0
  misc_feature: MA Experiment 108463 PARAMETER Experiment Name: At_Germinating_Seeds_cDNA_P Parameter: Tissue Value: Germinating Seeds
  misc_feature: MA Experiment ID: 108464 Result: Down-regulated in Transcription
  misc_feature: MA Experiment 108464 PARAMETER Experiment Name: At_Germinating_Seeds_cDNA_P Parameter: Age (day) Value: 4 vs. 0
  misc_feature: MA Experiment 108464 PARAMETER Experiment Name: At_Germinating_Seeds_cDNA_P Parameter: Tissue Value: Germinating Seeds
  misc_feature: MA Experiment ID: 108573 Result: Down-regulated in Transcription
  misc_feature: MA Experiment 108573 PARAMETER Experiment Name: At_Drought_cDNA_P Parameter: Timepoint (hr) Value: 6
  misc_feature: MA Experiment 108573 PARAMETER Experiment Name: At_Drought_cDNA_P Parameter: Tissue Value: Aerial
  misc_feature: MA Experiment 108573 PARAMETER Experiment Name: At_Drought_cDNA_P Parameter: Treatment Value: Drought vs. No Drought
  misc_feature: MA Experiment ID: 108576 Result: Up-regulated in Transcription
  misc_feature: MA Experiment 108576 PARAMETER Experiment Name: At_42deg_Heat_cDNA_P Parameter: Temperature (deg C) Value: 42 vs. 22
  misc_feature: MA Experiment 108576 PARAMETER Experiment Name: At_42deg_Heat_cDNA_P Parameter: Timepoint (hr) Value: 1
  misc_feature: MA Experiment 108576 PARAMETER Experiment Name: At_42deg_Heat_cDNA_P Parameter: Tissue Value: Aerial
  misc_feature: MA Experiment ID: 108585 Result: Down-regulated in Transcription
  misc_feature: MA Experiment 108585 PARAMETER Experiment Name: At_5mM_NaNP_cDNA_P Parameter: Timepoint (hr) Value: 6
  misc_feature: MA Experiment 108585 PARAMETER Experiment Name: At_5mM_NaNP_cDNA_P Parameter: Tissue Value: Aerial
  misc_feature: MA Experiment 108585 PARAMETER Experiment Name: At_5mM_NaNP_cDNA_P Parameter: Treatment Value: null
  misc_feature: MA Experiment ID: 108595 Result: Up-regulated in Transcription
  misc_feature: MA Experiment 108595 PARAMETER Experiment Name: At_Ler-pi_Ovule_cDNA_P Parameter: Plant Line Value: null
  misc_feature: MA Experiment ID: 20000070 Result: Up-regulated in Transcription
  misc_feature: MA Experiment 20000070 PARAMETER Experiment Name: At_100uM_ABA_Mutants_cDNA_P Parameter: Plant Line Value: CS24
  misc_feature: MA Experiment 20000070 PARAMETER Experiment Name: At_100uM_ABA_Mutants_cDNA_P Parameter: Timepoint (hr) Value: 6
  misc_feature: MA Experiment 20000070 PARAMETER Experiment Name: At_100uM_ABA_Mutants_cDNA_P Parameter: Tissue Value: Aerial
  misc_feature: MA Experiment 20000070 PARAMETER Experiment Name: At_100uM_ABA_Mutants_cDNA_P Parameter: Treatment Value: 100uM ABA vs. No Treatment
  misc_feature: MA Experiment ID: 20000093 Result: Up-regulated in Transcription
  misc_feature: MA Experiment 20000093 PARAMETER Experiment Name: At_42deg_Heat_cDNA_P Parameter: Temperature (deg C) Value: 42 vs. 22
  misc_feature: MA Experiment 20000093 PARAMETER Experiment Name: At_42deg_Heat_cDNA_P Parameter: Timepoint (hr) Value: 0.5
  misc_feature: MA Experiment 20000093 PARAMETER Experiment Name: At_42deg_Heat_cDNA_P Parameter: Tissue Value: Aerial
  misc_feature: MA Experiment ID: 20000111 Result: Up-regulated in Transcription
  misc_feature: MA Experiment 20000111 PARAMETER Experiment Name: At_42deg_Heat_cDNA_P Parameter: Temperature (deg C) Value: 42 vs. 22
  misc_feature: MA Experiment 20000111 PARAMETER Experiment Name: At_42deg_Heat_cDNA_P Parameter: Timepoint (hr) Value: 6
  misc_feature: MA Experiment 20000111 PARAMETER Experiment Name: At_42deg_Heat_cDNA_P Parameter: Tissue Value: Aerial
  misc_feature: MA Experiment ID: 20000112 Result: Up-regulated in Transcription
  misc_feature: MA Experiment 20000112 PARAMETER Experiment Name: At_42deg_Heat_cDNA_P Parameter: Temperature (deg C) Value: 42 vs. 22
  misc_feature: MA Experiment 20000112 PARAMETER Experiment Name: At_42deg_Heat_cDNA_P Parameter: Timepoint (hr) Value: 2
  misc_feature: MA Experiment 20000112 PARAMETER Experiment Name: At_42deg_Heat_cDNA_P Parameter: Tissue Value: Aerial
  misc_feature: MA Experiment ID: 20000113 Result: Up-regulated in Transcription
  misc_feature: MA Experiment 20000113 PARAMETER Experiment Name: At_42deg_Heat_cDNA_P Parameter: Temperature (deg C) Value: 42 vs. 22
  misc_feature: MA Experiment 20000113 PARAMETER Experiment Name: At_42deg_Heat_cDNA_P Parameter: Timepoint (hr) Value: 8
  misc_feature: MA Experiment 20000113 PARAMETER Experiment Name: At_42deg_Heat_cDNA_P Parameter: Tissue Value: Aerial
  misc_feature: MA Experiment ID: 20000144 Result: Up-regulated in Transcription
  misc_feature: MA Experiment 20000144 PARAMETER Experiment Name: At_42deg_Heat_cDNA_P Parameter: Temperature (deg C) Value: 42 vs. 22
  misc_feature: MA Experiment 20000144 PARAMETER Experiment Name: At_42deg_Heat_cDNA_P Parameter: Timepoint (hr) Value: 1
  misc_feature: MA Experiment 20000144 PARAMETER Experiment Name: At_42deg_Heat_cDNA_P Parameter: Tissue Value: Aerial

SEQ ID NO: 32025 - protein, 122 aa, Arabidopsis thaliana; identical to SEQ ID NO: 28435
  peptide (1)..(122): Ceres Seq. ID no. 12331803
  misc_feature (9)..(118): Pfam Name: Glyoxalase/Bleomycin resistance Pfam Description: Glyoxalase/Bleomycin resistance
  misc_feature (7)..(122): Homolog of NCBI NO: 23039663 NR Description: hypothetical protein [Trichodesmium erythraeum
  misc_feature (7)..(122): Homolog of NCBI NO: 37523202 NR Description: hypothetical protein glr3633 [Gloeobacter
  misc_feature (6)..(55): Homolog of NCBI NO: 34898280 NR Description: hypothetical protein~predicted by GENSCAN etc.
  misc_feature (5)..(120): Homolog of NCBI NO: 15238137 NR Description: putative protein; protein id: At5g41650.1
  misc_feature (4)..(105): Homolog of NCBI NO: 25404929 NR Description: protein F22C12.6 [imported] - Arabidopsis
  misc_feature (5)..(122): Homolog of NCBI NO: 18407989 NR Description: Expressed protein

SEQ ID NO: 32026 - protein, 118 aa, Arabidopsis thaliana; identical to SEQ ID NO: 28436
  peptide (1)..(118): Ceres Seq. ID no. 12331804
  misc_feature (5)..(114): Pfam Name: Glyoxalase/Bleomycin resistance Pfam Description: Glyoxalase/Bleomycin resistance
  misc_feature (3)..(118): Homolog of NCBI NO: 23039663 NR Description: hypothetical protein [Trichodesmium erythraeum
  misc_feature (3)..(118): Homolog of NCBI NO: 37523202 NR Description: hypothetical protein glr3633 [Gloeobacter
  misc_feature (2)..(51): Homolog of NCBI NO: 34898280 NR Description: hypothetical protein~predicted by GENSCAN etc.
  misc_feature (1)..(116): Homolog of NCBI NO: 15238137 NR Description: putative protein; protein id: At5g41650.1
  misc_feature (1)..(101): Homolog of NCBI NO: 25404929 NR Description: protein F22C12.6 [imported] - Arabidopsis
  misc_feature (1)..(118): Homolog of NCBI NO: 18407989 NR Description: Expressed protein

SEQ ID NO: 32027 - protein, 68 aa, Arabidopsis thaliana; identical to SEQ ID NO: 28437
  peptide (1)..(68): Ceres Seq. ID no. 12331805
  misc_feature (1)..(64): Pfam Name: Glyoxalase/Bleomycin resistance Pfam Description: Glyoxalase/Bleomycin resistance
  misc_feature (1)..(68): Homolog of NCBI NO: 23039663 NR Description: hypothetical protein [Trichodesmium erythraeum
  misc_feature (1)..(68): Homolog of NCBI NO: 37523202 NR Description: hypothetical protein glr3633 [Gloeobacter
  misc_feature (1)..(66): Homolog of NCBI NO: 15238137 NR Description: putative protein; protein id: At5g41650.1
  misc_feature (1)..(51): Homolog of NCBI NO: 25404929 NR Description: protein F22C12.6 [imported] - Arabidopsis
  misc_feature (1)..(68): Homolog of NCBI NO: 18407989 NR Description: Expressed protein

SEQ ID NO: 32028 - DNA, 1068 bp, Arabidopsis thaliana; identical to SEQ ID NO: 28438
  misc_feature (1)..(1068): Ceres Seq. ID no. 12327625
  misc_feature: MA Experiment ID: 108434 Result: Up-regulated in Transcription
  misc_feature: MA Experiment 108434 PARAMETER Experiment Name: At_Root_Tips_cDNA_P Parameter: Tissue Value: Root Tips
  misc_feature: MA Experiment ID: 108461 Result: Up-regulated in Transcription
  misc_feature: MA Experiment 108461 PARAMETER Experiment Name: At_Germinating_Seeds_cDNA_P Parameter: Age (day) Value: 1 vs. 0
  misc_feature: MA Experiment 108461 PARAMETER Experiment Name: At_Germinating_Seeds_cDNA_P Parameter: Tissue Value: Germinating Seeds
  misc_feature: MA Experiment ID: 108608 Result: Up-regulated in Transcription
  misc_feature: MA Experiment 108608 PARAMETER Experiment Name: At_100uM_ABA_cDNA_P Parameter: Timepoint (hr) Value: 1
  misc_feature: MA Experiment 108608 PARAMETER Experiment Name: At_100uM_ABA_cDNA_P Parameter: Tissue Value: Aerial
  misc_feature: MA Experiment 108608 PARAMETER Experiment Name: At_100uM_ABA_cDNA_P Parameter: Treatment Value: 100uM ABA vs. No Treatment
  misc_feature: MA Experiment ID: 20000166 Result: Up-regulated in Transcription
  misc_feature: MA Experiment 20000166 PARAMETER Experiment Name: At_100uM_ABA_P Parameter: Age (day) Value: 14
  misc_feature: MA Experiment 20000166 PARAMETER Experiment Name: At_100uM_ABA_P Parameter: Organism Value: A. thaliana
  misc_feature: MA Experiment 20000166 PARAMETER Experiment Name: At_100uM_ABA_P Parameter: Plant Line Value: WS
  misc_feature: MA Experiment 20000166 PARAMETER Experiment Name: At_100uM_ABA_P Parameter: Timepoint (hr) Value: 1
  misc_feature: MA Experiment 20000166 PARAMETER Experiment Name: At_100uM_ABA_P Parameter: Tissue Value: Aerial
  misc_feature: MA Experiment 20000166 PARAMETER Experiment Name: At_100uM_ABA_P Parameter: Treatment Value: 100uM ABA vs. No Treatment
  misc_feature: MA Experiment ID: 20000794 Result: Down-regulated in Transcription
  misc_feature: MA Experiment 20000794 PARAMETER Experiment Name: At_Petals_P Parameter: Age (day) Value: 23-25 days
  misc_feature: MA Experiment 20000794 PARAMETER Experiment Name: At_Petals_P Parameter: Plant Line Value: WS
  misc_feature: MA Experiment 20000794 PARAMETER Experiment Name: At_Petals_P Parameter: Tissue Value: Petals vs. Whole plant

SEQ ID NO: 32029 - protein, 257 aa, Arabidopsis thaliana; identical to SEQ ID NO: 28439
  peptide (1)..(257): Ceres Seq. ID no. 12327626
  misc_feature (13)..(256): Homolog of NCBI NO: 18398810 NR Description: expressed protein
  misc_feature (8)..(243): Homolog of NCBI NO: 15234108 NR Description: hypothetical protein; protein id: At4g01230.1
  misc_feature (5)..(255): Homolog of NCBI NO: 15233147 NR Description: putative protein; protein id: At3g61560.1
  misc_feature (37)..(256): Homolog of NCBI NO: 34904202 NR Description: P0492F05.25 [Oryza sativa (japonica
  misc_feature (8)..(255): Homolog of NCBI NO: 18406991 NR Description: expressed protein
  misc_feature (4)..(256): Homolog of NCBI NO: 34909318 NR Description: OSJNBb0021A09.5 [Oryza sativa (japonica
  misc_feature (9)..(257): Homolog of NCBI NO: 15236556 NR Description: putative protein
  misc_feature (9)..(257): Homolog of NCBI NO: 15237093 NR Description: putative protein
  misc_feature (1)..(257): Homolog of NCBI NO: 15222616 NR Description: hypothetical protein
  misc_feature (1)..(257): Homolog of NCBI NO: 15238125 NR Description: putative protein

SEQ ID NO: 32030 - DNA, 1036 bp, Arabidopsis thaliana; identical to SEQ ID NO: 28440
  misc_feature (1)..(1036): Ceres Seq. ID no. 12488547
  misc_feature: MA Experiment ID: 20000235 Result: Down-regulated in Transcription
  misc_feature: MA Experiment 20000235 PARAMETER Experiment Name: At_Siliques_P Parameter: Age (day) Value: 21
  misc_feature: MA Experiment 20000235 PARAMETER Experiment Name: At_Siliques_P Parameter: Organism Value: A. thaliana
  misc_feature: MA Experiment 20000235 PARAMETER Experiment Name: At_Siliques_P Parameter: Plant Line Value: WS
  misc_feature: MA Experiment 20000235 PARAMETER Experiment Name: At_Siliques_P Parameter: Tissue Value: 5-10mm Siliques vs. Whole Plant
  misc_feature: MA Experiment ID: 20000264 Result: Up-regulated in Transcription
  misc_feature: MA Experiment 20000264 PARAMETER Experiment Name: At_Open_Flower_P Parameter: Age (day) Value: 21
  misc_feature: MA Experiment 20000264 PARAMETER Experiment Name: At_Open_Flower_P Parameter: Plant Line Value: WS
  misc_feature: MA Experiment 20000264 PARAMETER Experiment Name: At_Open_Flower_P Parameter: Tissue Value: Open Flower vs. Whole Plant
  misc_feature: MA Experiment ID: 20000265 Result: Up-regulated in Transcription
  misc_feature: MA Experiment 20000265 PARAMETER Experiment Name: At_Open_Flower_P Parameter: Age (day) Value: 21
  misc_feature: MA Experiment 20000265 PARAMETER Experiment Name: At_Open_Flower_P Parameter: Plant Line Value: WS
  misc_feature: MA Experiment 20000265 PARAMETER Experiment Name: At_Open_Flower_P Parameter: Tissue Value: Closed Flower vs. Whole Plant
  misc_feature: MA Experiment ID: 20000286 Result: Up-regulated in Transcription
  misc_feature: MA Experiment 20000286 PARAMETER Experiment Name: At_Open_Flower_P Parameter: Age (day) Value: 21
  misc_feature: MA Experiment 20000286 PARAMETER Experiment Name: At_Open_Flower_P Parameter: Plant Line Value: WS
  misc_feature: MA Experiment 20000286 PARAMETER Experiment Name: At_Open_Flower_P Parameter: Tissue Value: Half Open vs. Whole Plant
  misc_feature: MA Experiment ID: 20000438 Result: Down-regulated in Transcription
  misc_feature: MA Experiment 20000438 PARAMETER Experiment Name: At_Shoots__P Parameter: Age (day) Value: 14
  misc_feature: MA Experiment 20000438 PARAMETER Experiment Name: At_Shoots__P Parameter: Tissue Value: Shoots vs. Whole Plant
  misc_feature: MA Experiment ID: 20000794 Result: Up-regulated in Transcription
  misc_feature: MA Experiment 20000794 PARAMETER Experiment Name: At_Petals_P Parameter: Age (day) Value: 23-25 days
  misc_feature: MA Experiment 20000794 PARAMETER Experiment Name: At_Petals_P Parameter: Plant Line Value: WS
  misc_feature: MA Experiment 20000794 PARAMETER Experiment Name: At_Petals_P Parameter: Tissue Value: Petals vs. Whole plant
  misc_feature: MA Experiment ID: 20001910 Result: Down-regulated in Transcription
  misc_feature: MA Experiment 20001910 PARAMETER Experiment Name: At_Drought_Reproduction_P Parameter: Age (day) Value: 37
  misc_feature: MA Experiment 20001910 PARAMETER Experiment Name: At_Drought_Reproduction_P Parameter: Organism Value: A. thaliana
  misc_feature: MA Experiment 20001910 PARAMETER Experiment Name: At_Drought_Reproduction_P Parameter: Plant Line Value: WS
  misc_feature: MA Experiment 20001910 PARAMETER Experiment Name: At_Drought_Reproduction_P Parameter: Timepoint (day) Value: 7
  misc_feature: MA Experiment 20001910 PARAMETER Experiment Name: At_Drought_Reproduction_P Parameter: Tissue Value: Flowers
  misc_feature: MA Experiment 20001910 PARAMETER Experiment Name: At_Drought_Reproduction_P Parameter: Treatment Value: Drought vs. No Drought

SEQ ID NO: 32031 - protein, 309 aa, Arabidopsis thaliana; identical to SEQ ID NO: 28441
  peptide (1)..(309): Ceres Seq. ID no. 12488548
  misc_feature (1)..(290): Homolog of NCBI NO: 15234888 NR Description: putative oxidoreductase; protein id: At4g10020.1
  misc_feature (16)..(291): Homolog of NCBI NO: 21742781 NR Description: OSJNBa0055C08.3 [Oryza sativa (japonica
  misc_feature (1)..(300): Homolog of NCBI NO: 21311775 NR Description: steroleosin-B [Sesamum indicum]
  misc_feature (1)..(306): Homolog of NCBI NO: 15241261 NR Description: putative protein; protein id: At5g50770.1
  misc_feature (1)..(292): Homolog of NCBI NO: 18423187 NR Description: 11-beta-hydroxysteroid dehydrogenase-like
  misc_feature (1)..(300): Homolog of NCBI NO: 15824408 NR Description: steroleosin [Sesamum indicum]
  misc_feature (1)..(290): Homolog of NCBI NO: 8777392 NR Description: 11-beta-hydroxysteroid dehydrogenase-like
  misc_feature (1)..(290): Homolog of NCBI NO: 15241203 NR Description: 11-beta-hydroxysteroid dehydrogenase-like
  misc_feature (1)..(309): Homolog of NCBI NO: 15232779 NR Description: putative protein; protein id: At3g47360.1
  misc_feature (1)..(309): Homolog of NCBI NO: 15232777 NR Description: putative protein; protein id: At3g47350.1
  misc_feature (1)..(290): Homolog of NCBI NO: 15234888 NR Description: putative oxidoreductase; protein id: At4g10020.1
  misc_feature (16)..(291): Homolog of NCBI NO: 21742781 NR Description: OSJNBa0055C08.3 [Oryza sativa (japonica
  misc_feature (1)..(300): Homolog of NCBI NO: 21311775 NR Description: steroleosin-B [Sesamum indicum]
  misc_feature (1)..(306): Homolog of NCBI NO: 15241261 NR Description: putative protein; protein id: At5g50770.1
  misc_feature (1)..(292): Homolog of NCBI NO: 18423187 NR Description: 11-beta-hydroxysteroid dehydrogenase-like
  misc_feature (1)..(300): Homolog of NCBI NO: 15824408 NR Description: steroleosin [Sesamum indicum]
  misc_feature (1)..(290): Homolog of NCBI NO: 8777392 NR Description: 11-beta-hydroxysteroid dehydrogenase-like
  misc_feature (1)..(290): Homolog of NCBI NO: 15241203 NR Description: 11-beta-hydroxysteroid dehydrogenase-like
  misc_feature (1)..(309): Homolog of NCBI NO: 15232779 NR Description: putative protein; protein id: At3g47360.1
  misc_feature (1)..(309): Homolog of NCBI NO: 15232777 NR Description: putative protein; protein id: At3g47350.1

SEQ ID NO: 32032 - protein, 307 aa, Arabidopsis thaliana; identical to SEQ ID NO: 28442
  peptide (1)..(307): Ceres Seq. ID no. 12488549
  misc_feature (1)..(288): Homolog of NCBI NO: 15234888 NR Description: putative oxidoreductase; protein id: At4g10020.1
  misc_feature (14)..(289): Homolog of NCBI NO: 21742781 NR Description: OSJNBa0055C08.3 [Oryza sativa (japonica
  misc_feature (1)..(298): Homolog of NCBI NO: 21311775 NR Description: steroleosin-B [Sesamum indicum]
  misc_feature (1)..(304): Homolog of NCBI NO: 15241261 NR Description: putative protein; protein id: At5g50770.1
  misc_feature (1)..(290): Homolog of NCBI NO: 18423187 NR Description: 11-beta-hydroxysteroid dehydrogenase-like
  misc_feature (1)..(298): Homolog of NCBI NO: 15824408 NR Description: steroleosin [Sesamum indicum]
  misc_feature (1)..(288): Homolog of NCBI NO: 8777392 NR Description: 11-beta-hydroxysteroid dehydrogenase-like
  misc_feature (1)..(288): Homolog of NCBI NO: 15241203 NR Description: 11-beta-hydroxysteroid dehydrogenase-like
  misc_feature (1)..(307): Homolog of NCBI NO: 15232779 NR Description: putative protein; protein id: At3g47360.1
  misc_feature (1)..(307): Homolog of NCBI NO: 15232777 NR Description: putative protein; protein id: At3g47350.1
  misc_feature (1)..(288): Homolog of NCBI NO: 15234888 NR Description: putative oxidoreductase; protein id: At4g10020.1
  misc_feature (14)..(289): Homolog of NCBI NO: 21742781 NR Description: OSJNBa0055C08.3 [Oryza sativa (japonica
  misc_feature (1)..(298): Homolog of NCBI NO: 21311775 NR Description: steroleosin-B [Sesamum indicum]
  misc_feature (1)..(304): Homolog of NCBI NO: 15241261 NR Description: putative protein; protein id: At5g50770.1
  misc_feature (1)..(290): Homolog of NCBI NO: 18423187 NR Description: 11-beta-hydroxysteroid dehydrogenase-like
  misc_feature (1)..(298): Homolog of NCBI NO: 15824408 NR Description: steroleosin [Sesamum indicum]
  misc_feature (1)..(288): Homolog of NCBI NO: 8777392 NR Description: 11-beta-hydroxysteroid dehydrogenase-like
  misc_feature (1)..(288): Homolog of NCBI NO: 15241203 NR Description: 11-beta-hydroxysteroid dehydrogenase-like
  misc_feature (1)..(307): Homolog of NCBI NO: 15232779 NR Description: putative protein; protein id: At3g47360.1
  misc_feature (1)..(307): Homolog of NCBI NO: 15232777 NR Description: putative protein; protein id: At3g47350.1

SEQ ID NO: 32033 - protein, 156 aa, Arabidopsis thaliana; identical to SEQ ID NO: 28443
  peptide (1)..(156): Ceres Seq. ID no. 12488550
  misc_feature (1)..(137): Homolog of NCBI NO: 15234888 NR Description: putative oxidoreductase; protein id: At4g10020.1
  misc_feature (1)..(138): Homolog of NCBI NO: 21742781 NR Description: OSJNBa0055C08.3 [Oryza sativa (japonica
  misc_feature (1)..(147): Homolog of NCBI NO: 21311775 NR Description: steroleosin-B [Sesamum indicum]
  misc_feature (1)..(153): Homolog of NCBI NO: 15241261 NR Description: putative protein; protein id: At5g50770.1
  misc_feature (1)..(139): Homolog of NCBI NO: 18423187 NR Description: 11-beta-hydroxysteroid dehydrogenase-like
  misc_feature (1)..(147): Homolog of NCBI NO: 15824408 NR Description: steroleosin [Sesamum indicum]
  misc_feature (1)..(137): Homolog of NCBI NO: 8777392 NR Description: 11-beta-hydroxysteroid dehydrogenase-like
  misc_feature (1)..(137): Homolog of NCBI NO: 15241203 NR Description: 11-beta-hydroxysteroid dehydrogenase-like
  misc_feature (1)..(156): Homolog of NCBI NO: 15232779 NR Description: putative protein; protein id: At3g47360.1
  misc_feature (1)..(156): Homolog of NCBI NO: 15232777 NR Description: putative protein; protein id: At3g47350.1
  misc_feature (1)..(137): Homolog of NCBI NO: 15234888 NR Description: putative oxidoreductase; protein id: At4g10020.1
  misc_feature (1)..(138): Homolog of NCBI NO: 21742781 NR Description: OSJNBa0055C08.3 [Oryza sativa (japonica
  misc_feature (1)..(147): Homolog of NCBI NO: 21311775 NR Description: steroleosin-B [Sesamum indicum]
  misc_feature (1)..(153): Homolog of NCBI NO: 15241261 NR Description: putative protein; protein id: At5g50770.1
  misc_feature (1)..(139): Homolog of NCBI NO: 18423187 NR Description: 11-beta-hydroxysteroid dehydrogenase-like
  misc_feature (1)..(147): Homolog of NCBI NO: 15824408 NR Description: steroleosin [Sesamum indicum]
  misc_feature (1)..(137): Homolog of NCBI NO: 8777392 NR Description: 11-beta-hydroxysteroid dehydrogenase-like
  misc_feature (1)..(137): Homolog of NCBI NO: 15241203 NR Description: 11-beta-hydroxysteroid dehydrogenase-like
  misc_feature (1)..(156): Homolog of NCBI NO: 15232779 NR Description: putative protein; protein id: At3g47360.1
  misc_feature (1)..(156): Homolog of NCBI NO: 15232777 NR Description: putative protein; protein id: At3g47350.1

SEQ ID NO: 32034 - DNA, 1299 bp, Arabidopsis thaliana; identical to SEQ ID NO: 28444
  misc_feature (1)..(1299): Ceres Seq. ID no. 12324245
  misc_feature: MA Experiment ID: 20000179 Result: Up-regulated in Transcription
  misc_feature: MA Experiment 20000179 PARAMETER Experiment Name: At_Germinating_Seeds_P Parameter: Age (hr) Value: 6 vs. 0
  misc_feature: MA Experiment 20000179 PARAMETER Experiment Name: At_Germinating_Seeds_P Parameter: Tissue Value: Germinating Seeds
  misc_feature: MA Experiment ID: 20001557 Result: Up-regulated in Transcription
  misc_feature: MA Experiment 20001557 PARAMETER Experiment Name: At_Drought_Soil_Dry_P Parameter: Age (day) Value: 27
  misc_feature: MA Experiment 20001557 PARAMETER Experiment Name: At_Drought_Soil_Dry_P Parameter: Organism Value: A. thaliana
  misc_feature: MA Experiment 20001557 PARAMETER Experiment Name: At_Drought_Soil_Dry_P Parameter: Plant Line Value: WS
  misc_feature: MA Experiment 20001557 PARAMETER Experiment Name: At_Drought_Soil_Dry_P Parameter: Post Timepoint (hr) Value: 3
  misc_feature: MA Experiment 20001557 PARAMETER Experiment Name: At_Drought_Soil_Dry_P Parameter: Post-Treatment Value: Re-Water vs. No Drought
  misc_feature: MA Experiment 20001557 PARAMETER Experiment Name: At_Drought_Soil_Dry_P Parameter: Timepoint (day) Value: 13
  misc_feature: MA Experiment 20001557 PARAMETER Experiment Name: At_Drought_Soil_Dry_P Parameter: Treatment Value: Drought vs. No Drought

SEQ ID NO: 32035 - protein, 347 aa, Arabidopsis thaliana; identical to SEQ ID NO: 28445
  peptide (1)..(347): Ceres Seq. ID no. 12324246
  misc_feature (53)..(164): Pfam Name: CoA binding domain Pfam Description: CoA binding domain
  misc_feature (40)..(335): Homolog of NCBI NO: 1711574 NR Description: SUCCINYL-COA LIGASE
  misc_feature (52)..(345): Homolog of NCBI NO: 20141810 NR Description: Succinyl-CoA ligase
  misc_feature (52)..(345): Homolog of NCBI NO: 16758586 NR Description: succinate-CoA ligase, GDP-forming, alpha subunit
  misc_feature (52)..(345): Homolog of NCBI NO: 38181885 NR Description: Suclg1 protein [Rattus norvegicus]
  misc_feature (12)..(346): Homolog of NCBI NO: 34393512 NR Description: putative succinyl-CoA ligase alpha subunit
  misc_feature (1)..(345): Homolog of NCBI NO: 27357175 NR Description: succinyl-CoA ligase alpha subunit [Lycopersicon
  misc_feature (52)..(346): Homolog of NCBI NO: 1076415 NR Description: succinate-CoA ligase (GDP-forming) (EC 6.2.1.4)
  misc_feature (1)..(346): Homolog of NCBI NO: 21593483 NR Description: succinyl-CoA synthetase, alpha subunit
  misc_feature (1)..(346): Homolog of NCBI NO: 15237260 NR Description: succinyl-CoA synthetase, alpha subunit
  misc_feature (1)..(347): Homolog of NCBI NO: 15241592 NR Description: succinyl-CoA-ligase alpha subunit

SEQ ID NO: 32036 - protein, 264 aa, Arabidopsis thaliana; identical to SEQ ID NO: 28446
  peptide (1)..(264): Ceres Seq. ID no. 12324247
  misc_feature (1)..(81): Pfam Name: CoA binding domain Pfam Description: CoA binding domain
  misc_feature (1)..(252): Homolog of NCBI NO: 1711574 NR Description: SUCCINYL-COA LIGASE
  misc_feature (1)..(262): Homolog of NCBI NO: 20141810 NR Description: Succinyl-CoA ligase
  misc_feature (1)..(262): Homolog of NCBI NO: 16758586 NR Description: succinate-CoA ligase, GDP-forming, alpha subunit
  misc_feature (1)..(262): Homolog of NCBI NO: 38181885 NR Description: Suclg1 protein [Rattus norvegicus]
  misc_feature (1)..(263): Homolog of NCBI NO: 34393512 NR Description: putative succinyl-CoA ligase alpha subunit
  misc_feature (1)..(262): Homolog of NCBI NO: 27357175 NR Description: succinyl-CoA ligase alpha subunit [Lycopersicon
  misc_feature (1)..(263): Homolog of NCBI NO: 1076415 NR Description: succinate-CoA ligase (GDP-forming) (EC 6.2.1.4)
  misc_feature (1)..(263): Homolog of NCBI NO: 21593483 NR Description: succinyl-CoA synthetase, alpha subunit
  misc_feature (1)..(263): Homolog of NCBI NO: 15237260 NR Description: succinyl-CoA synthetase, alpha subunit
  misc_feature (1)..(264): Homolog of NCBI NO: 15241592 NR Description: succinyl-CoA-ligase alpha subunit

SEQ ID NO: 32037 - protein, 216 aa, Arabidopsis thaliana; identical to SEQ ID NO: 28447
  peptide (1)..(216): Ceres Seq. ID no. 12324248
  misc_feature (1)..(204): Homolog of NCBI NO: 1711574 NR Description: SUCCINYL-COA LIGASE
  misc_feature (1)..(214): Homolog of NCBI NO: 20141810 NR Description: Succinyl-CoA ligase
  misc_feature (1)..(214): Homolog of NCBI NO: 16758586 NR Description: succinate-CoA ligase, GDP-forming, alpha subunit
  misc_feature (1)..(214): Homolog of NCBI NO: 38181885 NR Description: Suclg1 protein [Rattus norvegicus]
  misc_feature (1)..(215): Homolog of NCBI NO: 34393512 NR Description: putative succinyl-CoA ligase alpha subunit
  misc_feature (1)..(214): Homolog of NCBI NO: 27357175 NR Description: succinyl-CoA ligase alpha subunit [Lycopersicon
  misc_feature (1)..(215): Homolog of NCBI NO: 1076415 NR Description: succinate-CoA ligase (GDP-forming) (EC 6.2.1.4)
  misc_feature (1)..(215): Homolog of NCBI NO: 21593483 NR Description: succinyl-CoA synthetase, alpha subunit
  misc_feature (1)..(215): Homolog of NCBI NO: 15237260 NR Description: succinyl-CoA synthetase, alpha subunit
  misc_feature (1)..(216): Homolog of NCBI NO: 15241592 NR Description: succinyl-CoA-ligase alpha subunit

SEQ ID NO: 32038 - DNA, 1294 bp, Arabidopsis thaliana; identical to SEQ ID NO: 28448
  misc_feature (1)..(1294): Ceres Seq. ID no. 13487534
  misc_feature: MA Experiment ID: 20000184 Result: Up-regulated in Transcription
  misc_feature: MA Experiment 20000184 PARAMETER Experiment Name: At_Shoots__P Parameter: Age (day) Value: 7
  misc_feature: MA Experiment 20000184 PARAMETER Experiment Name: At_Shoots__P Parameter: Tissue Value: Shoots vs. Whole Plant
  misc_feature: MA Experiment ID: 20000227 Result: Up-regulated in Transcription
  misc_feature: MA Experiment 20000227 PARAMETER Experiment Name: At_Root-Tips-vs-Tops_P Parameter: Tissue Value: Root Tips vs. Root Tops
  misc_feature: MA Experiment ID: 20000437 Result: Down-regulated in Transcription
  misc_feature: MA Experiment 20000437 PARAMETER Experiment Name: At_Drought_P Parameter: Age (day) Value: 8
  misc_feature: MA Experiment 20000437 PARAMETER Experiment Name: At_Drought_P Parameter: Organism Value: A. thaliana
  misc_feature: MA Experiment 20000437 PARAMETER Experiment Name: At_Drought_P Parameter: Plant Line Value: WS
  misc_feature: MA Experiment 20000437 PARAMETER Experiment Name: At_Drought_P Parameter: Timepoint (hr) Value: 24
  misc_feature: MA Experiment 20000437 PARAMETER Experiment Name: At_Drought_P Parameter: Tissue Value: Whole Plant
  misc_feature: MA Experiment 20000437 PARAMETER Experiment Name: At_Drought_P Parameter: Treatment Value: Drought vs. No Drought
  misc_feature: MA Experiment ID: 20000439 Result: Down-regulated in Transcription
  misc_feature: MA Experiment 20000439 PARAMETER Experiment Name: At_Roots__P Parameter: Age (day) Value: 14 vs. 21
  misc_feature: MA Experiment 20000439 PARAMETER Experiment Name: At_Roots__P Parameter: Organism Value: A. thaliana
  misc_feature: MA Experiment 20000439 PARAMETER Experiment Name: At_Roots__P Parameter: Tissue Value: Roots vs. Whole Plant
  misc_feature: MA Experiment ID: 20000527 Result: Up-regulated in Transcription
  misc_feature: MA Experiment 20000527 PARAMETER Experiment Name: At_10percent_PEG_P Parameter: Age (day) Value: 20
  misc_feature: MA Experiment 20000527 PARAMETER Experiment Name: At_10percent_PEG_P Parameter: Organism Value: A. thaliana
  misc_feature: MA Experiment 20000527 PARAMETER Experiment Name: At_10percent_PEG_P Parameter: Plant Line Value: WS
  misc_feature: MA Experiment 20000527 PARAMETER Experiment Name: At_10percent_PEG_P Parameter: Timepoint (day) Value: 20
  misc_feature: MA Experiment 20000527 PARAMETER Experiment Name: At_10percent_PEG_P Parameter: Tissue Value: Whole Plant
  misc_feature: MA Experiment 20000527 PARAMETER Experiment Name: At_10percent_PEG_P Parameter: Treatment Value: 10percent PEG vs. No Treatment
  misc_feature: MA Experiment ID: 20000794 Result: Down-regulated in Transcription
  misc_feature: MA Experiment 20000794 PARAMETER Experiment Name: At_Petals_P Parameter: Age (day) Value: 23-25 days
  misc_feature: MA Experiment 20000794 PARAMETER Experiment Name: At_Petals_P Parameter: Plant Line Value: WS
  misc_feature: MA Experiment 20000794 PARAMETER Experiment Name: At_Petals_P Parameter: Tissue Value: Petals vs. Whole plant
  misc_feature: MA Experiment ID: 20001450 Result: Down-regulated in Transcription
  misc_feature: MA Experiment 20001450 PARAMETER Experiment Name: At_Far-red-induction_P Parameter: Age (day) Value: 7
  misc_feature: MA Experiment 20001450 PARAMETER Experiment Name: At_Far-red-induction_P Parameter: Light Value: Far-red vs. White
  misc_feature: MA Experiment 20001450 PARAMETER Experiment Name: At_Far-red-induction_P Parameter: Organism Value: A. thaliana
  misc_feature: MA Experiment 20001450 PARAMETER Experiment Name: At_Far-red-induction_P Parameter: Plant Line Value: Columbia
  misc_feature: MA Experiment 20001450 PARAMETER Experiment Name: At_Far-red-induction_P Parameter: Timepoint (hr) Value: 8
  misc_feature: MA Experiment 20001450 PARAMETER Experiment Name: At_Far-red-induction_P Parameter: Tissue Value: Whole Plant
  misc_feature: MA Experiment ID: 20001558 Result: Up-regulated in Transcription
  misc_feature: MA Experiment 20001558 PARAMETER Experiment Name: At_Drought_Soil_Dry_P Parameter: Age (day) Value: 27
  misc_feature: MA Experiment 20001558 PARAMETER Experiment Name: At_Drought_Soil_Dry_P Parameter: Organism Value: A. thaliana
  misc_feature: MA Experiment 20001558 PARAMETER Experiment Name: At_Drought_Soil_Dry_P Parameter: Plant Line Value: WS
  misc_feature: MA Experiment 20001558 PARAMETER Experiment Name: At_Drought_Soil_Dry_P Parameter: Post Timepoint (hr) Value: 6
  misc_feature: MA Experiment 20001558 PARAMETER Experiment Name: At_Drought_Soil_Dry_P Parameter: Post-Treatment Value: Re-Water vs. No Drought
  misc_feature: MA Experiment 20001558 PARAMETER Experiment Name: At_Drought_Soil_Dry_P Parameter: Timepoint (day) Value: 13
  misc_feature: MA Experiment 20001558 PARAMETER Experiment Name: At_Drought_Soil_Dry_P Parameter: Treatment Value: Drought vs. No Drought
  misc_feature: MA Experiment ID: 20001560 Result: Up-regulated in Transcription
  misc_feature: MA Experiment 20001560 PARAMETER Experiment Name: At_Drought_Soil_Dry_P Parameter: Age (day) Value: 28
  misc_feature: MA Experiment 20001560 PARAMETER Experiment Name: At_Drought_Soil_Dry_P Parameter: Organism Value: A. thaliana
  misc_feature: MA Experiment 20001560 PARAMETER Experiment Name: At_Drought_Soil_Dry_P Parameter: Plant Line Value: WS
  misc_feature: MA Experiment 20001560 PARAMETER Experiment Name: At_Drought_Soil_Dry_P Parameter: Post Timepoint (hr) Value: None
  misc_feature: MA Experiment 20001560 PARAMETER Experiment Name: At_Drought_Soil_Dry_P Parameter: Post-Treatment Value: None
  misc_feature: MA Experiment 20001560 PARAMETER Experiment Name: At_Drought_Soil_Dry_P Parameter: Timepoint (day) Value: 14
  misc_feature: MA Experiment 20001560 PARAMETER Experiment Name: At_Drought_Soil_Dry_P Parameter: Treatment Value: Drought vs. No Drought
  misc_feature: MA Experiment ID: 20001757 Result: Up-regulated in Transcription
  misc_feature: MA Experiment 20001757 PARAMETER Experiment Name: At_50mM_NH4NO3_L-to-H_P Parameter: Timepoint (hr) Value: 6
  misc_feature: MA Experiment 20001757 PARAMETER Experiment Name: At_50mM_NH4NO3_L-to-H_P Parameter: Tissue Value: Leaf
  misc_feature: MA Experiment 20001757 PARAMETER Experiment Name: At_50mM_NH4NO3_L-to-H_P Parameter: Treatment Value: 50mM NH4NO3 vs 100mM Mannitol

SEQ ID NO: 32039 - protein, 358 aa, Arabidopsis thaliana; identical to SEQ ID NO: 28449
  peptide (1)..(358): Ceres Seq. ID no. 13487535
  misc_feature (211)..(353): Pfam Name: Dihydrodipicolinate reductase, C-terminus Pfam Description: Dihydrodipicolinate reductase, C-terminus
  misc_feature (84)..(352): Homolog of NCBI NO: 15668598 NR Description: dihydrodipicolinate reductase (dapB)
  misc_feature (84)..(352): Homolog of NCBI NO: 7531267 NR Description: DIHYDRODIPICOLINATE REDUCTASE (DHPR)
  misc_feature (84)..(352): Homolog of NCBI NO: 22299530 NR Description: dihydrodipicolinate reductase
  misc_feature (12)..(336): Homolog of NCBI NO: 11357603 NR Description: hypothetical protein F24G16.160 - Arabidopsis
  misc_feature (12)..(358): Homolog of NCBI NO: 18411368 NR Description: expressed protein [Arabidopsis thaliana]
  misc_feature (18)..(337): Homolog of NCBI NO: 7486478 NR Description: hypothetical protein At2g44040 [imported] -
  misc_feature (12)..(358): Homolog of NCBI NO: 18406430 NR Description: expressed protein [Arabidopsis thaliana]

SEQ ID NO: 32040 - protein, 347 aa, Arabidopsis thaliana; identical to SEQ ID NO: 28450
  peptide (1)..(347): Ceres Seq. ID no. 13487536
  misc_feature (200)..(342): Pfam Name: Dihydrodipicolinate reductase, C-terminus Pfam Description: Dihydrodipicolinate reductase, C-terminus
  misc_feature (73)..(341): Homolog of NCBI NO: 15668598 NR Description: dihydrodipicolinate reductase (dapB)
  misc_feature (73)..(341): Homolog of NCBI NO: 7531267 NR Description: DIHYDRODIPICOLINATE REDUCTASE (DHPR)
  misc_feature (73)..(341): Homolog of NCBI NO: 22299530 NR Description: dihydrodipicolinate reductase
  misc_feature (1)..(325): Homolog of NCBI NO: 11357603 NR Description: hypothetical protein F24G16.160 - Arabidopsis
  misc_feature (1)..(347): Homolog of NCBI NO: 18411368 NR Description: expressed protein [Arabidopsis thaliana]
  misc_feature (7)..(326): Homolog of NCBI NO: 7486478 NR Description: hypothetical protein At2g44040 [imported] -
  misc_feature (1)..(347): Homolog of NCBI NO: 18406430 NR Description: expressed protein [Arabidopsis thaliana]

SEQ ID NO: 32041 - protein, 341 aa, Arabidopsis thaliana; identical to SEQ ID NO: 28451
  peptide (1)..(341): Ceres Seq. ID no. 13487537
  misc_feature (194)..(336): Pfam Name: Dihydrodipicolinate reductase, C-terminus Pfam Description: Dihydrodipicolinate reductase, C-terminus
  misc_feature (67)..(335): Homolog of NCBI NO: 15668598 NR Description: dihydrodipicolinate reductase (dapB)
  misc_feature (67)..(335): Homolog of NCBI NO: 7531267 NR Description: DIHYDRODIPICOLINATE REDUCTASE (DHPR)
  misc_feature (67)..(335): Homolog of NCBI NO: 22299530 NR Description: dihydrodipicolinate reductase
  misc_feature (1)..(319): Homolog of NCBI NO: 11357603 NR Description: hypothetical protein F24G16.160 - Arabidopsis
  misc_feature (1)..(341): Homolog of NCBI NO: 18411368 NR Description: expressed protein [Arabidopsis thaliana]
  misc_feature (1)..(320): Homolog of NCBI NO: 7486478 NR Description: hypothetical protein At2g44040 [imported] -
  misc_feature (1)..(341): Homolog of NCBI NO: 18406430 NR Description: expressed protein [Arabidopsis thaliana]

SEQ ID NO: 32042 - DNA, 1520 bp, Arabidopsis thaliana; identical to SEQ ID NO: 28452
  misc_feature (1)..(1520): Ceres Seq. ID no. 13499768
  misc_feature: MA Experiment ID: 20000173 Result: Up-regulated in Transcription
  misc_feature: MA Experiment 20000173 PARAMETER Experiment Name: At_42deg_Heat_P Parameter: Age (day) Value: 14
  misc_feature: MA Experiment 20000173 PARAMETER Experiment Name: At_42deg_Heat_P Parameter: Organism Value: A. thaliana
  misc_feature: MA Experiment 20000173 PARAMETER Experiment Name: At_42deg_Heat_P Parameter: Plant Line Value: WS
  misc_feature: MA Experiment 20000173 PARAMETER Experiment Name: At_42deg_Heat_P Parameter: Temperature (deg C) Value: 42 vs. 22
  misc_feature: MA Experiment 20000173 PARAMETER Experiment Name: At_42deg_Heat_P Parameter: Timepoint (hr) Value: 6
  misc_feature: MA Experiment 20000173 PARAMETER Experiment Name: At_42deg_Heat_P Parameter: Tissue Value: Aerial
  misc_feature: MA Experiment ID: 20000437 Result: Down-regulated in Transcription
  misc_feature: MA Experiment 20000437 PARAMETER Experiment Name: At_Drought_P Parameter: Age (day) Value: 8
  misc_feature: MA Experiment 20000437 PARAMETER Experiment Name: At_Drought_P Parameter: Organism Value: A. thaliana
  misc_feature: MA Experiment 20000437 PARAMETER Experiment Name: At_Drought_P Parameter: Plant Line Value: WS
  misc_feature: MA Experiment 20000437 PARAMETER Experiment Name: At_Drought_P Parameter: Timepoint (hr) Value: 24
  misc_feature: MA Experiment 20000437 PARAMETER Experiment Name: At_Drought_P Parameter: Tissue Value: Whole Plant
  misc_feature: MA Experiment 20000437 PARAMETER Experiment Name: At_Drought_P Parameter: Treatment Value: Drought vs. No Drought
  misc_feature: MA Experiment ID: 20000794 Result: Up-regulated in Transcription
  misc_feature: MA Experiment 20000794 PARAMETER Experiment Name: At_Petals_P Parameter: Age (day) Value: 23-25 days
  misc_feature: MA Experiment 20000794 PARAMETER Experiment Name: At_Petals_P Parameter: Plant Line Value: WS
  misc_feature: MA Experiment 20000794 PARAMETER Experiment Name: At_Petals_P Parameter: Tissue Value: Petals vs. Whole plant
  misc_feature: MA Experiment ID: 20001247 Result: Down-regulated in Transcription
  misc_feature: MA Experiment 20001247 PARAMETER Experiment Name: At_Far-red-induction_P Parameter: Age (day) Value: 7
  misc_feature: MA Experiment 20001247 PARAMETER Experiment Name: At_Far-red-induction_P Parameter: Light Value: Far-red vs. White
  misc_feature: MA Experiment 20001247 PARAMETER Experiment Name: At_Far-red-induction_P Parameter: Organism Value: A. thaliana
  misc_feature: MA Experiment 20001247 PARAMETER Experiment Name: At_Far-red-induction_P Parameter: Plant Line Value: Columbia
  misc_feature: MA Experiment 20001247 PARAMETER Experiment Name: At_Far-red-induction_P Parameter: Timepoint (hr) Value: 1
  misc_feature: MA Experiment 20001247 PARAMETER Experiment Name: At_Far-red-induction_P Parameter: Tissue Value: Whole Plant
  misc_feature: MA Experiment ID: 20001248 Result: Down-regulated in Transcription
  misc_feature: MA Experiment 20001248 PARAMETER Experiment Name: At_Far-red-induction_P Parameter: Age (day) Value: 7
  misc_feature: MA Experiment 20001248 PARAMETER Experiment Name: At_Far-red-induction_P Parameter: Light Value: Far-red vs. White
  misc_feature: MA Experiment 20001248 PARAMETER Experiment Name: At_Far-red-induction_P Parameter: Organism Value: A. thaliana
  misc_feature: MA Experiment 20001248 PARAMETER Experiment Name: At_Far-red-induction_P Parameter: Plant Line Value: Columbia
  misc_feature: MA Experiment 20001248 PARAMETER Experiment Name: At_Far-red-induction_P Parameter: Timepoint (hr) Value: 4
  misc_feature: MA Experiment 20001248 PARAMETER Experiment Name: At_Far-red-induction_P Parameter: Tissue Value: Whole Plant
  misc_feature: MA Experiment ID: 20001450 Result: Down-regulated in Transcription
  misc_feature: MA Experiment 20001450 PARAMETER Experiment Name: At_Far-red-induction_P Parameter: Age (day) Value: 7
  misc_feature: MA Experiment 20001450 PARAMETER Experiment Name: At_Far-red-induction_P Parameter: Light Value: Far-red vs. White
  misc_feature: MA Experiment 20001450 PARAMETER Experiment Name: At_Far-red-induction_P Parameter: Organism Value: A. thaliana
  misc_feature: MA Experiment 20001450 PARAMETER Experiment Name: At_Far-red-induction_P Parameter: Plant Line Value: Columbia
  misc_feature: MA Experiment 20001450 PARAMETER Experiment Name: At_Far-red-induction_P Parameter: Timepoint (hr) Value: 8
  misc_feature: MA Experiment 20001450 PARAMETER Experiment Name: At_Far-red-induction_P Parameter: Tissue Value: Whole Plant
  misc_feature: MA Experiment ID: 20001451 Result: Down-regulated in Transcription
  misc_feature: MA Experiment 20001451 PARAMETER Experiment Name: At_Far-red-induction_P Parameter: Age (day) Value: 7
  misc_feature: MA Experiment 20001451 PARAMETER Experiment Name: At_Far-red-induction_P Parameter: Light Value: Far-red vs. White
  misc_feature: MA Experiment 20001451 PARAMETER Experiment Name: At_Far-red-induction_P Parameter: Organism Value: A. thaliana
  misc_feature: MA Experiment 20001451 PARAMETER Experiment Name: At_Far-red-induction_P Parameter: Plant Line Value: Columbia
  misc_feature: MA Experiment 20001451 PARAMETER Experiment Name: At_Far-red-induction_P Parameter: Timepoint (hr) Value: 24
  misc_feature: MA Experiment 20001451 PARAMETER Experiment Name: At_Far-red-induction_P Parameter: Tissue Value: Whole Plant

SEQ ID NO: 32043 - protein, 442 aa, Arabidopsis thaliana; identical to SEQ ID NO: 28453
  peptide (1)..(442): Ceres Seq. ID no. 13499769
  misc_feature (307)..(429): Pfam Name: DnaJ C terminal region Pfam Description: DnaJ C terminal region
  misc_feature (39)..(436): Homolog of NCBI NO: 14326568 NR Description: At1g80030/F18B13_37 [Arabidopsis thaliana]
  misc_feature (39)..(436): Homolog of NCBI NO: 18412605 NR Description: DnaJ protein, putative [Arabidopsis thaliana]
  misc_feature (55)..(442): Homolog of NCBI NO: 7441921 NR Description: heat shock protein dnaJ - garden pea
  misc_feature (1)..(430): Homolog of NCBI NO: 16326131 NR Description: DNAJ homologue [Oryza sativa]
  misc_feature (52)..(439): Homolog of NCBI NO: 7441920 NR Description: heat shock protein T5J17.130, dnaJ-type -
  misc_feature (1)..(439): Homolog of NCBI NO: 18420568 NR Description: DnaJ protein, putative [Arabidopsis thaliana]
  misc_feature (52)..(442): Homolog of NCBI NO: 25296019 NR Description: probable DnaJ protein [imported] - Arabidopsis
  misc_feature (1)..(442): Homolog of NCBI NO: 21536561 NR Description: putative DnaJ protein [Arabidopsis thaliana]
  misc_feature (1)..(442): Homolog of NCBI NO: 18399949 NR Description: DnaJ protein, putative [Arabidopsis thaliana]
  misc_feature (1)..(442): Homolog of NCBI NO: 30794072 NR Description: putative DnaJ protein [Arabidopsis thaliana]

SEQ ID NO: 32044 - protein, 391 aa, Arabidopsis thaliana; identical to SEQ ID NO: 28454
  peptide (1)..(391): Ceres Seq. ID no. 13499770
  misc_feature (256)..(378): Pfam Name: DnaJ C terminal region Pfam Description: DnaJ C terminal region
  misc_feature (1)..(385): Homolog of NCBI NO: 14326568 NR Description: At1g80030/F18B13_37 [Arabidopsis thaliana]
  misc_feature (1)..(385): Homolog of NCBI NO: 18412605 NR Description: DnaJ protein, putative [Arabidopsis thaliana]
  misc_feature (4)..(391): Homolog of NCBI NO: 7441921 NR Description: heat shock protein dnaJ - garden pea
  misc_feature (1)..(379): Homolog of NCBI NO: 16326131 NR Description: DNAJ homologue [Oryza sativa]
  misc_feature (1)..(388): Homolog of NCBI NO: 7441920 NR Description: heat shock protein T5J17.130, dnaJ-type -
  misc_feature (1)..(388): Homolog of NCBI NO: 18420568 NR Description: DnaJ protein, putative [Arabidopsis thaliana]
  misc_feature (1)..(391): Homolog of NCBI NO: 25296019 NR Description: probable DnaJ protein [imported] - Arabidopsis
  misc_feature (1)..(391): Homolog of NCBI NO: 21536561 NR Description: putative DnaJ protein [Arabidopsis thaliana]
  misc_feature (1)..(391): Homolog of NCBI NO: 18399949 NR Description: DnaJ protein, putative [Arabidopsis thaliana]
  misc_feature (1)..(391): Homolog of NCBI NO: 30794072 NR Description: putative DnaJ protein [Arabidopsis thaliana]

SEQ ID NO: 32045 - protein, 380 aa, Arabidopsis thaliana; identical to SEQ ID NO: 28455
  peptide (1)..(380): Ceres Seq. ID no. 13499771
  misc_feature (245)..(367): Pfam Name: DnaJ C terminal region Pfam Description: DnaJ C terminal region
  misc_feature (1)..(374): Homolog of NCBI NO: 14326568 NR Description: At1g80030/F18B13_37 [Arabidopsis thaliana]
  misc_feature (1)..(374): Homolog of NCBI NO: 18412605 NR Description: DnaJ protein, putative [Arabidopsis thaliana]
  misc_feature (1)..(380): Homolog of NCBI NO: 7441921 NR Description: heat shock protein dnaJ - garden pea
  misc_feature (1)..(368): Homolog of NCBI NO: 16326131 NR Description: DNAJ homologue [Oryza sativa]
  misc_feature (1)..(377): Homolog of NCBI NO: 7441920 NR Description: heat shock protein T5J17.130, dnaJ-type -
  misc_feature (1)..(377): Homolog of NCBI NO: 18420568 NR Description: DnaJ protein, putative [Arabidopsis thaliana]
  misc_feature (1)..(380): Homolog of NCBI NO: 25296019 NR Description: probable DnaJ protein [imported] - Arabidopsis
  misc_feature (1)..(380): Homolog of NCBI NO: 21536561 NR Description: putative DnaJ protein [Arabidopsis thaliana]
  misc_feature (1)..(380): Homolog of NCBI NO: 18399949 NR Description: DnaJ protein, putative [Arabidopsis thaliana]
  misc_feature (1)..(380): Homolog of NCBI NO: 30794072 NR Description: putative DnaJ protein [Arabidopsis thaliana]

SEQ ID NO: 32046 - DNA, 1200 bp, Arabidopsis thaliana; identical to SEQ ID NO: 28456
  misc_feature (1)..(1200): Ceres Seq. ID no. 12327357
  misc_feature: MA Experiment ID: 20000086 Result: Down-regulated in Transcription
  misc_feature: MA Experiment 20000086 PARAMETER Experiment Name: At_100uM_ABA_Mutants_cDNA_P Parameter: Plant Line Value: CS22
  misc_feature: MA Experiment 20000086 PARAMETER Experiment Name: At_100uM_ABA_Mutants_cDNA_P Parameter: Timepoint (hr) Value: 6
  misc_feature: MA Experiment 20000086 PARAMETER Experiment Name: At_100uM_ABA_Mutants_cDNA_P Parameter: Tissue Value: Aerial
  misc_feature: MA Experiment 20000086 PARAMETER Experiment Name: At_100uM_ABA_Mutants_cDNA_P Parameter: Treatment Value: 100uM ABA vs. No Treatment
  misc_feature: MA Experiment ID: 20000179 Result: Up-regulated in Transcription
  misc_feature: MA Experiment 20000179 PARAMETER Experiment Name: At_Germinating_Seeds_P Parameter: Age (hr) Value: 6 vs. 0
  misc_feature: MA Experiment 20000179 PARAMETER Experiment Name: At_Germinating_Seeds_P Parameter: Tissue Value: Germinating Seeds
  misc_feature: MA Experiment ID: 20000180 Result: Up-regulated in Transcription
  misc_feature: MA Experiment 20000180 PARAMETER Experiment Name: At_Germinating_Seeds_P Parameter: Age (hr) Value: 24 vs. 0
  misc_feature: MA Experiment 20000180 PARAMETER Experiment Name: At_Germinating_Seeds_P Parameter: Tissue Value: Germinating Seeds
  misc_feature: MA Experiment ID: 20000224 Result: Down-regulated in Transcription
  misc_feature: MA Experiment ID: 20000235 Result: Down-regulated in Transcription
  misc_feature: MA Experiment 20000235 PARAMETER Experiment Name: At_Siliques_P Parameter: Age (day) Value: 21
  misc_feature: MA Experiment 20000235 PARAMETER Experiment Name: At_Siliques_P Parameter: Organism Value: A. thaliana
  misc_feature: MA Experiment 20000235 PARAMETER Experiment Name: At_Siliques_P Parameter: Plant Line Value: WS
  misc_feature: MA Experiment 20000235 PARAMETER Experiment Name: At_Siliques_P Parameter: Tissue Value: 5-10mm Siliques vs. Whole Plant

SEQ ID NO: 32047 - protein, 260 aa, Arabidopsis thaliana; identical to SEQ ID NO: 28457
  peptide (1)..(260): Ceres Seq. ID no. 12327358
  misc_feature (43)..(204): Pfam Name: Universal stress protein family Pfam Description: Universal stress protein family
  misc_feature (39)..(170): Homolog of NCBI NO: 15232490 NR Description: CHP-rich zinc finger protein, putative; protein
  misc_feature (17)..(223): Homolog of NCBI NO: 34910112 NR Description: B1100D10.31 [Oryza sativa (japonica
  misc_feature (30)..(244): Homolog of NCBI NO: 30682187 NR Description: expressed protein [Arabidopsis thaliana]
  misc_feature (30)..(244): Homolog of NCBI NO: 25402657 NR Description: protein T23J18.3 [imported] - Arabidopsis
  misc_feature (33)..(244): Homolog of NCBI NO: 33146953 NR Description: CHP-rich zinc finger protein-like
  misc_feature (33)..(244): Homolog of NCBI NO: 28971968 NR Description: OSJNBb0041B22.10 [Oryza sativa (japonica
  misc_feature (1)..(237): Homolog of NCBI NO: 18423628 NR Description: putative protein
  misc_feature (1)..(237): Homolog of NCBI NO: 8885586 NR Description: gene_id:F24B18.5~pir||T05756~similar to unknown
  misc_feature (1)..(258): Homolog of NCBI NO: 7486798 NR Description: hypothetical protein M4I22.130 - Arabidopsis
  misc_feature (1)..(260): Homolog of NCBI NO: 18416966 NR Description: putative protein

SEQ ID NO: 32048 - DNA, 1432 bp, Arabidopsis thaliana; identical to SEQ ID NO: 28458
  misc_feature (1)..(1432): Ceres Seq. ID no. 12559942
  misc_feature: MA Experiment ID: 20000180 Result: Up-regulated in Transcription
  misc_feature: MA Experiment 20000180 PARAMETER Experiment Name: At_Germinating_Seeds_P Parameter: Age (hr) Value: 24 vs. 0
  misc_feature: MA Experiment 20000180 PARAMETER Experiment Name: At_Germinating_Seeds_P Parameter: Tissue Value: Germinating Seeds
  misc_feature: MA Experiment ID: 20000182 Result: Down-regulated in Transcription
  misc_feature: MA Experiment 20000182 PARAMETER Experiment Name: At_2mM_SA_P Parameter: Age (day) Value: 14
  misc_feature: MA Experiment 20000182 PARAMETER Experiment Name: At_2mM_SA_P Parameter: Organism Value: A. thaliana
  misc_feature: MA Experiment 20000182 PARAMETER Experiment Name: At_2mM_SA_P Parameter: Plant Line Value: WS
  misc_feature: MA Experiment 20000182 PARAMETER Experiment Name: At_2mM_SA_P Parameter: Timepoint (hr) Value: 6
  misc_feature: MA Experiment 20000182 PARAMETER Experiment Name: At_2mM_SA_P Parameter: Tissue Value: Aerial
  misc_feature: MA Experiment 20000182 PARAMETER Experiment Name: At_2mM_SA_P Parameter: Treatment Value: 2mM SA vs. No Treatment
  misc_feature: MA Experiment ID: 20000185 Result: Down-regulated in Transcription
  misc_feature: MA Experiment 20000185 PARAMETER Experiment Name: At_Roots__P Parameter: Age (day) Value: 7 vs. 21
  misc_feature: MA Experiment 20000185 PARAMETER Experiment Name: At_Roots__P Parameter: Organism Value: A. thaliana
  misc_feature: MA Experiment 20000185 PARAMETER Experiment Name: At_Roots__P Parameter: Tissue Value: Roots vs. Whole Plant
  misc_feature: MA Experiment ID: 20000234 Result: Down-regulated in Transcription
  misc_feature: MA Experiment 20000234 PARAMETER Experiment Name: At_Siliques_P Parameter: Age (day) Value: 21
  misc_feature: MA Experiment 20000234 PARAMETER Experiment Name: At_Siliques_P Parameter: Organism Value: A. thaliana
  misc_feature: MA Experiment 20000234 PARAMETER Experiment Name: At_Siliques_P Parameter: Plant Line Value: WS
  misc_feature: MA Experiment 20000234 PARAMETER Experiment Name: At_Siliques_P Parameter: Tissue Value: Less Than 5mm Siliques vs. Whole Plant
  misc_feature: MA Experiment ID: 20000264 Result: Down-regulated in Transcription
  misc_feature: MA Experiment 20000264 PARAMETER Experiment Name: At_Open_Flower_P Parameter: Age (day) Value: 21
  misc_feature: MA Experiment 20000264 PARAMETER Experiment Name: At_Open_Flower_P Parameter: Plant Line Value: WS
  misc_feature: MA Experiment 20000264 PARAMETER Experiment Name: At_Open_Flower_P Parameter: Tissue Value: Open Flower vs. Whole Plant
  misc_feature: MA Experiment ID: 20000265 Result: Down-regulated in Transcription
  misc_feature: MA Experiment 20000265 PARAMETER Experiment Name: At_Open_Flower_P Parameter: Age (day) Value: 21
  misc_feature: MA Experiment 20000265 PARAMETER Experiment Name: At_Open_Flower_P Parameter: Plant Line Value: WS
  misc_feature: MA Experiment 20000265 PARAMETER Experiment Name: At_Open_Flower_P Parameter: Tissue Value: Closed Flower vs. Whole Plant
  misc_feature: MA Experiment ID: 20000286 Result: Down-regulated in Transcription
  misc_feature: MA Experiment 20000286 PARAMETER Experiment Name: At_Open_Flower_P Parameter: Age (day) Value: 21
  misc_feature: MA Experiment 20000286 PARAMETER Experiment Name: At_Open_Flower_P Parameter: Plant Line Value: WS
  misc_feature: MA Experiment 20000286 PARAMETER Experiment Name: At_Open_Flower_P Parameter: Tissue Value: Half Open vs. Whole Plant
  misc_feature: MA Experiment ID: 20000437 Result: Down-regulated in Transcription
  misc_feature: MA Experiment 20000437 PARAMETER Experiment Name: At_Drought_P Parameter: Age (day) Value: 8
  misc_feature: MA Experiment 20000437 PARAMETER Experiment Name: At_Drought_P Parameter: Organism Value: A. thaliana
  misc_feature: MA Experiment 20000437 PARAMETER Experiment Name: At_Drought_P Parameter: Plant Line Value: WS
  misc_feature: MA Experiment 20000437 PARAMETER Experiment Name: At_Drought_P Parameter: Timepoint (hr) Value: 24
  misc_feature: MA Experiment 20000437 PARAMETER Experiment Name: At_Drought_P Parameter: Tissue Value: Whole Plant
  misc_feature: MA Experiment 20000437 PARAMETER Experiment Name: At_Drought_P Parameter: Treatment Value: Drought vs. No Drought
  misc_feature: MA Experiment ID: 20000438 Result: Up-regulated in Transcription
  misc_feature: MA Experiment 20000438 PARAMETER Experiment Name: At_Shoots__P Parameter: Age (day) Value: 14
  misc_feature: MA Experiment 20000438 PARAMETER Experiment Name: At_Shoots__P Parameter: Tissue Value: Shoots vs. Whole Plant
  misc_feature: MA Experiment ID: 20000439 Result: Down-regulated in Transcription
  misc_feature: MA Experiment 20000439 PARAMETER Experiment Name: At_Roots__P Parameter: Age (day) Value: 14 vs. 21
  misc_feature: MA Experiment 20000439 PARAMETER Experiment Name: At_Roots__P Parameter: Organism Value: A. thaliana
  misc_feature: MA Experiment 20000439 PARAMETER Experiment Name: At_Roots__P Parameter: Tissue Value: Roots vs. Whole Plant
  misc_feature: MA Experiment ID: 20000452 Result: Up-regulated in Transcription
  misc_feature: MA Experiment 20000452 PARAMETER Experiment Name: At_CS6879_Shoots-Roots_P Parameter: Age (day) Value: 14
  misc_feature: MA Experiment 20000452 PARAMETER Experiment Name: At_CS6879_Shoots-Roots_P Parameter: Organism Value: A. thaliana
  misc_feature: MA Experiment 20000452 PARAMETER Experiment Name: At_CS6879_Shoots-Roots_P Parameter: Plant Line Value: CS6879 vs. WS
  misc_feature: MA Experiment 20000452 PARAMETER Experiment Name: At_CS6879_Shoots-Roots_P Parameter: Tissue Value: Shoots
  misc_feature: MA Experiment ID: 20000573 Result: Down-regulated in Transcription
  misc_feature: MA Experiment 20000573 PARAMETER Experiment Name: At_100uM_ABA_Mutants__P Parameter: Organism Value: A. thaliana
  misc_feature: MA Experiment 20000573 PARAMETER Experiment Name: At_100uM_ABA_Mutants__P Parameter: Plant Line Value: CS22 vs. Ler wt
  misc_feature: MA Experiment 20000573 PARAMETER Experiment Name: At_100uM_ABA_Mutants__P Parameter: Timepoint (hr) Value: N/A
  misc_feature: MA Experiment 20000573 PARAMETER Experiment Name: At_100uM_ABA_Mutants__P Parameter: Tissue Value: Whole Plant
  misc_feature: MA Experiment 20000573 PARAMETER Experiment Name: At_100uM_ABA_Mutants__P Parameter: Treatment Value: None
  misc_feature: MA Experiment ID: 20000794 Result: Down-regulated in Transcription
  misc_feature: MA Experiment 20000794 PARAMETER Experiment Name: At_Petals_P Parameter: Age (day) Value: 23-25 days
  misc_feature: MA Experiment 20000794 PARAMETER Experiment Name: At_Petals_P Parameter: Plant Line Value: WS
  misc_feature: MA Experiment 20000794 PARAMETER Experiment Name: At_Petals_P Parameter: Tissue Value: Petals vs. Whole plant
  misc_feature: MA Experiment ID: 20001248 Result: Down-regulated in Transcription
  misc_feature: MA Experiment 20001248 PARAMETER Experiment Name: At_Far-red-induction_P Parameter: Age (day) Value: 7
  misc_feature: MA Experiment 20001248 PARAMETER Experiment Name: At_Far-red-induction_P Parameter: Light Value: Far-red vs. White
  misc_feature: MA Experiment 20001248 PARAMETER Experiment Name: At_Far-red-induction_P Parameter: Organism Value: A. thaliana
  misc_feature: MA Experiment 20001248 PARAMETER Experiment Name: At_Far-red-induction_P Parameter: Plant Line Value: Columbia
  misc_feature: MA Experiment 20001248 PARAMETER Experiment Name: At_Far-red-induction_P Parameter: Timepoint (hr) Value: 4
  misc_feature: MA Experiment 20001248 PARAMETER Experiment Name: At_Far-red-induction_P Parameter: Tissue Value: Whole Plant
  misc_feature: MA Experiment ID: 20001450 Result: Down-regulated in Transcription
  misc_feature: MA Experiment 20001450 PARAMETER Experiment Name: At_Far-red-induction_P Parameter: Age (day) Value: 7
  misc_feature: MA Experiment 20001450 PARAMETER Experiment Name: At_Far-red-induction_P Parameter: Light Value: Far-red vs. White
  misc_feature: MA Experiment 20001450 PARAMETER Experiment Name: At_Far-red-induction_P Parameter: Organism Value: A. thaliana
  misc_feature: MA Experiment 20001450 PARAMETER Experiment Name: At_Far-red-induction_P Parameter: Plant Line Value: Columbia
  misc_feature: MA Experiment 20001450 PARAMETER Experiment Name: At_Far-red-induction_P Parameter: Timepoint (hr) Value: 8
  misc_feature: MA Experiment 20001450 PARAMETER Experiment Name: At_Far-red-induction_P Parameter: Tissue Value: Whole Plant
  misc_feature: MA Experiment ID: 20001557 Result: Down-regulated in Transcription
  misc_feature: MA Experiment 20001557 PARAMETER Experiment Name: At_Drought_Soil_Dry_P Parameter: Age (day) Value: 27
  misc_feature: MA Experiment 20001557 PARAMETER Experiment Name: At_Drought_Soil_Dry_P Parameter: Organism Value: A. thaliana
  misc_feature: MA Experiment 20001557 PARAMETER Experiment Name: At_Drought_Soil_Dry_P Parameter: Plant Line Value: WS
  misc_feature: MA Experiment 20001557 PARAMETER Experiment Name: At_Drought_Soil_Dry_P Parameter: Post Timepoint (hr) Value: 3
  misc_feature: MA Experiment 20001557 PARAMETER Experiment Name: At_Drought_Soil_Dry_P Parameter: Post-Treatment Value: Re-Water vs. No Drought
  misc_feature: MA Experiment 20001557 PARAMETER Experiment Name: At_Drought_Soil_Dry_P Parameter: Timepoint (day) Value: 13
  misc_feature: MA Experiment 20001557 PARAMETER Experiment Name: At_Drought_Soil_Dry_P Parameter: Treatment Value: Drought vs. No Drought
  misc_feature: MA Experiment ID: 20001558 Result: Down-regulated in Transcription
  misc_feature: MA Experiment 20001558 PARAMETER Experiment Name: At_Drought_Soil_Dry_P Parameter: Age (day) Value: 27
  misc_feature: MA Experiment 20001558 PARAMETER Experiment Name: At_Drought_Soil_Dry_P Parameter: Organism Value: A. thaliana
  misc_feature: MA Experiment 20001558 PARAMETER Experiment Name: At_Drought_Soil_Dry_P Parameter: Plant Line Value: WS
  misc_feature: MA Experiment 20001558 PARAMETER Experiment Name: At_Drought_Soil_Dry_P Parameter: Post Timepoint (hr) Value: 6
  misc_feature: MA Experiment 20001558 PARAMETER Experiment Name: At_Drought_Soil_Dry_P Parameter: Post-Treatment Value: Re-Water vs. No Drought
  misc_feature: MA Experiment 20001558 PARAMETER Experiment Name: At_Drought_Soil_Dry_P Parameter: Timepoint (day) Value: 13
  misc_feature: MA Experiment 20001558 PARAMETER Experiment Name: At_Drought_Soil_Dry_P Parameter: Treatment Value: Drought vs. No Drought
  misc_feature: MA Experiment ID: 20001559 Result: Down-regulated in Transcription
  misc_feature: MA Experiment 20001559 PARAMETER Experiment Name: At_Drought_Soil_Dry_P Parameter: Age (day) Value: 28
  misc_feature: MA Experiment 20001559 PARAMETER Experiment Name: At_Drought_Soil_Dry_P Parameter: Organism Value: A. thaliana
  misc_feature: MA Experiment 20001559 PARAMETER Experiment Name: At_Drought_Soil_Dry_P Parameter: Plant Line Value: WS
  misc_feature: MA Experiment 20001559 PARAMETER Experiment Name: At_Drought_Soil_Dry_P Parameter: Post Timepoint (hr) Value: 29
  misc_feature: MA Experiment 20001559 PARAMETER Experiment Name: At_Drought_Soil_Dry_P Parameter: Post-Treatment Value: Re-Water vs. No Drought
  misc_feature: MA Experiment 20001559 PARAMETER Experiment Name: At_Drought_Soil_Dry_P Parameter: Timepoint (day) Value: 14
  misc_feature: MA Experiment 20001559 PARAMETER Experiment Name: At_Drought_Soil_Dry_P Parameter: Treatment Value: Drought vs. No Drought
  misc_feature: MA Experiment ID: 20001904 Result: Down-regulated in Transcription
  misc_feature: MA Experiment 20001904 PARAMETER Experiment Name: At_Drought_Reproduction_P Parameter: Age (day) Value: 37
  misc_feature: MA Experiment 20001904 PARAMETER Experiment Name: At_Drought_Reproduction_P Parameter: Organism Value: A. thaliana
  misc_feature: MA Experiment 20001904 PARAMETER Experiment Name: At_Drought_Reproduction_P Parameter: Plant Line Value: WS
  misc_feature: MA Experiment 20001904 PARAMETER Experiment Name: At_Drought_Reproduction_P Parameter: Timepoint (day) Value: 7
  misc_feature: MA Experiment 20001904 PARAMETER Experiment Name: At_Drought_Reproduction_P Parameter: Tissue Value: Rosettes
  misc_feature: MA Experiment 20001904 PARAMETER Experiment Name: At_Drought_Reproduction_P Parameter: Treatment Value: Drought vs. No Drought
  misc_feature: MA Experiment ID: 20001906 Result: Down-regulated in Transcription
  misc_feature: MA Experiment 20001906 PARAMETER Experiment Name: At_Drought_Reproduction_P Parameter: Age (day) Value: 35
  misc_feature: MA Experiment 20001906 PARAMETER Experiment Name: At_Drought_Reproduction_P Parameter: Organism Value: A. thaliana
  misc_feature: MA Experiment 20001906 PARAMETER Experiment Name: At_Drought_Reproduction_P Parameter: Plant Line Value: WS
  misc_feature: MA Experiment 20001906 PARAMETER Experiment Name: At_Drought_Reproduction_P Parameter: Timepoint (day) Value: 5
  misc_feature: MA Experiment 20001906 PARAMETER Experiment Name: At_Drought_Reproduction_P Parameter: Tissue Value: Siliques
  misc_feature: MA Experiment 20001906 PARAMETER Experiment Name: At_Drought_Reproduction_P Parameter: Treatment Value: Drought vs. No Drought

SEQ ID NO: 32049 - protein, 429 aa, Arabidopsis thaliana; identical to SEQ ID NO: 28459
  peptide (1)..(429): Ceres Seq. ID no. 12559943
  misc_feature (93)..(429): Pfam Name: Fructose-1-6-bisphosphatase Pfam Description: Fructose-1-6-bisphosphatase
  misc_feature (74)..(429): Homolog of NCBI NO: 67243 NR Description: fructose-bisphosphatase (EC 3.1.3.11),
  misc_feature (60)..(429): Homolog of NCBI NO: 322711 NR Description: fructose-bisphosphatase (EC 3.1.3.11) - garden
  misc_feature (17)..(429): Homolog of NCBI NO: 2506391 NR Description: Fructose-1,6-bisphosphatase, chloroplast
  misc_feature (17)..(429): Homolog of NCBI NO: 14318171 NR Description: fructose-1,6-bisphosphatase [Pisum sativum]
  misc_feature (13)..(429): Homolog of NCBI NO: 4585576 NR Description: fructose-1,6-bisphosphatase precursor [Solanum
  misc_feature (13)..(429): Homolog of NCBI NO: 3915687 NR Description: Fructose-1,6-bisphosphatase, chloroplast
  misc_feature (13)..(429): Homolog of NCBI NO: 585118 NR Description: FRUCTOSE-1,6-BISPHOSPHATASE, CHLOROPLAST
  misc_feature (13)..(429): Homolog of NCBI NO: 4218951 NR Description: fructose-1,6-bisphosphatase precursor [Brassica
  misc_feature (13)..(429): Homolog of NCBI NO: 99693 NR Description: fructose-bisphosphatase (EC 3.1.3.11) precursor,
  misc_feature (13)..(429): Homolog of NCBI NO: 15232408 NR Description: fructose-bisphosphatase precursor

SEQ ID NO: 32050 - protein, 417 aa, Arabidopsis thaliana; identical to SEQ ID NO: 28460
  peptide (1)..(417): Ceres Seq. ID no. 12559944
  misc_feature (81)..(417): Pfam Name: Fructose-1-6-bisphosphatase Pfam Description: Fructose-1-6-bisphosphatase
  misc_feature (62)..(417): Homolog of NCBI NO: 67243 NR Description: fructose-bisphosphatase (EC 3.1.3.11),
  misc_feature (48)..(417): Homolog of NCBI NO: 322711 NR Description: fructose-bisphosphatase (EC 3.1.3.11) - garden
  misc_feature (5)..(417): Homolog of NCBI NO: 2506391 NR Description: Fructose-1,6-bisphosphatase, chloroplast
  misc_feature (5)..(417): Homolog of NCBI NO: 14318171 NR Description: fructose-1,6-bisphosphatase [Pisum sativum]
  misc_feature (1)..(417): Homolog of NCBI NO: 4585576 NR Description: fructose-1,6-bisphosphatase precursor [Solanum
  misc_feature (1)..(417): Homolog of NCBI NO: 3915687 NR Description: Fructose-1,6-bisphosphatase, chloroplast
  misc_feature (1)..(417): Homolog of NCBI NO: 585118 NR Description: FRUCTOSE-1,6-BISPHOSPHATASE, CHLOROPLAST
  misc_feature (1)..(417): Homolog of NCBI NO: 4218951 NR Description: fructose-1,6-bisphosphatase precursor [Brassica
  misc_feature (1)..(417): Homolog of NCBI NO: 99693 NR Description: fructose-bisphosphatase (EC 3.1.3.11) precursor,
  misc_feature (1)..(417): Homolog of NCBI NO: 15232408 NR Description: fructose-bisphosphatase precursor

SEQ ID NO: 32051 - protein, 359 aa, Arabidopsis thaliana; identical to SEQ ID NO: 28461
  peptide (1)..(359): Ceres Seq. ID no. 12559945
  misc_feature (23)..(359): Pfam Name: Fructose-1-6-bisphosphatase Pfam Description: Fructose-1-6-bisphosphatase
  misc_feature (4)..(359): Homolog of NCBI NO: 67243 NR Description: fructose-bisphosphatase (EC 3.1.3.11),
  misc_feature (1)..(359): Homolog of NCBI NO: 322711 NR Description: fructose-bisphosphatase (EC 3.1.3.11) - garden
  misc_feature (1)..(359): Homolog of NCBI NO: 2506391 NR Description: Fructose-1,6-bisphosphatase, chloroplast
  misc_feature (1)..(359): Homolog of NCBI NO: 14318171 NR Description: fructose-1,6-bisphosphatase [Pisum sativum]
  misc_feature (1)..(359): Homolog of NCBI NO: 4585576 NR Description: fructose-1,6-bisphosphatase precursor [Solanum
  misc_feature (1)..(359): Homolog of NCBI NO: 3915687 NR Description: Fructose-1,6-bisphosphatase, chloroplast
  misc_feature (1)..(359): Homolog of NCBI NO: 585118 NR Description: FRUCTOSE-1,6-BISPHOSPHATASE, CHLOROPLAST
  misc_feature (1)..(359): Homolog of NCBI NO: 4218951 NR Description: fructose-1,6-bisphosphatase precursor [Brassica
  misc_feature (1)..(359): Homolog of NCBI NO: 99693 NR Description: fructose-bisphosphatase (EC 3.1.3.11) precursor,
  misc_feature (1)..(359): Homolog of NCBI NO: 15232408 NR Description: fructose-bisphosphatase precursor

SEQ ID NO: 32052 - DNA, 569 bp, Arabidopsis thaliana; identical to SEQ ID NO: 28462
  misc_feature (1)..(569): Ceres Seq. ID no. 12482101
  misc_feature: MA Experiment ID: 108434 Result: Up-regulated in Transcription
  misc_feature: MA Experiment 108434 PARAMETER Experiment Name: At_Root_Tips_cDNA_P Parameter: Tissue Value: Root Tips
  misc_feature: MA Experiment ID: 20001911 Result: Down-regulated in Transcription
  misc_feature: MA Experiment 20001911 PARAMETER Experiment Name: At_Drought_Reproduction_P Parameter: Age (day) Value: 40
  misc_feature: MA Experiment 20001911 PARAMETER Experiment Name: At_Drought_Reproduction_P Parameter: Organism Value: A. thaliana
  misc_feature: MA Experiment 20001911 PARAMETER Experiment Name: At_Drought_Reproduction_P Parameter: Plant Line Value: WS
  misc_feature: MA Experiment 20001911 PARAMETER Experiment Name: At_Drought_Reproduction_P Parameter: Timepoint (day) Value: 10
  misc_feature: MA Experiment 20001911 PARAMETER Experiment Name: At_Drought_Reproduction_P Parameter: Tissue Value: Flowers
  misc_feature: MA Experiment 20001911 PARAMETER Experiment Name: At_Drought_Reproduction_P Parameter: Treatment Value: Drought vs. No Drought

SEQ ID NO: 32053 - protein, 106 aa, Arabidopsis thaliana; identical to SEQ ID NO: 28463
  peptide (1)..(106): Ceres Seq. ID no. 12482102
  misc_feature (14)..(101): Homolog of NCBI NO: 24762701 NR Description: CG3683-PA [Drosophila melanogaster]
  misc_feature (14)..(105): Homolog of NCBI NO: 21312012 NR Description: RIKEN cDNA 0610033L03 [Mus musculus]
  misc_feature (14)..(101): Homolog of NCBI NO: 38048623 NR Description: similar to Drosophila melanogaster CG3683
  misc_feature (14)..(105): Homolog of NCBI NO: 28461275 NR Description: NADH dehydrogenase (ubiquinone) 1 alpha
  misc_feature (14)..(105): Homolog of NCBI NO: 33086512 NR Description: Aa2-258 [Rattus norvegicus]
  misc_feature (14)..(105): Homolog of NCBI NO: 27706932 NR Description: similar to RIKEN cDNA 0610033L03
  misc_feature (14)..(105): Homolog of NCBI NO: 7657369 NR Description: NADH dehydrogenase (ubiquinone) 1 alpha
  misc_feature (14)..(105): Homolog of NCBI NO: 37589679 NR Description: Unknown (protein for MGC:73139) [Danio rerio]
  misc_feature (2)..(106): Homolog of NCBI NO: 18397530 NR Description: expressed protein
  misc_feature (1)..(106): Homolog of NCBI NO: 15239564 NR Description: NADH:ubiquinone oxidoreductase - like protein

SEQ ID NO: 32054 - protein, 80 aa, Arabidopsis thaliana; identical to SEQ ID NO: 28464
  peptide (1)..(80): Ceres Seq. ID no. 12482103
  misc_feature (1)..(75): Homolog of NCBI NO: 24762701 NR Description: CG3683-PA [Drosophila melanogaster]
  misc_feature (1)..(79): Homolog of NCBI NO: 21312012 NR Description: RIKEN cDNA 0610033L03 [Mus musculus]
  misc_feature (1)..(75): Homolog of NCBI NO: 38048623 NR Description: similar to Drosophila melanogaster CG3683
  misc_feature (1)..(79): Homolog of NCBI NO: 28461275 NR Description: NADH dehydrogenase (ubiquinone) 1 alpha
  misc_feature (1)..(79): Homolog of NCBI NO: 33086512 NR Description: Aa2-258 [Rattus norvegicus]
  misc_feature (1)..(79): Homolog of NCBI NO: 27706932 NR Description: similar to RIKEN cDNA 0610033L03
  misc_feature (1)..(79): Homolog of NCBI NO: 7657369 NR Description: NADH dehydrogenase (ubiquinone) 1 alpha
  misc_feature (1)..(79): Homolog of NCBI NO: 37589679 NR Description: Unknown (protein for MGC:73139) [Danio rerio]
  misc_feature (1)..(80): Homolog of NCBI NO: 18397530 NR Description: expressed protein
  misc_feature (1)..(80): Homolog of NCBI NO: 15239564 NR Description: NADH:ubiquinone oxidoreductase - like protein

SEQ ID NO: 32055 - protein, 77 aa, Arabidopsis thaliana; identical to SEQ ID NO: 28465
  peptide (1)..(77): Ceres Seq. ID no. 12482104
  misc_feature (1)..(72): Homolog of NCBI NO: 24762701 NR Description: CG3683-PA [Drosophila melanogaster]
  misc_feature (1)..(76): Homolog of NCBI NO: 21312012 NR Description: RIKEN cDNA 0610033L03 [Mus musculus]
  misc_feature (1)..(72): Homolog of NCBI NO: 38048623 NR Description: similar to Drosophila melanogaster CG3683
  misc_feature (1)..(76): Homolog of NCBI NO: 28461275 NR Description: NADH dehydrogenase (ubiquinone) 1 alpha
  misc_feature (1)..(76): Homolog of NCBI NO: 33086512 NR Description: Aa2-258 [Rattus norvegicus]
  misc_feature (1)..(76): Homolog of NCBI NO: 27706932 NR Description: similar to RIKEN cDNA 0610033L03
  misc_feature (1)..(76): Homolog of NCBI NO: 7657369 NR Description: NADH dehydrogenase (ubiquinone) 1 alpha
  misc_feature (1)..(76): Homolog of NCBI NO: 37589679 NR Description: Unknown (protein for MGC:73139) [Danio rerio]
  misc_feature (1)..(77): Homolog of NCBI NO: 18397530 NR Description: expressed protein
  misc_feature (1)..(77): Homolog of NCBI NO: 15239564 NR Description: NADH:ubiquinone oxidoreductase - like protein

SEQ ID NO: 32056 - DNA, 588 bp, Arabidopsis thaliana; identical to SEQ ID NO: 28466
  misc_feature (1)..(588): Ceres Seq. ID no. 12336000
  misc_feature: MA Experiment ID: 108434 Result: Up-regulated in Transcription
  misc_feature: MA Experiment 108434 PARAMETER Experiment Name: At_Root_Tips_cDNA_P Parameter: Tissue Value: Root Tips
  misc_feature: MA Experiment ID: 108461 Result: Up-regulated in Transcription
  misc_feature: MA Experiment 108461 PARAMETER Experiment Name: At_Germinating_Seeds_cDNA_P Parameter: Age (day) Value: 1 vs. 0
  misc_feature: MA Experiment 108461 PARAMETER Experiment Name: At_Germinating_Seeds_cDNA_P Parameter: Tissue Value: Germinating Seeds
  misc_feature: MA Experiment ID: 108462 Result: Up-regulated in Transcription
  misc_feature: MA Experiment 108462 PARAMETER Experiment Name: At_Germinating_Seeds_cDNA_P Parameter: Age (day) Value: 2 vs. 0
  misc_feature: MA Experiment 108462 PARAMETER Experiment Name: At_Germinating_Seeds_cDNA_P Parameter: Tissue Value: Germinating Seeds
  misc_feature: MA Experiment ID: 108573 Result: Down-regulated in Transcription
  misc_feature: MA Experiment 108573 PARAMETER Experiment Name: At_Drought_cDNA_P Parameter: Timepoint (hr) Value: 6
  misc_feature: MA Experiment 108573 PARAMETER Experiment Name: At_Drought_cDNA_P Parameter: Tissue Value: Aerial
  misc_feature: MA Experiment 108573 PARAMETER Experiment Name: At_Drought_cDNA_P Parameter: Treatment Value: Drought vs. No Drought
  misc_feature: MA Experiment ID: 108577 Result: Down-regulated in Transcription
  misc_feature: MA Experiment 108577 PARAMETER Experiment Name: At_42deg_Heat_cDNA_P Parameter: Temperature (deg C) Value: 42 vs. 22
  misc_feature: MA Experiment 108577 PARAMETER Experiment Name: At_42deg_Heat_cDNA_P Parameter: Timepoint (hr) Value: 6
  misc_feature: MA Experiment 108577 PARAMETER Experiment Name: At_42deg_Heat_cDNA_P Parameter: Tissue Value: Aerial
  misc_feature: MA Experiment ID: 108579 Result: Up-regulated in Transcription
  misc_feature: MA Experiment 108579 PARAMETER Experiment Name: At_4deg_Cold_cDNA_P Parameter: Temperature (deg C) Value: 4 vs. 22
  misc_feature: MA Experiment 108579 PARAMETER Experiment Name: At_4deg_Cold_cDNA_P Parameter: Timepoint (hr) Value: 6
  misc_feature: MA Experiment 108579 PARAMETER Experiment Name: At_4deg_Cold_cDNA_P Parameter: Tissue Value: Aerial
  misc_feature: MA Experiment ID: 108585 Result: Down-regulated in Transcription
  misc_feature: MA Experiment 108585 PARAMETER Experiment Name: At_5mM_NaNP_cDNA_P Parameter: Timepoint (hr) Value: 6
  misc_feature: MA Experiment 108585 PARAMETER Experiment Name: At_5mM_NaNP_cDNA_P Parameter: Tissue Value: Aerial
  misc_feature: MA Experiment 108585 PARAMETER Experiment Name: At_5mM_NaNP_cDNA_P Parameter: Treatment Value: null
  misc_feature: MA Experiment ID: 20000112 Result: Down-regulated in Transcription
  misc_feature: MA Experiment 20000112 PARAMETER Experiment Name: At_42deg_Heat_cDNA_P Parameter: Temperature (deg C) Value: 42 vs. 22
  misc_feature: MA Experiment 20000112 PARAMETER Experiment Name: At_42deg_Heat_cDNA_P Parameter: Timepoint (hr) Value: 2
  misc_feature: MA Experiment 20000112 PARAMETER Experiment Name: At_42deg_Heat_cDNA_P Parameter: Tissue Value: Aerial
  misc_feature: MA Experiment ID: 20000117 Result: Down-regulated in Transcription
  misc_feature: MA Experiment 20000117 PARAMETER Experiment Name: At_100uM_ABA_Mutants_cDNA_P Parameter: Plant Line Value: Columbia
  misc_feature: MA Experiment 20000117 PARAMETER Experiment Name: At_100uM_ABA_Mutants_cDNA_P Parameter: Timepoint (hr) Value: 6
  misc_feature: MA Experiment 20000117 PARAMETER Experiment Name: At_100uM_ABA_Mutants_cDNA_P Parameter: Tissue Value: Aerial
  misc_feature: MA Experiment 20000117 PARAMETER Experiment Name: At_100uM_ABA_Mutants_cDNA_P Parameter: Treatment Value: 100uM ABA vs. No Treatment
  misc_feature: MA Experiment ID: 20000144 Result: Down-regulated in Transcription
  misc_feature: MA Experiment 20000144 PARAMETER Experiment Name: At_42deg_Heat_cDNA_P Parameter: Temperature (deg C) Value: 42 vs. 22
  misc_feature: MA Experiment 20000144 PARAMETER Experiment Name: At_42deg_Heat_cDNA_P Parameter: Timepoint (hr) Value: 1
  misc_feature: MA Experiment 20000144 PARAMETER Experiment Name: At_42deg_Heat_cDNA_P Parameter: Tissue Value: Aerial
  misc_feature: MA Experiment ID: 20000171 Result: Down-regulated in Transcription
  misc_feature: MA Experiment 20000171 PARAMETER Experiment Name: At_42deg_Heat_P Parameter: Age (day) Value: 14
  misc_feature: MA Experiment 20000171 PARAMETER Experiment Name: At_42deg_Heat_P Parameter: Organism Value: A. thaliana
  misc_feature: MA Experiment 20000171 PARAMETER Experiment Name: At_42deg_Heat_P Parameter: Plant Line Value: WS
  misc_feature: MA Experiment 20000171 PARAMETER Experiment Name: At_42deg_Heat_P Parameter: Temperature (deg C) Value: 42 vs. 22
  misc_feature: MA Experiment 20000171 PARAMETER Experiment Name: At_42deg_Heat_P Parameter: Timepoint (hr) Value: 1
  misc_feature: MA Experiment 20000171 PARAMETER Experiment Name: At_42deg_Heat_P Parameter: Tissue Value: Aerial
  misc_feature: MA Experiment ID: 20000173 Result: Down-regulated in Transcription
  misc_feature: MA Experiment 20000173 PARAMETER Experiment Name: At_42deg_Heat_P Parameter: Age (day) Value: 14
  misc_feature: MA Experiment 20000173 PARAMETER Experiment Name: At_42deg_Heat_P Parameter: Organism Value: A. thaliana
  misc_feature: MA Experiment 20000173 PARAMETER Experiment Name: At_42deg_Heat_P Parameter: Plant Line Value: WS
  misc_feature: MA Experiment 20000173 PARAMETER Experiment Name: At_42deg_Heat_P Parameter: Temperature (deg C) Value: 42 vs. 22
  misc_feature: MA Experiment 20000173 PARAMETER Experiment Name: At_42deg_Heat_P Parameter: Timepoint (hr) Value: 6
  misc_feature: MA Experiment 20000173 PARAMETER Experiment Name: At_42deg_Heat_P Parameter: Tissue Value: Aerial
  misc_feature: MA Experiment ID: 20000179 Result: Up-regulated in Transcription
  misc_feature: MA Experiment 20000179 PARAMETER Experiment Name: At_Germinating_Seeds_P Parameter: Age (hr) Value: 6 vs. 0
  misc_feature: MA Experiment 20000179 PARAMETER Experiment Name: At_Germinating_Seeds_P Parameter: Tissue Value: Germinating Seeds
  misc_feature: MA Experiment ID: 20000180 Result: Up-regulated in Transcription
  misc_feature: MA Experiment 20000180 PARAMETER Experiment Name: At_Germinating_Seeds_P Parameter: Age (hr) Value: 24 vs. 0
  misc_feature: MA Experiment 20000180 PARAMETER Experiment Name: At_Germinating_Seeds_P Parameter: Tissue Value: Germinating Seeds
  misc_feature: MA Experiment ID: 20000234 Result: Up-regulated in Transcription
  misc_feature: MA Experiment 20000234 PARAMETER Experiment Name: At_Siliques_P Parameter: Age (day) Value: 21
  misc_feature: MA Experiment 20000234 PARAMETER Experiment Name: At_Siliques_P Parameter: Organism Value: A. thaliana
  misc_feature: MA Experiment 20000234 PARAMETER Experiment Name: At_Siliques_P Parameter: Plant Line Value: WS
  misc_feature: MA Experiment 20000234 PARAMETER Experiment Name: At_Siliques_P Parameter: Tissue Value: Less Than 5mm Siliques vs. Whole Plant
  misc_feature: MA Experiment ID: 20000264 Result: Up-regulated in Transcription
  misc_feature: MA Experiment 20000264 PARAMETER Experiment Name: At_Open_Flower_P Parameter: Age (day) Value: 21
  misc_feature: MA Experiment 20000264 PARAMETER Experiment Name: At_Open_Flower_P Parameter: Plant Line Value: WS
  misc_feature: MA Experiment 20000264 PARAMETER Experiment Name: At_Open_Flower_P Parameter: Tissue Value: Open Flower vs. Whole Plant
  misc_feature: MA Experiment ID: 20000265 Result: Up-regulated in Transcription
  misc_feature: MA Experiment 20000265 PARAMETER Experiment Name: At_Open_Flower_P Parameter: Age (day) Value: 21
  misc_feature: MA Experiment 20000265 PARAMETER Experiment Name: At_Open_Flower_P Parameter: Plant Line Value: WS
  misc_feature: MA Experiment 20000265 PARAMETER Experiment Name: At_Open_Flower_P Parameter: Tissue Value: Closed Flower vs. Whole Plant
  misc_feature: MA Experiment ID: 20000437 Result: Down-regulated in Transcription
  misc_feature: MA Experiment 20000437 PARAMETER Experiment Name: At_Drought_P Parameter: Age (day) Value: 8
  misc_feature: MA Experiment 20000437 PARAMETER Experiment Name: At_Drought_P Parameter: Organism Value: A. thaliana
  misc_feature: MA Experiment 20000437 PARAMETER Experiment Name: At_Drought_P Parameter: Plant Line Value: WS
  misc_feature: MA Experiment 20000437 PARAMETER Experiment Name: At_Drought_P Parameter: Timepoint (hr) Value: 24
  misc_feature: MA Experiment 20000437 PARAMETER Experiment Name: At_Drought_P Parameter: Tissue Value: Whole Plant
  misc_feature: MA Experiment 20000437 PARAMETER Experiment Name: At_Drought_P Parameter: Treatment Value: Drought vs. No Drought
  misc_feature: MA Experiment ID: 20000495 Result: Down-regulated in Transcription
  misc_feature: MA Experiment 20000495 PARAMETER Experiment Name: At_Guard_Cells_P Parameter: Harvest Date Value: 8/2/2002
  misc_feature: MA Experiment 20000495 PARAMETER Experiment Name: At_Guard_Cells_P Parameter: Organism Value: A. thaliana
  misc_feature: MA Experiment 20000495 PARAMETER Experiment Name: At_Guard_Cells_P Parameter: Tissue Value: Guard Cells vs. Leaves
  misc_feature: MA Experiment ID: 20000496 Result: Down-regulated in Transcription
  misc_feature: MA Experiment 20000496 PARAMETER Experiment Name: At_Guard_Cells_P Parameter: Harvest Date Value: 7/19/2002
  misc_feature: MA Experiment 20000496 PARAMETER Experiment Name: At_Guard_Cells_P Parameter: Organism Value: Canola
  misc_feature: MA Experiment 20000496 PARAMETER Experiment Name: At_Guard_Cells_P Parameter: Tissue Value: Guard Cells vs. Leaves
  misc_feature: MA Experiment ID: 20001451 Result: Down-regulated in Transcription
  misc_feature: MA Experiment 20001451 PARAMETER Experiment Name: At_Far-red-induction_P Parameter: Age (day) Value: 7
  misc_feature: MA Experiment 20001451 PARAMETER Experiment Name: At_Far-red-induction_P Parameter: Light Value: Far-red vs. White
  misc_feature: MA Experiment 20001451 PARAMETER Experiment Name: At_Far-red-induction_P Parameter: Organism Value: A. thaliana
  misc_feature: MA Experiment 20001451 PARAMETER Experiment Name: At_Far-red-induction_P Parameter: Plant Line Value: Columbia
  misc_feature: MA Experiment 20001451 PARAMETER Experiment Name: At_Far-red-induction_P Parameter: Timepoint (hr) Value: 24
  misc_feature: MA Experiment 20001451 PARAMETER Experiment Name: At_Far-red-induction_P Parameter: Tissue Value: Whole Plant
  misc_feature: MA Experiment ID: 20001555 Result: Down-regulated in Transcription
  misc_feature: MA Experiment 20001555 PARAMETER Experiment Name: At_Drought_Soil_Dry_P Parameter: Age (day) Value: 24
  misc_feature: MA Experiment 20001555 PARAMETER Experiment Name: At_Drought_Soil_Dry_P Parameter: Organism Value: A. thaliana
  misc_feature: MA Experiment 20001555 PARAMETER Experiment Name: At_Drought_Soil_Dry_P Parameter: Plant Line Value: WS
  misc_feature: MA Experiment 20001555 PARAMETER Experiment Name: At_Drought_Soil_Dry_P Parameter: Post Timepoint (hr) Value: None
  misc_feature: MA Experiment 20001555 PARAMETER Experiment Name: At_Drought_Soil_Dry_P Parameter: Post-Treatment Value: None
  misc_feature: MA Experiment 20001555 PARAMETER Experiment Name: At_Drought_Soil_Dry_P Parameter: Timepoint (day) Value: 10
  misc_feature: MA Experiment 20001555 PARAMETER Experiment Name: At_Drought_Soil_Dry_P Parameter: Treatment Value: Drought vs. No Drought
  misc_feature: MA Experiment ID: 20001557 Result: Down-regulated in Transcription
  misc_feature: MA Experiment 20001557 PARAMETER Experiment Name: At_Drought_Soil_Dry_P Parameter: Age (day) Value: 27
  misc_feature: MA Experiment 20001557 PARAMETER Experiment Name: At_Drought_Soil_Dry_P Parameter: Organism Value: A. thaliana
  misc_feature: MA Experiment 20001557 PARAMETER Experiment Name: At_Drought_Soil_Dry_P Parameter: Plant Line Value: WS
  misc_feature: MA Experiment 20001557 PARAMETER Experiment Name: At_Drought_Soil_Dry_P Parameter: Post Timepoint (hr) Value: 3
  misc_feature: MA Experiment 20001557 PARAMETER Experiment Name: At_Drought_Soil_Dry_P Parameter: Post-Treatment Value: Re-Water vs. No Drought
  misc_feature: MA Experiment 20001557 PARAMETER Experiment Name: At_Drought_Soil_Dry_P Parameter: Timepoint (day) Value: 13
  misc_feature: MA Experiment 20001557 PARAMETER Experiment Name: At_Drought_Soil_Dry_P Parameter: Treatment Value: Drought vs. No Drought

SEQ ID NO: 32057 - protein, 158 aa, Arabidopsis thaliana; identical to SEQ ID NO: 28467
  peptide (1)..(158): Ceres Seq. ID no. 12336001
  misc_feature (39)..(157): Pfam Name: Core histone H2A/H2B/H3/H4 Pfam Description: Core histone H2A/H2B/H3/H4
  misc_feature (4)..(158): Homolog of NCBI NO: 31210959 NR Description: ENSANGP00000016066 [Anopheles gambiae]
  misc_feature (18)..(158): Homolog of NCBI NO: 37546835 NR Description: similar to histone protein Hist2h3c1 [Homo
  misc_feature (11)..(158): Homolog of NCBI NO: 34876396 NR Description: similar to H3 histone family, member I [Rattus
  misc_feature (4)..(158): Homolog of NCBI NO: 31239843 NR Description: ENSANGP00000014183 [Anopheles gambiae]
  misc_feature (24)..(158): Homolog of NCBI NO: 122083 NR Description: Histone H3
  misc_feature (24)..(158): Homolog of NCBI NO: 70753 NR Description: histone H3 - garden pea (tentative sequence)
  misc_feature (23)..(158): Homolog of NCBI NO: 166384 NR Description: histone H3 (H3-1.1)
  misc_feature (23)..(158): Homolog of NCBI NO: 1362108 NR Description: histone H3 homolog - common tobacco
  misc_feature (23)..(158): Homolog of NCBI NO: 122087 NR Description: Histone H3
  misc_feature (23)..(158): Homolog of NCBI NO: 15232146 NR Description: histone H3, putative

SEQ ID NO: 32058 - protein, 136 aa, Arabidopsis thaliana; identical to SEQ ID NO: 8709
  peptide (1)..(136): Ceres Seq. ID no. 12336002
  misc_feature (17)..(135): Pfam Name: Core histone H2A/H2B/H3/H4 Pfam Description: Core histone H2A/H2B/H3/H4
  misc_feature (1)..(136): Homolog of NCBI NO: 31210959 NR Description: ENSANGP00000016066 [Anopheles gambiae]
  misc_feature (1)..(136): Homolog of NCBI NO: 37546835 NR Description: similar to histone protein Hist2h3c1 [Homo
  misc_feature (1)..(136): Homolog of NCBI NO: 34876396 NR Description: similar to H3 histone family, member I [Rattus
  misc_feature (1)..(136): Homolog of NCBI NO: 31239843 NR Description: ENSANGP00000014183 [Anopheles gambiae]
  misc_feature (2)..(136): Homolog of NCBI NO: 122083 NR Description: Histone H3
  misc_feature (2)..(136): Homolog of NCBI NO: 70753 NR Description: histone H3 - garden pea (tentative sequence)
  misc_feature (1)..(136): Homolog of NCBI NO: 166384 NR Description: histone H3 (H3-1.1)
  misc_feature (1)..(136): Homolog of NCBI NO: 1362108 NR Description: histone H3 homolog - common tobacco
  misc_feature (1)..(136): Homolog of NCBI NO: 122087 NR Description: Histone H3
  misc_feature (1)..(136): Homolog of NCBI NO: 15232146 NR Description: histone H3, putative

SEQ ID NO: 32059 - DNA, 1005 bp, Arabidopsis thaliana; identical to SEQ ID NO: 28469
  misc_feature (1)..(1005): Ceres Seq. ID no. 15178652
  misc_feature: MA Experiment ID: 20000173 Result: Up-regulated in Transcription
  misc_feature: MA Experiment 20000173 PARAMETER Experiment Name: At_42deg_Heat_P Parameter: Age (day) Value: 14
  misc_feature: MA Experiment 20000173 PARAMETER Experiment Name: At_42deg_Heat_P Parameter: Organism Value: A. thaliana
  misc_feature: MA Experiment 20000173 PARAMETER Experiment Name: At_42deg_Heat_P Parameter: Plant Line Value: WS
  misc_feature: MA Experiment 20000173 PARAMETER Experiment Name: At_42deg_Heat_P Parameter: Temperature (deg C) Value: 42 vs. 22
  misc_feature: MA Experiment 20000173 PARAMETER Experiment Name: At_42deg_Heat_P Parameter: Timepoint (hr) Value: 6
  misc_feature: MA Experiment 20000173 PARAMETER Experiment Name: At_42deg_Heat_P Parameter: Tissue Value: Aerial
  misc_feature: MA Experiment ID: 20000794 Result: Down-regulated in Transcription
  misc_feature: MA Experiment 20000794 PARAMETER Experiment Name: At_Petals_P Parameter: Age (day) Value: 23-25 days
  misc_feature: MA Experiment 20000794 PARAMETER Experiment Name: At_Petals_P Parameter: Plant Line Value: WS
  misc_feature: MA Experiment 20000794 PARAMETER Experiment Name: At_Petals_P Parameter: Tissue Value: Petals vs. Whole plant
  misc_feature: MA Experiment ID: 20001558 Result: Up-regulated in Transcription
  misc_feature: MA Experiment 20001558 PARAMETER Experiment Name: At_Drought_Soil_Dry_P Parameter: Age (day) Value: 27
  misc_feature: MA Experiment 20001558 PARAMETER Experiment Name: At_Drought_Soil_Dry_P Parameter: Organism Value: A. thaliana
  misc_feature: MA Experiment 20001558 PARAMETER Experiment Name: At_Drought_Soil_Dry_P Parameter: Plant Line Value: WS
  misc_feature: MA Experiment 20001558 PARAMETER Experiment Name: At_Drought_Soil_Dry_P Parameter: Post Timepoint (hr) Value: 6
  misc_feature: MA Experiment 20001558 PARAMETER Experiment Name: At_Drought_Soil_Dry_P Parameter: Post-Treatment Value: Re-Water vs. No Drought
  misc_feature: MA Experiment 20001558 PARAMETER Experiment Name: At_Drought_Soil_Dry_P Parameter: Timepoint (day) Value: 13
  misc_feature: MA Experiment 20001558 PARAMETER Experiment Name: At_Drought_Soil_Dry_P Parameter: Treatment Value: Drought vs. No Drought
  misc_feature: MA Experiment ID: 20001757 Result: Up-regulated in Transcription
  misc_feature: MA Experiment 20001757 PARAMETER Experiment Name: At_50mM_NH4NO3_L-to-H_P Parameter: Timepoint (hr) Value: 6
  misc_feature: MA Experiment 20001757 PARAMETER Experiment Name: At_50mM_NH4NO3_L-to-H_P Parameter: Tissue Value: Leaf
  misc_feature: MA Experiment 20001757 PARAMETER Experiment Name: At_50mM_NH4NO3_L-to-H_P Parameter: Treatment Value: 50mM NH4NO3 vs 100mM Mannitol

SEQ ID NO: 32060 - protein, 148 aa, Arabidopsis thaliana; identical to SEQ ID NO: 28470
  peptide (1)..(148): Ceres Seq. ID no. 15178653
  misc_feature (47)..(95): Pfam Name: KH domain Pfam Description: KH domain
  misc_feature (1)..(148): Homolog of NCBI NO: 12847921 NR Description: unnamed protein product [Mus musculus]
  misc_feature (1)..(148): Homolog of NCBI NO: 38512247 NR Description: Ribosomal protein S3 [Silurana tropicalis]
  misc_feature (1)..(148): Homolog of NCBI NO: 22001962 NR Description: 40S ribosomal protein S3
  misc_feature (1)..(148): Homolog of NCBI NO: 37595356 NR Description: ribosomal protein S3 [Danio rerio]
  misc_feature (1)..(148): Homolog of NCBI NO: 133940 NR Description: 40S ribosomal protein S3A (S1A)
  misc_feature (3)..(148): Homolog of NCBI NO: 14192875 NR Description: Putative 40S ribosomal protein; contains
  misc_feature (1)..(148): Homolog of NCBI NO: 22204124 NR Description: putative 40S ribosomal protein S3 [Triticum
  misc_feature (1)..(148): Homolog of NCBI NO: 15232352 NR Description: 40S ribosomal protein S3 (RPS3B) [Arabidopsis
  misc_feature (1)..(148): Homolog of NCBI NO: 15225107 NR Description: 40S ribosomal protein S3 (RPS3A) [Arabidopsis
  misc_feature (1)..(148): Homolog of NCBI NO: 15238533 NR Description: 40S ribosomal protein S3 (RPS3C) [Arabidopsis

SEQ ID NO: 32061 - protein, 105 aa, Arabidopsis thaliana; identical to SEQ ID NO: 28471
  peptide (1)..(105): Ceres Seq. ID no. 15178654
  misc_feature (4)..(52): Pfam Name: KH domain Pfam Description: KH domain
  misc_feature (1)..(105): Homolog of NCBI NO: 12847921 NR Description: unnamed protein product [Mus musculus]
  misc_feature (1)..(105): Homolog of NCBI NO: 38512247 NR Description: Ribosomal protein S3 [Silurana tropicalis]
  misc_feature (1)..(105): Homolog of NCBI NO: 22001962 NR Description: 40S ribosomal protein S3
  misc_feature (1)..(105): Homolog of NCBI NO: 37595356 NR Description: ribosomal protein S3 [Danio rerio]
  misc_feature (1)..(105): Homolog of NCBI NO: 133940 NR Description: 40S ribosomal protein S3A (S1A)
  misc_feature (1)..(105): Homolog of NCBI NO: 14192875 NR Description: Putative 40S ribosomal protein; contains
  misc_feature (1)..(105): Homolog of NCBI NO: 22204124 NR Description: putative 40S ribosomal protein S3 [Triticum
  misc_feature (1)..(105): Homolog of NCBI NO: 15232352 NR Description: 40S ribosomal protein S3 (RPS3B) [Arabidopsis
  misc_feature (1)..(105): Homolog of NCBI NO: 15225107 NR Description: 40S ribosomal protein S3 (RPS3A) [Arabidopsis
  misc_feature (1)..(105): Homolog of NCBI NO: 15238533 NR Description: 40S ribosomal protein S3 (RPS3C) [Arabidopsis

SEQ ID NO: 32062 - protein, 99 aa, Arabidopsis thaliana; identical to SEQ ID NO: 28472
  peptide (1)..(99): Ceres Seq. ID no. 15178655
  misc_feature (1)..(94): Homolog of NCBI NO: 12847921 NR Description: unnamed protein product [Mus musculus]
  misc_feature (1)..(97): Homolog of NCBI NO: 38512247 NR Description: Ribosomal protein S3 [Silurana tropicalis]
  misc_feature (1)..(99): Homolog of NCBI NO: 22001962 NR Description: 40S ribosomal protein S3
  misc_feature (1)..(99): Homolog of NCBI NO: 37595356 NR Description: ribosomal protein S3 [Danio rerio]
  misc_feature (1)..(97): Homolog of NCBI NO: 133940 NR Description: 40S ribosomal protein S3A (S1A)
  misc_feature (1)..(73): Homolog of NCBI NO: 14192875 NR Description: Putative 40S ribosomal protein; contains
  misc_feature (1)..(76): Homolog of NCBI NO: 22204124 NR Description: putative 40S ribosomal protein S3 [Triticum
  misc_feature (1)..(99): Homolog of NCBI NO: 15232352 NR Description: 40S ribosomal protein S3 (RPS3B) [Arabidopsis
  misc_feature (1)..(99): Homolog of NCBI NO: 15225107 NR Description: 40S ribosomal protein S3 (RPS3A) [Arabidopsis
  misc_feature (1)..(99): Homolog of NCBI NO: 15238533 NR Description: 40S ribosomal protein S3 (RPS3C) [Arabidopsis

SEQ ID NO: 32063 - DNA, 1905 bp, Arabidopsis thaliana; identical to SEQ ID NO: 20321
  misc_feature (1)..(1905): Ceres Seq. ID no. 13486771
  misc_feature: MA Experiment ID: 20001451 Result: Up-regulated in Transcription
  misc_feature: MA Experiment 20001451 PARAMETER Experiment Name: At_Far-red-induction_P Parameter: Age (day) Value: 7
  misc_feature: MA Experiment 20001451 PARAMETER Experiment Name: At_Far-red-induction_P Parameter: Light Value: Far-red vs. White
  misc_feature: MA Experiment 20001451 PARAMETER Experiment Name: At_Far-red-induction_P Parameter: Organism Value: A. thaliana
  misc_feature: MA Experiment 20001451 PARAMETER Experiment Name: At_Far-red-induction_P Parameter: Plant Line Value: Columbia
  misc_feature: MA Experiment 20001451 PARAMETER Experiment Name: At_Far-red-induction_P Parameter: Timepoint (hr) Value: 24
  misc_feature: MA Experiment 20001451 PARAMETER Experiment Name: At_Far-red-induction_P Parameter: Tissue Value: Whole Plant
  misc_feature: MA Experiment ID: 20001905 Result: Up-regulated in Transcription
  misc_feature: MA Experiment 20001905 PARAMETER Experiment Name: At_Drought_Reproduction_P Parameter: Age (day) Value: 40
  misc_feature: MA Experiment 20001905 PARAMETER Experiment Name: At_Drought_Reproduction_P Parameter: Organism Value: A. thaliana
  misc_feature: MA Experiment 20001905 PARAMETER Experiment Name: At_Drought_Reproduction_P Parameter: Plant Line Value: WS
  misc_feature: MA Experiment 20001905 PARAMETER Experiment Name: At_Drought_Reproduction_P Parameter: Timepoint (day) Value: 10
  misc_feature: MA Experiment 20001905 PARAMETER Experiment Name: At_Drought_Reproduction_P Parameter: Tissue Value: Rosettes
  misc_feature: MA Experiment 20001905 PARAMETER Experiment Name: At_Drought_Reproduction_P Parameter: Treatment Value: Drought vs. No Drought
  misc_feature: MA Experiment ID: 20001911 Result: Up-regulated in Transcription
  misc_feature: MA Experiment 20001911 PARAMETER Experiment Name: At_Drought_Reproduction_P Parameter: Age (day) Value: 40
  misc_feature: MA Experiment 20001911 PARAMETER Experiment Name: At_Drought_Reproduction_P Parameter: Organism Value: A. thaliana
  misc_feature: MA Experiment 20001911 PARAMETER Experiment Name: At_Drought_Reproduction_P Parameter: Plant Line Value: WS
  misc_feature: MA Experiment 20001911 PARAMETER Experiment Name: At_Drought_Reproduction_P Parameter: Timepoint (day) Value: 10
  misc_feature: MA Experiment 20001911 PARAMETER Experiment Name: At_Drought_Reproduction_P Parameter: Tissue Value: Flowers
  misc_feature: MA Experiment 20001911 PARAMETER Experiment Name: At_Drought_Reproduction_P Parameter: Treatment Value: Drought vs. No Drought

SEQ ID NO: 32064 - protein, 297 aa, Arabidopsis thaliana; identical to SEQ ID NO: 20322
  peptide (1)..(297): Ceres Seq. ID no. 15218567
  misc_feature (199)..(249): Pfam Name: Formiminotransferase domain Pfam Description: Formiminotransferase domain
  misc_feature (199)..(249): Pfam Name: Formiminotransferase domain Pfam Description: Formiminotransferase domain
  misc_feature (9)..(249): Homolog of NCBI NO: 13540922 NR Description: Glutamate formiminotransferase [Thermoplasma
  misc_feature (9)..(247): Homolog of NCBI NO: 20806959 NR Description: Glutamate formiminotransferase
  misc_feature (9)..(249): Homolog of NCBI NO: 28211902 NR Description: glutamate formiminotransferase [Clostridium
  misc_feature (14)..(249): Homolog of NCBI NO: 15643606 NR Description:
  misc_feature (5)..(55): Homolog of NCBI NO: 34897974 NR Description: hypothetical protein~similar to Oryza sativa
  misc_feature (9)..(249): Homolog of NCBI NO: 13540922 NR Description: Glutamate formiminotransferase [Thermoplasma
  misc_feature (9)..(249): Homolog of NCBI NO: 28211902 NR Description: glutamate formiminotransferase [Clostridium
  misc_feature (5)..(55): Homolog of NCBI NO: 34897974 NR Description: hypothetical protein~similar to Oryza sativa
  misc_feature (1)..(297): Homolog of NCBI NO: 25411995 NR Description: hypothetical protein At2g20830 [imported] -
  misc_feature (1)..(297): Homolog of NCBI NO: 18399493 NR Description: expressed protein [Arabidopsis thaliana]
  misc_feature (5)..(290): Homolog of NCBI NO: 5734618 NR Description: Similar to Arabidopsis thaliana chromosome II BAC
  misc_feature (5)..(290): Homolog of NCBI NO: 34898040 NR Description: OSJNBa0038F22.18 [Oryza sativa (japonica
  misc_feature (142)..(297): Homolog of NCBI NO: 34897974 NR Description: hypothetical protein~similar to Oryza sativa
  misc_feature (14)..(249): Homolog of NCBI NO: 15643606 NR Description:
  misc_feature (9)..(247): Homolog of NCBI NO: 20806959 NR Description: Glutamate formiminotransferase
  misc_feature (142)..(297): Homolog of NCBI NO: 34897974 NR Description: hypothetical protein~similar to Oryza sativa
  misc_feature (5)..(290): Homolog of NCBI NO: 34898040 NR Description: OSJNBa0038F22.18 [Oryza sativa (japonica
  misc_feature (5)..(290): Homolog of NCBI NO: 5734618 NR Description: Similar to Arabidopsis thaliana chromosome II BAC
  misc_feature (1)..(297): Homolog of NCBI NO: 18399493 NR Description: expressed protein [Arabidopsis thaliana]
  misc_feature (1)..(297): Homolog of NCBI NO: 25411995 NR Description: hypothetical protein At2g20830 [imported] -

SEQ ID NO: 32065 - protein, 293 aa, Arabidopsis thaliana; identical to SEQ ID NO: 20323
  peptide (1)..(293): Ceres Seq. ID no. 15218568
  misc_feature (195)..(245): Pfam Name: Formiminotransferase domain Pfam Description: Formiminotransferase domain
  misc_feature (195)..(245): Pfam Name: Formiminotransferase domain Pfam Description: Formiminotransferase domain
  misc_feature (5)..(245): Homolog of NCBI NO: 13540922 NR Description: Glutamate formiminotransferase [Thermoplasma
  misc_feature (5)..(243): Homolog of NCBI NO: 20806959 NR Description: Glutamate formiminotransferase
  misc_feature (5)..(245): Homolog of NCBI NO: 28211902 NR Description: glutamate formiminotransferase [Clostridium
  misc_feature (10)..(245): Homolog of NCBI NO: 15643606 NR Description:
  misc_feature (1)..(51): Homolog of NCBI NO: 34897974 NR Description: hypothetical protein~similar to Oryza sativa
  misc_feature (5)..(245): Homolog of NCBI NO: 13540922 NR Description: Glutamate formiminotransferase [Thermoplasma
  misc_feature (5)..(245): Homolog of NCBI NO: 28211902 NR Description: glutamate formiminotransferase [Clostridium
  misc_feature (1)..(51): Homolog of NCBI NO: 34897974 NR Description: hypothetical protein~similar to Oryza sativa
  misc_feature (1)..(293): Homolog of NCBI NO: 25411995 NR Description: hypothetical protein At2g20830 [imported] -
  misc_feature (1)..(293): Homolog of NCBI NO: 18399493 NR Description: expressed protein [Arabidopsis thaliana]
  misc_feature (1)..(286): Homolog of NCBI NO: 5734618 NR Description: Similar to Arabidopsis thaliana chromosome II BAC
  misc_feature (1)..(286): Homolog of NCBI NO: 34898040 NR Description: OSJNBa0038F22.18 [Oryza sativa (japonica
  misc_feature (138)..(293): Homolog of NCBI NO: 34897974 NR Description: hypothetical protein~similar to Oryza sativa
  misc_feature (10)..(245): Homolog of NCBI NO: 15643606 NR Description:
  misc_feature (5)..(243): Homolog of NCBI NO: 20806959 NR Description: Glutamate formiminotransferase
  misc_feature (138)..(293): Homolog of NCBI NO: 34897974 NR Description: hypothetical protein~similar to Oryza sativa
  misc_feature (1)..(286): Homolog of NCBI NO: 34898040 NR Description: OSJNBa0038F22.18 [Oryza sativa (japonica
  misc_feature (1)..(286): Homolog of NCBI NO: 5734618 NR Description: Similar to Arabidopsis thaliana chromosome II BAC
  misc_feature (1)..(293): Homolog of NCBI NO: 18399493 NR Description: expressed protein [Arabidopsis thaliana]
  misc_feature (1)..(293): Homolog of NCBI NO: 25411995 NR Description: hypothetical protein At2g20830 [imported] -

SEQ ID NO: 32066 - protein, 226 aa, Arabidopsis thaliana; identical to SEQ ID NO: 20324
  peptide (1)..(226): Ceres Seq. ID no. 15218569
  misc_feature (128)..(178): Pfam Name: Formiminotransferase domain Pfam Description: Formiminotransferase domain
  misc_feature (128)..(178): Pfam Name: Formiminotransferase domain Pfam Description: Formiminotransferase domain
  misc_feature (1)..(176): Homolog of NCBI NO: 34540165 NR Description: formiminotransferase-cyclodeaminase-related
  misc_feature (1)..(178): Homolog of NCBI NO: 13540922 NR Description: Glutamate formiminotransferase [Thermoplasma
  misc_feature (1)..(176): Homolog of NCBI NO: 20806959 NR Description: Glutamate formiminotransferase
  misc_feature (1)..(178): Homolog of NCBI NO: 28211902 NR Description: glutamate formiminotransferase [Clostridium
  misc_feature (1)..(178): Homolog of NCBI NO: 15643606 NR Description:
  misc_feature (1)..(176): Homolog of NCBI NO: 34540165 NR Description: formiminotransferase-cyclodeaminase-related
  misc_feature (1)..(176): Homolog of NCBI NO: 20806959 NR Description: Glutamate formiminotransferase
  misc_feature (1)..(178): Homolog of NCBI NO: 15643606 NR Description:
  misc_feature (1)..(226): Homolog of NCBI NO: 25411995 NR Description: hypothetical protein At2g20830 [imported] -
  misc_feature (1)..(226): Homolog of NCBI NO: 18399493 NR Description: expressed protein [Arabidopsis thaliana]
  misc_feature (1)..(219): Homolog of NCBI NO: 5734618 NR Description: Similar to Arabidopsis thaliana chromosome II BAC
  misc_feature (1)..(219): Homolog of NCBI NO: 34898040 NR Description: OSJNBa0038F22.18 [Oryza sativa (japonica
  misc_feature (71)..(226): Homolog of NCBI NO: 34897974 NR Description: hypothetical protein~similar to Oryza sativa
  misc_feature (1)..(178): Homolog of NCBI NO: 28211902 NR Description: glutamate formiminotransferase [Clostridium
  misc_feature (1)..(178): Homolog of NCBI NO: 13540922 NR Description: Glutamate formiminotransferase [Thermoplasma
  misc_feature (71)..(226): Homolog of NCBI NO: 34897974 NR Description: hypothetical protein~similar to Oryza sativa
  misc_feature (1)..(219): Homolog of NCBI NO: 34898040 NR Description: OSJNBa0038F22.18 [Oryza sativa (japonica
  misc_feature (1)..(219): Homolog of NCBI NO: 5734618 NR Description: Similar to Arabidopsis thaliana chromosome II BAC
  misc_feature (1)..(226): Homolog of NCBI NO: 18399493 NR Description: expressed protein [Arabidopsis thaliana]
  misc_feature (1)..(226): Homolog of NCBI NO: 25411995 NR Description: hypothetical protein At2g20830 [imported] -

SEQ ID NO: 32067 - DNA, 909 bp, Arabidopsis thaliana; identical to SEQ ID NO: 28477
  misc_feature (1)..(909): Ceres Seq. ID no. 12332583
  misc_feature: MA Experiment ID: 108577 Result: Down-regulated in Transcription
  misc_feature: MA Experiment 108577 PARAMETER Experiment Name: At_42deg_Heat_cDNA_P Parameter: Temperature (deg C) Value: 42 vs. 22
  misc_feature: MA Experiment 108577 PARAMETER Experiment Name: At_42deg_Heat_cDNA_P Parameter: Timepoint (hr) Value: 6
  misc_feature: MA Experiment 108577 PARAMETER Experiment Name: At_42deg_Heat_cDNA_P Parameter: Tissue Value: Aerial

SEQ ID NO: 32068 - protein, 218 aa, Arabidopsis thaliana; identical to SEQ ID NO: 28478
  peptide (1)..(218): Ceres Seq. ID no. 12332584
  misc_feature (17)..(179): Pfam Name: Ras family Pfam Description: Ras family
  misc_feature (1)..(215): Homolog of NCBI NO: 18447921 NR Description: ras-related protein RAB8-5 [Nicotiana tabacum]
  misc_feature (1)..(215): Homolog of NCBI NO: 15231847 NR Description: Ras-related GTP-binding protein, putative
  misc_feature (1)..(215): Homolog of NCBI NO: 18447915 NR Description: ras-related protein RAB8-2 [Nicotiana tabacum]
  misc_feature (1)..(215): Homolog of NCBI NO: 2808638 NR Description: small GTP-binding protein [Daucus carota]
  misc_feature (1)..(215): Homolog of NCBI NO: 1362066 NR Description: GTP-binding protein GTP6 - garden pea
  misc_feature (1)..(215): Homolog of NCBI NO: 18447913 NR Description: ras-related protein RAB8-1 [Nicotiana tabacum]
  misc_feature (1)..(215): Homolog of NCBI NO: 18447917 NR Description: ras-related protein RAB8-3 [Nicotiana tabacum]
  misc_feature (1)..(218): Homolog of NCBI NO: 21592670 NR Description: putative Ras-like GTP-binding protein
  misc_feature (1)..(218): Homolog of NCBI NO: 15242773 NR Description: GTP-binding protein, putative
  misc_feature (1)..(218): Homolog of NCBI NO: 15232784 NR Description: Ras family GTP-binding protein, putative

SEQ ID NO: 32069 - protein, 130 aa, Arabidopsis thaliana; identical to SEQ ID NO: 28479
  peptide (1)..(130): Ceres Seq. ID no. 12332585
  misc_feature (1)..(91): Pfam Name: Ras family Pfam Description: Ras family
  misc_feature (1)..(127): Homolog of NCBI NO: 18447921 NR Description: ras-related protein RAB8-5 [Nicotiana tabacum]
  misc_feature (1)..(127): Homolog of NCBI NO: 15231847 NR Description: Ras-related GTP-binding protein, putative
  misc_feature (1)..(127): Homolog of NCBI NO: 18447915 NR Description: ras-related protein RAB8-2 [Nicotiana tabacum]
  misc_feature (1)..(127): Homolog of NCBI NO: 2808638 NR Description: small GTP-binding protein [Daucus carota]
  misc_feature (1)..(127): Homolog of NCBI NO: 1362066 NR Description: GTP-binding protein GTP6 - garden pea
  misc_feature (1)..(127): Homolog of NCBI NO: 18447913 NR Description: ras-related protein RAB8-1 [Nicotiana tabacum]
  misc_feature (1)..(127): Homolog of NCBI NO: 18447917 NR Description: ras-related protein RAB8-3 [Nicotiana tabacum]
  misc_feature (1)..(130): Homolog of NCBI NO: 21592670 NR Description: putative Ras-like GTP-binding protein
  misc_feature (1)..(130): Homolog of NCBI NO: 15242773 NR Description: GTP-binding protein, putative
  misc_feature (1)..(130): Homolog of NCBI NO: 15232784 NR Description: Ras family GTP-binding protein, putative

SEQ ID NO: 32070 - protein, 109 aa, Arabidopsis thaliana; identical to SEQ ID NO: 28480
  peptide (1)..(109): Ceres Seq. ID no. 12332586
  misc_feature (1)..(70): Pfam Name: Ras family Pfam Description: Ras family
  misc_feature (1)..(106): Homolog of NCBI NO: 18447921 NR Description: ras-related protein RAB8-5 [Nicotiana tabacum]
  misc_feature (1)..(106): Homolog of NCBI NO: 15231847 NR Description: Ras-related GTP-binding protein, putative
  misc_feature (1)..(106): Homolog of NCBI NO: 18447915 NR Description: ras-related protein RAB8-2 [Nicotiana tabacum]
  misc_feature (1)..(106): Homolog of NCBI NO: 2808638 NR Description: small GTP-binding protein [Daucus carota]
  misc_feature (1)..(106): Homolog of NCBI NO: 1362066 NR Description: GTP-binding protein GTP6 - garden pea
  misc_feature (1)..(106): Homolog of NCBI NO: 18447913 NR Description: ras-related protein RAB8-1 [Nicotiana tabacum]
  misc_feature (1)..(106): Homolog of NCBI NO: 18447917 NR Description: ras-related protein RAB8-3 [Nicotiana tabacum]
  misc_feature (1)..(109): Homolog of NCBI NO: 21592670 NR Description: putative Ras-like GTP-binding protein
  misc_feature (1)..(109): Homolog of NCBI NO: 15242773 NR Description: GTP-binding protein, putative
  misc_feature (1)..(109): Homolog of NCBI NO: 15232784 NR Description: Ras family GTP-binding protein, putative

SEQ ID NO: 32071 - DNA, 1047 bp, Arabidopsis thaliana; identical to SEQ ID NO: 28481
  misc_feature (1)..(1047): Ceres Seq. ID no. 12332587
  misc_feature: MA Experiment ID: 20000166 Result: Up-regulated in Transcription
  misc_feature: MA Experiment 20000166 PARAMETER Experiment Name: At_100uM_ABA_P Parameter: Age (day) Value: 14
  misc_feature: MA Experiment 20000166 PARAMETER Experiment Name: At_100uM_ABA_P Parameter: Organism Value: A. thaliana
  misc_feature: MA Experiment 20000166 PARAMETER Experiment Name: At_100uM_ABA_P Parameter: Plant Line Value: WS
  misc_feature: MA Experiment 20000166 PARAMETER Experiment Name: At_100uM_ABA_P Parameter: Timepoint (hr) Value: 1
  misc_feature: MA Experiment 20000166 PARAMETER Experiment Name: At_100uM_ABA_P Parameter: Tissue Value: Aerial
  misc_feature: MA Experiment 20000166 PARAMETER Experiment Name: At_100uM_ABA_P Parameter: Treatment Value: 100uM ABA vs. No Treatment
  misc_feature: MA Experiment ID: 20000171 Result: Down-regulated in Transcription
  misc_feature: MA Experiment 20000171 PARAMETER Experiment Name: At_42deg_Heat_P Parameter: Age (day) Value: 14
  misc_feature: MA Experiment 20000171 PARAMETER Experiment Name: At_42deg_Heat_P Parameter: Organism Value: A. thaliana
  misc_feature: MA Experiment 20000171 PARAMETER Experiment Name: At_42deg_Heat_P Parameter: Plant Line Value: WS
  misc_feature: MA Experiment 20000171 PARAMETER Experiment Name: At_42deg_Heat_P Parameter: Temperature (deg C) Value: 42 vs. 22
  misc_feature: MA Experiment 20000171 PARAMETER Experiment Name: At_42deg_Heat_P Parameter: Timepoint (hr) Value: 1
  misc_feature: MA Experiment 20000171 PARAMETER Experiment Name: At_42deg_Heat_P Parameter: Tissue Value: Aerial
  misc_feature: MA Experiment ID: 20000173 Result: Down-regulated in Transcription
  misc_feature: MA Experiment 20000173 PARAMETER Experiment Name: At_42deg_Heat_P Parameter: Age (day) Value: 14
  misc_feature: MA Experiment 20000173 PARAMETER Experiment Name: At_42deg_Heat_P Parameter: Organism Value: A. thaliana
  misc_feature: MA Experiment 20000173 PARAMETER Experiment Name: At_42deg_Heat_P Parameter: Plant Line Value: WS
  misc_feature: MA Experiment 20000173 PARAMETER Experiment Name: At_42deg_Heat_P Parameter: Temperature (deg C) Value: 42 vs. 22
  misc_feature: MA Experiment 20000173 PARAMETER Experiment Name: At_42deg_Heat_P Parameter: Timepoint (hr) Value: 6
  misc_feature: MA Experiment 20000173 PARAMETER Experiment Name: At_42deg_Heat_P Parameter: Tissue Value: Aerial
  misc_feature: MA Experiment ID: 20000179 Result: Down-regulated in Transcription
  misc_feature: MA Experiment 20000179 PARAMETER Experiment Name: At_Germinating_Seeds_P Parameter: Age (hr) Value: 6 vs. 0
  misc_feature: MA Experiment 20000179 PARAMETER Experiment Name: At_Germinating_Seeds_P Parameter: Tissue Value: Germinating Seeds
  misc_feature: MA Experiment ID: 20000182 Result: Up-regulated in Transcription
  misc_feature: MA Experiment 20000182 PARAMETER Experiment Name: At_2mM_SA_P Parameter: Age (day) Value: 14
  misc_feature: MA Experiment 20000182 PARAMETER Experiment Name: At_2mM_SA_P Parameter: Organism Value: A. thaliana
  misc_feature: MA Experiment 20000182 PARAMETER Experiment Name: At_2mM_SA_P Parameter: Plant Line Value: WS
  misc_feature: MA Experiment 20000182 PARAMETER Experiment Name: At_2mM_SA_P Parameter: Timepoint (hr) Value: 6
  misc_feature: MA Experiment 20000182 PARAMETER Experiment Name: At_2mM_SA_P Parameter: Tissue Value: Aerial
  misc_feature: MA Experiment 20000182 PARAMETER Experiment Name: At_2mM_SA_P Parameter: Treatment Value: 2mM SA vs. No Treatment
  misc_feature: MA Experiment ID: 20000185 Result: Down-regulated in Transcription
  misc_feature: MA Experiment 20000185 PARAMETER Experiment Name: At_Roots__P Parameter: Age (day) Value: 7 vs. 21
  misc_feature: MA Experiment 20000185 PARAMETER Experiment Name: At_Roots__P Parameter: Organism Value: A. thaliana
  misc_feature: MA Experiment 20000185 PARAMETER Experiment Name: At_Roots__P Parameter: Tissue Value: Roots vs. Whole Plant
  misc_feature: MA Experiment ID: 20000439 Result: Down-regulated in Transcription
  misc_feature: MA Experiment 20000439 PARAMETER Experiment Name: At_Roots__P Parameter: Age (day) Value: 14 vs. 21
  misc_feature: MA Experiment 20000439 PARAMETER Experiment Name: At_Roots__P Parameter: Organism Value: A. thaliana
  misc_feature: MA Experiment 20000439 PARAMETER Experiment Name: At_Roots__P Parameter: Tissue Value: Roots vs. Whole Plant
  misc_feature: MA Experiment ID: 20000573 Result: Down-regulated in Transcription
  misc_feature: MA Experiment 20000573 PARAMETER Experiment Name: At_100uM_ABA_Mutants__P Parameter: Organism Value: A. thaliana
  misc_feature: MA Experiment 20000573 PARAMETER Experiment Name: At_100uM_ABA_Mutants__P Parameter: Plant Line Value: CS22 vs. Ler wt
  misc_feature: MA Experiment 20000573 PARAMETER Experiment Name: At_100uM_ABA_Mutants__P Parameter: Timepoint (hr) Value: N/A
  misc_feature: MA Experiment 20000573 PARAMETER Experiment Name: At_100uM_ABA_Mutants__P Parameter: Tissue Value: Whole Plant
  misc_feature: MA Experiment 20000573 PARAMETER Experiment Name: At_100uM_ABA_Mutants__P Parameter: Treatment Value: None
  misc_feature: MA Experiment ID: 20000574 Result: Down-regulated in Transcription
  misc_feature: MA Experiment 20000574 PARAMETER Experiment Name: At_100uM_ABA_Mutants__P Parameter: Organism Value: A. thaliana
  misc_feature: MA Experiment 20000574 PARAMETER Experiment Name: At_100uM_ABA_Mutants__P Parameter: Plant Line Value: CS23 vs. Ler wt
  misc_feature: MA Experiment 20000574 PARAMETER Experiment Name: At_100uM_ABA_Mutants__P Parameter: Timepoint (hr) Value: N/A
  misc_feature: MA Experiment 20000574 PARAMETER Experiment Name: At_100uM_ABA_Mutants__P Parameter: Tissue Value: Whole Plant
  misc_feature: MA Experiment 20000574 PARAMETER Experiment Name: At_100uM_ABA_Mutants__P Parameter: Treatment Value: None
  misc_feature: MA Experiment ID: 20000794 Result: Down-regulated in Transcription
  misc_feature: MA Experiment 20000794 PARAMETER Experiment Name: At_Petals_P Parameter: Age (day) Value: 23-25 days
  misc_feature: MA Experiment 20000794 PARAMETER Experiment Name: At_Petals_P Parameter: Plant Line Value: WS
  misc_feature: MA Experiment 20000794 PARAMETER Experiment Name: At_Petals_P Parameter: Tissue Value: Petals vs. Whole plant
  misc_feature: MA Experiment ID: 20001558 Result: Down-regulated in Transcription
  misc_feature: MA Experiment 20001558 PARAMETER Experiment Name: At_Drought_Soil_Dry_P Parameter: Age (day) Value: 27
  misc_feature: MA Experiment 20001558 PARAMETER Experiment Name: At_Drought_Soil_Dry_P Parameter: Organism Value: A. thaliana
  misc_feature: MA Experiment 20001558 PARAMETER Experiment Name: At_Drought_Soil_Dry_P Parameter: Plant Line Value: WS
  misc_feature: MA Experiment 20001558 PARAMETER Experiment Name: At_Drought_Soil_Dry_P Parameter: Post Timepoint (hr) Value: 6
  misc_feature: MA Experiment 20001558 PARAMETER Experiment Name: At_Drought_Soil_Dry_P Parameter: Post-Treatment Value: Re-Water vs. No Drought
  misc_feature: MA Experiment 20001558 PARAMETER Experiment Name: At_Drought_Soil_Dry_P Parameter: Timepoint (day) Value: 13
  misc_feature: MA Experiment 20001558 PARAMETER Experiment Name: At_Drought_Soil_Dry_P Parameter: Treatment Value: Drought vs. No Drought

SEQ ID NO: 32072 - protein, 273 aa, Arabidopsis thaliana; identical to SEQ ID NO: 28482
  peptide (1)..(273): Ceres Seq. ID no. 12332588
  misc_feature (105)..(217): Pfam Name: Protein of unknown function (DUF568) Pfam Description: Protein of unknown function (DUF568)
  misc_feature (24)..(221): Homolog of NCBI NO: 22328744 NR Description: hypothetical protein
  misc_feature (24)..(221): Homolog of NCBI NO: 18086563 NR Description: AT4g17280/dl4675c [Arabidopsis thaliana]
  misc_feature (20)..(221): Homolog of NCBI NO: 15238124 NR Description: putative protein; protein id: At5g47530.1
  misc_feature (19)..(219): Homolog of NCBI NO: 21593814 NR Description: unknown [Arabidopsis thaliana]
  misc_feature (19)..(219): Homolog of NCBI NO: 15235545 NR Description: putative protein
  misc_feature (15)..(214): Homolog of NCBI NO: 18404500 NR Description: expressed protein
  misc_feature (24)..(272): Homolog of NCBI NO: 29647484 NR Description: OJ1191_A10.2 [Oryza sativa (japonica
  misc_feature (105)..(273): Homolog of NCBI NO: 18426884 NR Description: AT3g07390/F21O3_10 [Arabidopsis thaliana]
  misc_feature (1)..(273): Homolog of NCBI NO: 30680258 NR Description: auxin-induced protein (AIR12) [Arabidopsis
  misc_feature (10)..(273): Homolog of NCBI NO: 11357190 NR Description: auxin-induced protein AIR12

SEQ ID NO: 32073 - protein, 259 aa, Arabidopsis thaliana; identical to SEQ ID NO: 28483
  peptide (1)..(259): Ceres Seq. ID no. 12332589
  misc_feature (91)..(203): Pfam Name: Protein of unknown function (DUF568) Pfam Description: Protein of unknown function (DUF568)
  misc_feature (10)..(207): Homolog of NCBI NO: 22328744 NR Description: hypothetical protein
  misc_feature (10)..(207): Homolog of NCBI NO: 18086563 NR Description: AT4g17280/dl4675c [Arabidopsis thaliana]
  misc_feature (6)..(207): Homolog of NCBI NO: 15238124 NR Description: putative protein; protein id: At5g47530.1
  misc_feature (5)..(205): Homolog of NCBI NO: 21593814 NR Description: unknown [Arabidopsis thaliana]
  misc_feature (5)..(205): Homolog of NCBI NO: 15235545 NR Description: putative protein
  misc_feature (1)..(200): Homolog of NCBI NO: 18404500 NR Description: expressed protein
  misc_feature (10)..(258): Homolog of NCBI NO: 29647484 NR Description: OJ1191_A10.2 [Oryza sativa (japonica
  misc_feature (91)..(259): Homolog of NCBI NO: 18426884 NR Description: AT3g07390/F21O3_10 [Arabidopsis thaliana]
  misc_feature (1)..(259): Homolog of NCBI NO: 30680258 NR Description: auxin-induced protein (AIR12) [Arabidopsis
  misc_feature (1)..(259): Homolog of NCBI NO: 11357190 NR Description: auxin-induced protein AIR12

SEQ ID NO: 32074 - protein, 169 aa, Arabidopsis thaliana; identical to SEQ ID NO: 28484
  peptide (1)..(169): Ceres Seq. ID no. 12332590
  misc_feature (1)..(113): Pfam Name: Protein of unknown function (DUF568) Pfam Description: Protein of unknown function (DUF568)
  misc_feature (1)..(117): Homolog of NCBI NO: 22328744 NR Description: hypothetical protein
  misc_feature (1)..(117): Homolog of NCBI NO: 18086563 NR Description: AT4g17280/dl4675c [Arabidopsis thaliana]
  misc_feature (1)..(117): Homolog of NCBI NO: 15238124 NR Description: putative protein; protein id: At5g47530.1
  misc_feature (1)..(115): Homolog of NCBI NO: 21593814 NR Description: unknown [Arabidopsis thaliana]
  misc_feature (1)..(115): Homolog of NCBI NO: 15235545 NR Description: putative protein
  misc_feature (1)..(110): Homolog of NCBI NO: 18404500 NR Description: expressed protein
  misc_feature (1)..(168): Homolog of NCBI NO: 29647484 NR Description: OJ1191_A10.2 [Oryza sativa (japonica
  misc_feature (1)..(169): Homolog of NCBI NO: 18426884 NR Description: AT3g07390/F21O3_10 [Arabidopsis thaliana]
  misc_feature (1)..(169): Homolog of NCBI NO: 30680258 NR Description: auxin-induced protein (AIR12) [Arabidopsis
  misc_feature (1)..(169): Homolog of NCBI NO: 11357190 NR Description: auxin-induced protein AIR12

SEQ ID NO: 32075 - DNA, 773 bp, Arabidopsis thaliana; identical to SEQ ID NO: 28485
  misc_feature (1)..(773): Ceres Seq. ID no. 12420842
  misc_feature: MA Experiment ID: 108434 Result: Up-regulated in Transcription
  misc_feature: MA Experiment 108434 PARAMETER Experiment Name: At_Root_Tips_cDNA_P Parameter: Tissue Value: Root Tips
  misc_feature: MA Experiment ID: 108462 Result: Down-regulated in Transcription
  misc_feature: MA Experiment 108462 PARAMETER Experiment Name: At_Germinating_Seeds_cDNA_P Parameter: Age (day) Value: 2 vs. 0
  misc_feature: MA Experiment 108462 PARAMETER Experiment Name: At_Germinating_Seeds_cDNA_P Parameter: Tissue Value: Germinating Seeds
  misc_feature: MA Experiment ID: 108463 Result: Down-regulated in Transcription
  misc_feature: MA Experiment 108463 PARAMETER Experiment Name: At_Germinating_Seeds_cDNA_P Parameter: Age (day) Value: 3 vs. 0
  misc_feature: MA Experiment 108463 PARAMETER Experiment Name: At_Germinating_Seeds_cDNA_P Parameter: Tissue Value: Germinating Seeds
  misc_feature: MA Experiment ID: 108464 Result: Down-regulated in Transcription
  misc_feature: MA Experiment 108464 PARAMETER Experiment Name: At_Germinating_Seeds_cDNA_P Parameter: Age (day) Value: 4 vs. 0
  misc_feature: MA Experiment 108464 PARAMETER Experiment Name: At_Germinating_Seeds_cDNA_P Parameter: Tissue Value: Germinating Seeds
  misc_feature: MA Experiment ID: 108488 Result: Up-regulated in Transcription
  misc_feature: MA Experiment ID: 108561 Result: Down-regulated in Transcription
  misc_feature: MA Experiment 108561 PARAMETER Experiment Name: At_100uM_ABA_cDNA_P Parameter: Timepoint (hr) Value: 6
  misc_feature: MA Experiment 108561 PARAMETER Experiment Name: At_100uM_ABA_cDNA_P Parameter: Tissue Value: Aerial
  misc_feature: MA Experiment 108561 PARAMETER Experiment Name: At_100uM_ABA_cDNA_P Parameter: Treatment Value: 100uM ABA vs. No Treatment
  misc_feature: MA Experiment ID: 108573 Result: Down-regulated in Transcription
  misc_feature: MA Experiment 108573 PARAMETER Experiment Name: At_Drought_cDNA_P Parameter: Timepoint (hr) Value: 6
  misc_feature: MA Experiment 108573 PARAMETER Experiment Name: At_Drought_cDNA_P Parameter: Tissue Value: Aerial
  misc_feature: MA Experiment 108573 PARAMETER Experiment Name: At_Drought_cDNA_P Parameter: Treatment Value: Drought vs. No Drought
  misc_feature: MA Experiment ID: 20000184 Result: Up-regulated in Transcription
  misc_feature: MA Experiment 20000184 PARAMETER Experiment Name: At_Shoots__P Parameter: Age (day) Value: 7
  misc_feature: MA Experiment 20000184 PARAMETER Experiment Name: At_Shoots__P Parameter: Tissue Value: Shoots vs. Whole Plant
  misc_feature: MA Experiment ID: 20000437 Result: Down-regulated in Transcription
  misc_feature: MA Experiment 20000437 PARAMETER Experiment Name: At_Drought_P Parameter: Age (day) Value: 8
  misc_feature: MA Experiment 20000437 PARAMETER Experiment Name: At_Drought_P Parameter: Organism Value: A. thaliana
  misc_feature: MA Experiment 20000437 PARAMETER Experiment Name: At_Drought_P Parameter: Plant Line Value: WS
  misc_feature: MA Experiment 20000437 PARAMETER Experiment Name: At_Drought_P Parameter: Timepoint (hr) Value: 24
  misc_feature: MA Experiment 20000437 PARAMETER Experiment Name: At_Drought_P Parameter: Tissue Value: Whole Plant
  misc_feature: MA Experiment 20000437 PARAMETER Experiment Name: At_Drought_P Parameter: Treatment Value: Drought vs. No Drought
  misc_feature: MA Experiment ID: 20000794 Result: Down-regulated in Transcription
  misc_feature: MA Experiment 20000794 PARAMETER Experiment Name: At_Petals_P Parameter: Age (day) Value: 23-25 days
  misc_feature: MA Experiment 20000794 PARAMETER Experiment Name: At_Petals_P Parameter: Plant Line Value: WS
  misc_feature: MA Experiment 20000794 PARAMETER Experiment Name: At_Petals_P Parameter: Tissue Value: Petals vs. Whole plant
  misc_feature: MA Experiment ID: 20001558 Result: Up-regulated in Transcription
  misc_feature: MA Experiment 20001558 PARAMETER Experiment Name: At_Drought_Soil_Dry_P Parameter: Age (day) Value: 27
  misc_feature: MA Experiment 20001558 PARAMETER Experiment Name: At_Drought_Soil_Dry_P Parameter: Organism Value: A. thaliana
  misc_feature: MA Experiment 20001558 PARAMETER Experiment Name: At_Drought_Soil_Dry_P Parameter: Plant Line Value: WS
  misc_feature: MA Experiment 20001558 PARAMETER Experiment Name: At_Drought_Soil_Dry_P Parameter: Post Timepoint (hr) Value: 6
  misc_feature: MA Experiment 20001558 PARAMETER Experiment Name: At_Drought_Soil_Dry_P Parameter: Post-Treatment Value: Re-Water vs. No Drought
  misc_feature: MA Experiment 20001558 PARAMETER Experiment Name: At_Drought_Soil_Dry_P Parameter: Timepoint (day) Value: 13
  misc_feature: MA Experiment 20001558 PARAMETER Experiment Name: At_Drought_Soil_Dry_P Parameter: Treatment Value: Drought vs. No Drought
  misc_feature: MA Experiment ID: 20001560 Result: Up-regulated in Transcription
  misc_feature: MA Experiment 20001560 PARAMETER Experiment Name: At_Drought_Soil_Dry_P Parameter: Age (day) Value: 28
  misc_feature: MA Experiment 20001560 PARAMETER Experiment Name: At_Drought_Soil_Dry_P Parameter: Organism Value: A. thaliana
  misc_feature: MA Experiment 20001560 PARAMETER Experiment Name: At_Drought_Soil_Dry_P Parameter: Plant Line Value: WS
  misc_feature: MA Experiment 20001560 PARAMETER Experiment Name: At_Drought_Soil_Dry_P Parameter: Post Timepoint (hr) Value: None
  misc_feature: MA Experiment 20001560 PARAMETER Experiment Name: At_Drought_Soil_Dry_P Parameter: Post-Treatment Value: None
  misc_feature: MA Experiment 20001560 PARAMETER Experiment Name: At_Drought_Soil_Dry_P Parameter: Timepoint (day) Value: 14
  misc_feature: MA Experiment 20001560 PARAMETER Experiment Name: At_Drought_Soil_Dry_P Parameter: Treatment Value: Drought vs. No Drought
  misc_feature: MA Experiment ID: 20001757 Result: Up-regulated in Transcription
  misc_feature: MA Experiment 20001757 PARAMETER Experiment Name: At_50mM_NH4NO3_L-to-H_P Parameter: Timepoint (hr) Value: 6
  misc_feature: MA Experiment 20001757 PARAMETER Experiment Name: At_50mM_NH4NO3_L-to-H_P Parameter: Tissue Value: Leaf
  misc_feature: MA Experiment 20001757 PARAMETER Experiment Name: At_50mM_NH4NO3_L-to-H_P Parameter: Treatment Value: 50mM NH4NO3 vs 100mM Mannitol

SEQ ID NO: 32076 - protein, 202 aa, Arabidopsis thaliana; identical to SEQ ID NO: 28486
  peptide (1)..(202): Ceres Seq. ID no. 12420843
  misc_feature (28)..(123): Pfam Name: Plectin/S10 domain Pfam Description: Plectin/S10 domain
  misc_feature (26)..(188): Homolog of NCBI NO: 28200289 NR Description: ribosomal protein S10 [Branchiostoma belcheri
  misc_feature (26)..(188): Homolog of NCBI NO: 24266976 NR Description: ribosomal protein S10 [Branchiostoma belcheri]
  misc_feature (26)..(196): Homolog of NCBI NO: 40642980 NR Description: ribosomal protein S10 [Crassostrea gigas]
  misc_feature (26)..(197): Homolog of NCBI NO: 34905824 NR Description: putative ribosomal protein S10
  misc_feature (26)..(202): Homolog of NCBI NO: 15238099 NR Description: putative protein
  misc_feature (26)..(199): Homolog of NCBI NO: 20140213 NR Description: 40S ribosomal protein S10
  misc_feature (26)..(199): Homolog of NCBI NO: 34897532 NR Description: OSJNBa0042L16.3 [Oryza sativa (japonica
  misc_feature (26)..(202): Homolog of NCBI NO: 20139798 NR Description: 40S ribosomal protein S10-3
  misc_feature (26)..(202): Homolog of NCBI NO: 15237217 NR Description: putative protein
  misc_feature (26)..(202): Homolog of NCBI NO: 15235985 NR Description: putative ribosomal protein S10

SEQ ID NO: 32077 - protein, 177 aa, Arabidopsis thaliana; identical to SEQ ID NO: 28487
  peptide (1)..(177): Ceres Seq. ID no. 12420844
  misc_feature (3)..(98): Pfam Name: Plectin/S10 domain Pfam Description: Plectin/S10 domain
  misc_feature (1)..(163): Homolog of NCBI NO: 28200289 NR Description: ribosomal protein S10 [Branchiostoma belcheri
  misc_feature (1)..(163): Homolog of NCBI NO: 24266976 NR Description: ribosomal protein S10 [Branchiostoma belcheri]
  misc_feature (1)..(171): Homolog of NCBI NO: 40642980 NR Description: ribosomal protein S10 [Crassostrea gigas]
  misc_feature (1)..(172): Homolog of NCBI NO: 34905824 NR Description: putative ribosomal protein S10
  misc_feature (1)..(177): Homolog of NCBI NO: 15238099 NR Description: putative protein
  misc_feature (1)..(174): Homolog of NCBI NO: 20140213 NR Description: 40S ribosomal protein S10
  misc_feature (1)..(174): Homolog of NCBI NO: 34897532 NR Description: OSJNBa0042L16.3 [Oryza sativa (japonica
  misc_feature (1)..(177): Homolog of NCBI NO: 20139798 NR Description: 40S ribosomal protein S10-3
  misc_feature (1)..(177): Homolog of NCBI NO: 15237217 NR Description: putative protein
  misc_feature (1)..(177): Homolog of NCBI NO: 15235985 NR Description: putative ribosomal protein S10

SEQ ID NO: 32078 - protein, 132 aa, Arabidopsis thaliana; identical to SEQ ID NO: 28488
  peptide (1)..(132): Ceres Seq. ID no. 12420845
  misc_feature (1)..(53): Pfam Name: Plectin/S10 domain Pfam Description: Plectin/S10 domain
  misc_feature (1)..(118): Homolog of NCBI NO: 28200289 NR Description: ribosomal protein S10 [Branchiostoma belcheri
  misc_feature (1)..(118): Homolog of NCBI NO: 24266976 NR Description: ribosomal protein S10 [Branchiostoma belcheri]
  misc_feature (1)..(126): Homolog of NCBI NO: 40642980 NR Description: ribosomal protein S10 [Crassostrea gigas]
  misc_feature (1)..(127): Homolog of NCBI NO: 34905824 NR Description: putative ribosomal protein S10
  misc_feature (1)..(132): Homolog of NCBI NO: 15238099 NR Description: putative protein
  misc_feature (1)..(129): Homolog of NCBI NO: 20140213 NR Description: 40S ribosomal protein S10
  misc_feature (1)..(129): Homolog of NCBI NO: 34897532 NR Description: OSJNBa0042L16.3 [Oryza sativa (japonica
  misc_feature (1)..(132): Homolog of NCBI NO: 20139798 NR Description: 40S ribosomal protein S10-3
  misc_feature (1)..(132): Homolog of NCBI NO: 15237217 NR Description: putative protein
  misc_feature (1)..(132): Homolog of NCBI NO: 15235985 NR Description: putative ribosomal protein S10

SEQ ID NO: 32079 - DNA, 682 bp, Arabidopsis thaliana; identical to SEQ ID NO: 28489
  misc_feature (1)..(682): Ceres Seq. ID no. 12393018
  misc_feature: MA Experiment ID: 20000173 Result: Down-regulated in Transcription
  misc_feature: MA Experiment 20000173 PARAMETER Experiment Name: At_42deg_Heat_P Parameter: Age (day) Value: 14
  misc_feature: MA Experiment 20000173 PARAMETER Experiment Name: At_42deg_Heat_P Parameter: Organism Value: A. thaliana
  misc_feature: MA Experiment 20000173 PARAMETER Experiment Name: At_42deg_Heat_P Parameter: Plant Line Value: WS
  misc_feature: MA Experiment 20000173 PARAMETER Experiment Name: At_42deg_Heat_P Parameter: Temperature (deg C) Value: 42 vs. 22
  misc_feature: MA Experiment 20000173 PARAMETER Experiment Name: At_42deg_Heat_P Parameter: Timepoint (hr) Value: 6
  misc_feature: MA Experiment 20000173 PARAMETER Experiment Name: At_42deg_Heat_P Parameter: Tissue Value: Aerial
  misc_feature: MA Experiment ID: 20000437 Result: Down-regulated in Transcription
  misc_feature: MA Experiment 20000437 PARAMETER Experiment Name: At_Drought_P Parameter: Age (day) Value: 8
  misc_feature: MA Experiment 20000437 PARAMETER Experiment Name: At_Drought_P Parameter: Organism Value: A. thaliana
  misc_feature: MA Experiment 20000437 PARAMETER Experiment Name: At_Drought_P Parameter: Plant Line Value: WS
  misc_feature: MA Experiment 20000437 PARAMETER Experiment Name: At_Drought_P Parameter: Timepoint (hr) Value: 24
  misc_feature: MA Experiment 20000437 PARAMETER Experiment Name: At_Drought_P Parameter: Tissue Value: Whole Plant
  misc_feature: MA Experiment 20000437 PARAMETER Experiment Name: At_Drought_P Parameter: Treatment Value: Drought vs. No Drought

SEQ ID NO: 32080 - protein, 145 aa, Arabidopsis thaliana; identical to SEQ ID NO: 21275
  peptide (1)..(145): Ceres Seq. ID no. 12393019
  misc_feature (5)..(144): Pfam Name: Core histone H2A/H2B/H3/H4 Pfam Description: Core histone H2A/H2B/H3/H4
  misc_feature (1)..(145): Homolog of NCBI NO: 7387727 NR Description: Histone H2B (CaH2B)
  misc_feature (1)..(145): Homolog of NCBI NO: 15226943 NR Description: putative histone H2B
  misc_feature (1)..(145): Homolog of NCBI NO: 21617908 NR Description: histone H2B [Arabidopsis thaliana]
  misc_feature (1)..(145): Homolog of NCBI NO: 15223016 NR Description: histone H2B
  misc_feature (1)..(145): Homolog of NCBI NO: 7439756 NR Description: histone H2B - tomato
  misc_feature (1)..(145): Homolog of NCBI NO: 7387726 NR Description: Histone H2B
  misc_feature (1)..(145): Homolog of NCBI NO: 21554180 NR Description: histone H2B-like protein [Arabidopsis thaliana]
  misc_feature (1)..(145): Homolog of NCBI NO: 15238563 NR Description: histone H2B - like protein
  misc_feature (1)..(145): Homolog of NCBI NO: 15231304 NR Description: histone H2B; protein id: At3g45980.1, supported
  misc_feature (1)..(145): Homolog of NCBI NO: 15231313 NR Description: histone H2B -like protein

SEQ ID NO: 32081 - protein, 96 aa, Arabidopsis thaliana; identical to SEQ ID NO: 21276
  peptide (1)..(96): Ceres Seq. ID no. 12393020
  misc_feature (1)..(95): Pfam Name: Core histone H2A/H2B/H3/H4 Pfam Description: Core histone H2A/H2B/H3/H4
  misc_feature (1)..(96): Homolog of NCBI NO: 7387727 NR Description: Histone H2B (CaH2B)
  misc_feature (1)..(96): Homolog of NCBI NO: 15226943 NR Description: putative histone H2B
  misc_feature (1)..(96): Homolog of NCBI NO: 21617908 NR Description: histone H2B [Arabidopsis thaliana]
  misc_feature (1)..(96): Homolog of NCBI NO: 15223016 NR Description: histone H2B
  misc_feature (1)..(96): Homolog of NCBI NO: 7439756 NR Description: histone H2B - tomato
  misc_feature (1)..(96): Homolog of NCBI NO: 7387726 NR Description: Histone H2B
  misc_feature (1)..(96): Homolog of NCBI NO: 21554180 NR Description: histone H2B-like protein [Arabidopsis thaliana]
  misc_feature (1)..(96): Homolog of NCBI NO: 15238563 NR Description: histone H2B - like protein
  misc_feature (1)..(96): Homolog of NCBI NO: 15231304 NR Description: histone H2B; protein id: At3g45980.1, supported
  misc_feature (1)..(96): Homolog of NCBI NO: 15231313 NR Description: histone H2B -like protein

SEQ ID NO: 32082 - DNA, 932 bp, Arabidopsis thaliana; identical to SEQ ID NO: 28492
  misc_feature (1)..(932): Ceres Seq. ID no. 12574162
  misc_feature: MA Experiment ID: 20000227 Result: Up-regulated in Transcription
  misc_feature: MA Experiment 20000227 PARAMETER Experiment Name: At_Root-Tips-vs-Tops_P Parameter: Tissue Value: Root Tips vs. Root Tops
  misc_feature: MA Experiment ID: 20001557 Result: Up-regulated in Transcription
  misc_feature: MA Experiment 20001557 PARAMETER Experiment Name: At_Drought_Soil_Dry_P Parameter: Age (day) Value: 27
  misc_feature: MA Experiment 20001557 PARAMETER Experiment Name: At_Drought_Soil_Dry_P Parameter: Organism Value: A. thaliana
  misc_feature: MA Experiment 20001557 PARAMETER Experiment Name: At_Drought_Soil_Dry_P Parameter: Plant Line Value: WS
  misc_feature: MA Experiment 20001557 PARAMETER Experiment Name: At_Drought_Soil_Dry_P Parameter: Post Timepoint (hr) Value: 3
  misc_feature: MA Experiment 20001557 PARAMETER Experiment Name: At_Drought_Soil_Dry_P Parameter: Post-Treatment Value: Re-Water vs. No Drought
  misc_feature: MA Experiment 20001557 PARAMETER Experiment Name: At_Drought_Soil_Dry_P Parameter: Timepoint (day) Value: 13
  misc_feature: MA Experiment 20001557 PARAMETER Experiment Name: At_Drought_Soil_Dry_P Parameter: Treatment Value: Drought vs. No Drought
  misc_feature: MA Experiment ID: 20001558 Result: Up-regulated in Transcription
  misc_feature: MA Experiment 20001558 PARAMETER Experiment Name: At_Drought_Soil_Dry_P Parameter: Age (day) Value: 27
  misc_feature: MA Experiment 20001558 PARAMETER Experiment Name: At_Drought_Soil_Dry_P Parameter: Organism Value: A. thaliana
  misc_feature: MA Experiment 20001558 PARAMETER Experiment Name: At_Drought_Soil_Dry_P Parameter: Plant Line Value: WS
  misc_feature: MA Experiment 20001558 PARAMETER Experiment Name: At_Drought_Soil_Dry_P Parameter: Post Timepoint (hr) Value: 6
  misc_feature: MA Experiment 20001558 PARAMETER Experiment Name: At_Drought_Soil_Dry_P Parameter: Post-Treatment Value: Re-Water vs. No Drought
  misc_feature: MA Experiment 20001558 PARAMETER Experiment Name: At_Drought_Soil_Dry_P Parameter: Timepoint (day) Value: 13
  misc_feature: MA Experiment 20001558 PARAMETER Experiment Name: At_Drought_Soil_Dry_P Parameter: Treatment Value: Drought vs. No Drought
  misc_feature: MA Experiment ID: 20001560 Result: Up-regulated in Transcription
  misc_feature: MA Experiment 20001560 PARAMETER Experiment Name: At_Drought_Soil_Dry_P Parameter: Age (day) Value: 28
  misc_feature: MA Experiment 20001560 PARAMETER Experiment Name: At_Drought_Soil_Dry_P Parameter: Organism Value: A. thaliana
  misc_feature: MA Experiment 20001560 PARAMETER Experiment Name: At_Drought_Soil_Dry_P Parameter: Plant Line Value: WS
  misc_feature: MA Experiment 20001560 PARAMETER Experiment Name: At_Drought_Soil_Dry_P Parameter: Post Timepoint (hr) Value: None
  misc_feature: MA Experiment 20001560 PARAMETER Experiment Name: At_Drought_Soil_Dry_P Parameter: Post-Treatment Value: None
  misc_feature: MA Experiment 20001560 PARAMETER Experiment Name: At_Drought_Soil_Dry_P Parameter: Timepoint (day) Value: 14
  misc_feature: MA Experiment 20001560 PARAMETER Experiment Name: At_Drought_Soil_Dry_P Parameter: Treatment Value: Drought vs. No Drought
  misc_feature: MA Experiment ID: 20001757 Result: Up-regulated in Transcription
  misc_feature: MA Experiment 20001757 PARAMETER Experiment Name: At_50mM_NH4NO3_L-to-H_P Parameter: Timepoint (hr) Value: 6
  misc_feature: MA Experiment 20001757 PARAMETER Experiment Name: At_50mM_NH4NO3_L-to-H_P Parameter: Tissue Value: Leaf
  misc_feature: MA Experiment 20001757 PARAMETER Experiment Name: At_50mM_NH4NO3_L-to-H_P Parameter: Treatment Value: 50mM NH4NO3 vs 100mM Mannitol

SEQ ID NO: 32083 - protein, 238 aa, Arabidopsis thaliana; identical to SEQ ID NO: 28493
  peptide (1)..(238): Ceres Seq. ID no. 12574163
  misc_feature (92)..(151): Pfam Name: NAC domain Pfam Description: NAC domain
  misc_feature (92)..(151): Pfam Name: NAC domain Pfam Description: NAC domain
  misc_feature (34)..(237): Homolog of NCBI NO: 34907258 NR Description: putative nascent polypeptide associated complex
  misc_feature (37)..(238): Homolog of NCBI NO: 15230476 NR Description: nascent polypeptide associated complex alpha
  misc_feature (49)..(237): Homolog of NCBI NO: 34902238 NR Description: Putative nascent polypeptide associated complex
  misc_feature (37)..(238): Homolog of NCBI NO: 32352154 NR Description: nascent polypeptide associated complex alpha
  misc_feature (28)..(238): Homolog of NCBI NO: 15229149 NR Description: alpha NAC-like protein
  misc_feature (34)..(237): Homolog of NCBI NO: 34907258 NR Description: putative nascent polypeptide associated complex
  misc_feature (49)..(237): Homolog of NCBI NO: 34902238 NR Description: Putative nascent polypeptide associated complex
  misc_feature (28)..(238): Homolog of NCBI NO: 15229149 NR Description: alpha NAC-like protein
  misc_feature (27)..(238): Homolog of NCBI NO: 15235122 NR Description: putative alpha NAC
  misc_feature (27)..(238): Homolog of NCBI NO: 18398710 NR Description: expressed protein
  misc_feature (27)..(238): Homolog of NCBI NO: 21536597 NR Description: putative alpha NAC [Arabidopsis thaliana]
  misc_feature (20)..(238): Homolog of NCBI NO: 4115918 NR Description: similar to nascent polypeptide associated complex
  misc_feature (28)..(238): Homolog of NCBI NO: 13899101 NR Description: alpha NAC-like protein [Arabidopsis thaliana]
  misc_feature (37)..(238): Homolog of NCBI NO: 32352154 NR Description: nascent polypeptide associated complex alpha
  misc_feature (37)..(238): Homolog of NCBI NO: 15230476 NR Description: nascent polypeptide associated complex alpha
  misc_feature (28)..(238): Homolog of NCBI NO: 13899101 NR Description: alpha NAC-like protein [Arabidopsis thaliana]
  misc_feature (20)..(238): Homolog of NCBI NO: 4115918 NR Description: similar to nascent polypeptide associated complex
  misc_feature (27)..(238): Homolog of NCBI NO: 21536597 NR Description: putative alpha NAC [Arabidopsis thaliana]
  misc_feature (27)..(238): Homolog of NCBI NO: 18398710 NR Description: expressed protein
  misc_feature (27)..(238): Homolog of NCBI NO: 15235122 NR Description: putative alpha NAC

SEQ ID NO: 32084 - protein, 212 aa, Arabidopsis thaliana; identical to SEQ ID NO: 28494
  peptide (1)..(212): Ceres Seq. ID no. 12574164
  misc_feature (66)..(125): Pfam Name: NAC domain Pfam Description: NAC domain
  misc_feature (66)..(125): Pfam Name: NAC domain Pfam Description: NAC domain
  misc_feature (8)..(211): Homolog of NCBI NO: 34907258 NR Description: putative nascent polypeptide associated complex
  misc_feature (11)..(212): Homolog of NCBI NO: 15230476 NR Description: nascent polypeptide associated complex alpha
  misc_feature (23)..(211): Homolog of NCBI NO: 34902238 NR Description: Putative nascent polypeptide associated complex
  misc_feature (11)..(212): Homolog of NCBI NO: 32352154 NR Description: nascent polypeptide associated complex alpha
  misc_feature (2)..(212): Homolog of NCBI NO: 15229149 NR Description: alpha NAC-like protein
  misc_feature (8)..(211): Homolog of NCBI NO: 34907258 NR Description: putative nascent polypeptide associated complex
  misc_feature (23)..(211): Homolog of NCBI NO: 34902238 NR Description: Putative nascent polypeptide associated complex
  misc_feature (2)..(212): Homolog of NCBI NO: 15229149 NR Description: alpha NAC-like protein
  misc_feature (1)..(212): Homolog of NCBI NO: 15235122 NR Description: putative alpha NAC
  misc_feature (1)..(212): Homolog of NCBI NO: 18398710 NR Description: expressed protein
  misc_feature (1)..(212): Homolog of NCBI NO: 21536597 NR Description: putative alpha NAC [Arabidopsis thaliana]
  misc_feature (1)..(212): Homolog of NCBI NO: 4115918 NR Description: similar to nascent polypeptide associated complex
  misc_feature (2)..(212): Homolog of NCBI NO: 13899101 NR Description: alpha NAC-like protein [Arabidopsis thaliana]
  misc_feature (11)..(212): Homolog of NCBI NO: 32352154 NR Description: nascent polypeptide associated complex alpha
  misc_feature (11)..(212): Homolog of NCBI NO: 15230476 NR Description: nascent polypeptide associated complex alpha
  misc_feature (2)..(212): Homolog of NCBI NO: 13899101 NR Description: alpha NAC-like protein [Arabidopsis thaliana]
  misc_feature (1)..(212): Homolog of NCBI NO: 4115918 NR Description: similar to nascent polypeptide associated complex
  misc_feature (1)..(212): Homolog of NCBI NO: 21536597 NR Description: putative alpha NAC [Arabidopsis thaliana]
  misc_feature (1)..(212): Homolog of NCBI NO: 18398710 NR Description: expressed protein
  misc_feature (1)..(212): Homolog of NCBI NO: 15235122 NR Description: putative alpha NAC

SEQ ID NO: 32085 - protein, 198 aa, Arabidopsis thaliana; identical to SEQ ID NO: 28495
  peptide (1)..(198): Ceres Seq. ID no. 12574165
  misc_feature (52)..(111): Pfam Name: NAC domain Pfam Description: NAC domain
  misc_feature (52)..(111): Pfam Name: NAC domain Pfam Description: NAC domain
  misc_feature (1)..(197): Homolog of NCBI NO: 34907258 NR Description: putative nascent polypeptide associated complex
  misc_feature (1)..(198): Homolog of NCBI NO: 15230476 NR Description: nascent polypeptide associated complex alpha
  misc_feature (9)..(197): Homolog of NCBI NO: 34902238 NR Description: Putative nascent polypeptide associated complex
  misc_feature (1)..(198): Homolog of NCBI NO: 32352154 NR Description: nascent polypeptide associated complex alpha
  misc_feature (1)..(198): Homolog of NCBI NO: 15229149 NR Description: alpha NAC-like protein
  misc_feature (1)..(197): Homolog of NCBI NO: 34907258 NR Description: putative nascent polypeptide associated complex
  misc_feature (9)..(197): Homolog of NCBI NO: 34902238 NR Description: Putative nascent polypeptide associated complex
  misc_feature (1)..(198): Homolog of NCBI NO: 15229149 NR Description: alpha NAC-like protein
  misc_feature (1)..(198): Homolog of NCBI NO: 15235122 NR Description: putative alpha NAC
  misc_feature (1)..(198): Homolog of NCBI NO: 18398710 NR Description: expressed protein
  misc_feature (1)..(198): Homolog of NCBI NO: 21536597 NR Description: putative alpha NAC [Arabidopsis thaliana]
  misc_feature (1)..(198): Homolog of NCBI NO: 4115918 NR Description: similar to nascent polypeptide associated complex
  misc_feature (1)..(198): Homolog of NCBI NO: 13899101 NR Description: alpha NAC-like protein [Arabidopsis thaliana]
  misc_feature (1)..(198): Homolog of NCBI NO: 32352154 NR Description: nascent polypeptide associated complex alpha
  misc_feature (1)..(198): Homolog of NCBI NO: 15230476 NR Description: nascent polypeptide associated complex alpha
  misc_feature (1)..(198): Homolog of NCBI NO: 13899101 NR Description: alpha NAC-like protein [Arabidopsis thaliana]
  misc_feature (1)..(198): Homolog of NCBI NO: 4115918 NR Description: similar to nascent polypeptide associated complex
  misc_feature (1)..(198): Homolog of NCBI NO: 21536597 NR Description: putative alpha NAC [Arabidopsis thaliana]
  misc_feature (1)..(198): Homolog of NCBI NO: 18398710 NR Description: expressed protein
  misc_feature (1)..(198): Homolog of NCBI NO: 15235122 NR Description: putative alpha NAC

SEQ ID NO: 32086 - DNA, 930 bp, Arabidopsis thaliana; identical to SEQ ID NO: 28496
  misc_feature (1)..(930): Ceres Seq. ID no. 12332556
  misc_feature: MA Experiment ID: 108434 Result: Up-regulated in Transcription
  misc_feature: MA Experiment 108434 PARAMETER Experiment Name: At_Root_Tips_cDNA_P Parameter: Tissue Value: Root Tips
  misc_feature: MA Experiment ID: 108435 Result: Up-regulated in Transcription
  misc_feature: MA Experiment 108435 PARAMETER Experiment Name: At_stm_Mutants_cDNA_P Parameter: Plant Line Value: wt Landsburg vs stm
  misc_feature: MA Experiment 108435 PARAMETER Experiment Name: At_stm_Mutants_cDNA_P Parameter: Tissue Value: Shoot Apical Meristem Region
  misc_feature: MA Experiment ID: 108576 Result: Down-regulated in Transcription
  misc_feature: MA Experiment 108576 PARAMETER Experiment Name: At_42deg_Heat_cDNA_P Parameter: Temperature (deg C) Value: 42 vs. 22
  misc_feature: MA Experiment 108576 PARAMETER Experiment Name: At_42deg_Heat_cDNA_P Parameter: Timepoint (hr) Value: 1
  misc_feature: MA Experiment 108576 PARAMETER Experiment Name: At_42deg_Heat_cDNA_P Parameter: Tissue Value: Aerial
  misc_feature: MA Experiment ID: 108579 Result: Down-regulated in Transcription
  misc_feature: MA Experiment 108579 PARAMETER Experiment Name: At_4deg_Cold_cDNA_P Parameter: Temperature (deg C) Value: 4 vs. 22
  misc_feature: MA Experiment 108579 PARAMETER Experiment Name: At_4deg_Cold_cDNA_P Parameter: Timepoint (hr) Value: 6
  misc_feature: MA Experiment 108579 PARAMETER Experiment Name: At_4deg_Cold_cDNA_P Parameter: Tissue Value: Aerial
  misc_feature: MA Experiment ID: 20000068 Result: Down-regulated in Transcription
  misc_feature: MA Experiment ID: 20000214 Result: Down-regulated in Transcription
  misc_feature: MA Experiment 20000214 PARAMETER Experiment Name: At_4deg_Cold_P Parameter: Timepoint (hr) Value: 6
  misc_feature: MA Experiment ID: 20000496 Result: Up-regulated in Transcription
  misc_feature: MA Experiment 20000496 PARAMETER Experiment Name: At_Guard_Cells_P Parameter: Harvest Date Value: 7/19/2002
  misc_feature: MA Experiment 20000496 PARAMETER Experiment Name: At_Guard_Cells_P Parameter: Organism Value: Canola
  misc_feature: MA Experiment 20000496 PARAMETER Experiment Name: At_Guard_Cells_P Parameter: Tissue Value: Guard Cells vs. Leaves
  misc_feature: MA Experiment ID: 20001905 Result: Up-regulated in Transcription
  misc_feature: MA Experiment 20001905 PARAMETER Experiment Name: At_Drought_Reproduction_P Parameter: Age (day) Value: 40
  misc_feature: MA Experiment 20001905 PARAMETER Experiment Name: At_Drought_Reproduction_P Parameter: Organism Value: A. thaliana
  misc_feature: MA Experiment 20001905 PARAMETER Experiment Name: At_Drought_Reproduction_P Parameter: Plant Line Value: WS
  misc_feature: MA Experiment 20001905 PARAMETER Experiment Name: At_Drought_Reproduction_P Parameter: Timepoint (day) Value: 10
  misc_feature: MA Experiment 20001905 PARAMETER Experiment Name: At_Drought_Reproduction_P Parameter: Tissue Value: Rosettes
  misc_feature: MA Experiment 20001905 PARAMETER Experiment Name: At_Drought_Reproduction_P Parameter: Treatment Value: Drought vs. No Drought

SEQ ID NO: 32087 - protein, 204 aa, Arabidopsis thaliana; identical to SEQ ID NO: 28497
  peptide (1)..(204): Ceres Seq. ID no. 12332557
  misc_feature (22)..(91): Pfam Name: linker histone H1 and H5 family Pfam Description: linker histone H1 and H5 family
  misc_feature (13)..(198): Homolog of NCBI NO: 11544762 NR Description: HMGI/Y protein [Zea mays]
  misc_feature (13)..(198): Homolog of NCBI NO: 9837562 NR Description: high mobility group I/Y-2 [Zea mays]
  misc_feature (22)..(196): Homolog of NCBI NO: 2129885 NR Description: HMGI/Y protein - garden pea
  misc_feature (24)..(203): Homolog of NCBI NO: 7439646 NR Description: DNA binding protein PF1 - rice
  misc_feature (22)..(196): Homolog of NCBI NO: 7439645 NR Description: high mobility group protein HMGI/Y-2 - sword bean
  misc_feature (22)..(196): Homolog of NCBI NO: 7439663 NR Description: high mobility group protein HMGI/Y-1 - sword bean
  misc_feature (19)..(204): Homolog of NCBI NO: 6651027 NR Description: high mobility group protein I/Y [Brassica napus]
  misc_feature (29)..(204): Homolog of NCBI NO: 21536605 NR Description: linker histone protein, putative [Arabidopsis
  misc_feature (1)..(204): Homolog of NCBI NO: 1808590 NR Description: HMG-I/Y [Arabidopsis thaliana]
  misc_feature (1)..(204): Homolog of NCBI NO: 15223947 NR Description: linker histone protein, putative

SEQ ID NO: 32088 - protein, 176 aa, Arabidopsis thaliana; identical to SEQ ID NO: 28498
  peptide (1)..(176): Ceres Seq. ID no. 12332558
  misc_feature (1)..(63): Pfam Name: linker histone H1 and H5 family Pfam Description: linker histone H1 and H5 family
  misc_feature (1)..(170): Homolog of NCBI NO: 11544762 NR Description: HMGI/Y protein [Zea mays]
  misc_feature (1)..(170): Homolog of NCBI NO: 9837562 NR Description: high mobility group I/Y-2 [Zea mays]
  misc_feature (1)..(168): Homolog of NCBI NO: 2129885 NR Description: HMGI/Y protein - garden pea
  misc_feature (1)..(175): Homolog of NCBI NO: 7439646 NR Description: DNA binding protein PF1 - rice
  misc_feature (1)..(168): Homolog of NCBI NO: 7439645 NR Description: high mobility group protein HMGI/Y-2 - sword bean
  misc_feature (1)..(168): Homolog of NCBI NO: 7439663 NR Description: high mobility group protein HMGI/Y-1 - sword bean
  misc_feature (1)..(176): Homolog of NCBI NO: 6651027 NR Description: high mobility group protein I/Y [Brassica napus]
  misc_feature (1)..(176): Homolog of NCBI NO: 21536605 NR Description: linker histone protein, putative [Arabidopsis
  misc_feature (1)..(176): Homolog of NCBI NO: 1808590 NR Description: HMG-I/Y [Arabidopsis thaliana]
  misc_feature (1)..(176): Homolog of NCBI NO: 15223947 NR Description: linker histone protein, putative

SEQ ID NO: 32089 - protein, 174 aa, Arabidopsis thaliana; identical to SEQ ID NO: 28499
  peptide (1)..(174): Ceres Seq. ID no. 12332559
  misc_feature (1)..(61): Pfam Name: linker histone H1 and H5 family Pfam Description: linker histone H1 and H5 family
  misc_feature (1)..(168): Homolog of NCBI NO: 11544762 NR Description: HMGI/Y protein [Zea mays]
  misc_feature (1)..(168): Homolog of NCBI NO: 9837562 NR Description: high mobility group I/Y-2 [Zea mays]
  misc_feature (1)..(166): Homolog of NCBI NO: 2129885 NR Description: HMGI/Y protein - garden pea
  misc_feature (1)..(173): Homolog of NCBI NO: 7439646 NR Description: DNA binding protein PF1 - rice
  misc_feature (1)..(166): Homolog of NCBI NO: 7439645 NR Description: high mobility group protein HMGI/Y-2 - sword bean
  misc_feature (1)..(166): Homolog of NCBI NO: 7439663 NR Description: high mobility group protein HMGI/Y-1 - sword bean
  misc_feature (1)..(174): Homolog of NCBI NO: 6651027 NR Description: high mobility group protein I/Y [Brassica napus]
  misc_feature (1)..(174): Homolog of NCBI NO: 21536605 NR Description: linker histone protein, putative [Arabidopsis
  misc_feature (1)..(174): Homolog of NCBI NO: 1808590 NR Description: HMG-I/Y [Arabidopsis thaliana]
  misc_feature (1)..(174): Homolog of NCBI NO: 15223947 NR Description: linker histone protein, putative

SEQ ID NO: 32090 - DNA, 735 bp, Arabidopsis thaliana; identical to SEQ ID NO: 28500
  misc_feature (1)..(735): Ceres Seq. ID no. 12393721
  misc_feature: MA Experiment ID: 20000171 Result: Down-regulated in Transcription
  misc_feature: MA Experiment 20000171 PARAMETER Experiment Name: At_42deg_Heat_P Parameter: Age (day) Value: 14
  misc_feature: MA Experiment 20000171 PARAMETER Experiment Name: At_42deg_Heat_P Parameter: Organism Value: A. thaliana
  misc_feature: MA Experiment 20000171 PARAMETER Experiment Name: At_42deg_Heat_P Parameter: Plant Line Value: WS
  misc_feature: MA Experiment 20000171 PARAMETER Experiment Name: At_42deg_Heat_P Parameter: Temperature (deg C) Value: 42 vs. 22
  misc_feature: MA Experiment 20000171 PARAMETER Experiment Name: At_42deg_Heat_P Parameter: Timepoint (hr) Value: 1
  misc_feature: MA Experiment 20000171 PARAMETER Experiment Name: At_42deg_Heat_P Parameter: Tissue Value: Aerial
  misc_feature: MA Experiment ID: 20000173 Result: Down-regulated in Transcription
  misc_feature: MA Experiment 20000173 PARAMETER Experiment Name: At_42deg_Heat_P Parameter: Age (day) Value: 14
  misc_feature: MA Experiment 20000173 PARAMETER Experiment Name: At_42deg_Heat_P Parameter: Organism Value: A. thaliana
  misc_feature: MA Experiment 20000173 PARAMETER Experiment Name: At_42deg_Heat_P Parameter: Plant Line Value: WS
  misc_feature: MA Experiment 20000173 PARAMETER Experiment Name: At_42deg_Heat_P Parameter: Temperature (deg C) Value: 42 vs. 22
  misc_feature: MA Experiment 20000173 PARAMETER Experiment Name: At_42deg_Heat_P Parameter: Timepoint (hr) Value: 6
  misc_feature: MA Experiment 20000173 PARAMETER Experiment Name: At_42deg_Heat_P Parameter: Tissue Value: Aerial
  misc_feature: MA Experiment ID: 20000180 Result: Down-regulated in Transcription
  misc_feature: MA Experiment 20000180 PARAMETER Experiment Name: At_Germinating_Seeds_P Parameter: Age (hr) Value: 24 vs. 0
  misc_feature: MA Experiment 20000180 PARAMETER Experiment Name: At_Germinating_Seeds_P Parameter: Tissue Value: Germinating Seeds
  misc_feature: MA Experiment ID: 20000437 Result: Down-regulated in Transcription
  misc_feature: MA Experiment 20000437 PARAMETER Experiment Name: At_Drought_P Parameter: Age (day) Value: 8
  misc_feature: MA Experiment 20000437 PARAMETER Experiment Name: At_Drought_P Parameter: Organism Value: A. thaliana
  misc_feature: MA Experiment 20000437 PARAMETER Experiment Name: At_Drought_P Parameter: Plant Line Value: WS
  misc_feature: MA Experiment 20000437 PARAMETER Experiment Name: At_Drought_P Parameter: Timepoint (hr) Value: 24
  misc_feature: MA Experiment 20000437 PARAMETER Experiment Name: At_Drought_P Parameter: Tissue Value: Whole Plant
  misc_feature: MA Experiment 20000437 PARAMETER Experiment Name: At_Drought_P Parameter: Treatment Value: Drought vs. No Drought
  misc_feature: MA Experiment ID: 20001451 Result: Down-regulated in Transcription
  misc_feature: MA Experiment 20001451 PARAMETER Experiment Name: At_Far-red-induction_P Parameter: Age (day) Value: 7
  misc_feature: MA Experiment 20001451 PARAMETER Experiment Name: At_Far-red-induction_P Parameter: Light Value: Far-red vs. White
  misc_feature: MA Experiment 20001451 PARAMETER Experiment Name: At_Far-red-induction_P Parameter: Organism Value: A. thaliana
  misc_feature: MA Experiment 20001451 PARAMETER Experiment Name: At_Far-red-induction_P Parameter: Plant Line Value: Columbia
  misc_feature: MA Experiment 20001451 PARAMETER Experiment Name: At_Far-red-induction_P Parameter: Timepoint (hr) Value: 24
  misc_feature: MA Experiment 20001451 PARAMETER Experiment Name: At_Far-red-induction_P Parameter: Tissue Value: Whole Plant

SEQ ID NO: 32091 - protein, 184 aa, Arabidopsis thaliana; identical to SEQ ID NO: 28501
  peptide (1)..(184): Ceres Seq. ID no. 12393722
  misc_feature (44)..(149): Pfam Name: Domain of unknown function DUF143 Pfam Description: Domain of unknown function DUF143
  misc_feature (50)..(157): Homolog of NCBI NO: 23028923 NR Description: hypothetical protein [Microbulbifer degradans
  misc_feature (45)..(161): Homolog of NCBI NO: 15838771 NR Description: conserved hypothetical protein [Xylella
  misc_feature (54)..(149): Homolog of NCBI NO: 33519773 NR Description: conserved hypothetical protein
  misc_feature (50)..(153): Homolog of NCBI NO: 24372753 NR Description: iojap domain protein [Shewanella oneidensis MR-1]
  misc_feature (33)..(148): Homolog of NCBI NO: 23040963 NR Description: hypothetical protein [Trichodesmium erythraeum
  misc_feature (26)..(150): Homolog of NCBI NO: 15966916 NR Description: HYPOTHETICAL PROTEIN [Sinorhizobium meliloti]
  misc_feature (5)..(154): Homolog of NCBI NO: 23109914 NR Description: hypothetical protein [Novosphingobium
  misc_feature (50)..(165): Homolog of NCBI NO: 22998575 NR Description: hypothetical protein [Magnetococcus sp. MC-1]
  misc_feature (1)..(184): Homolog of NCBI NO: 18408812 NR Description: expressed protein
  misc_feature (1)..(184): Homolog of NCBI NO: 21536608 NR Description: unknown [Arabidopsis thaliana]

SEQ ID NO: 32092 - DNA, 725 bp, Arabidopsis thaliana; identical to SEQ ID NO: 28502
  misc_feature (1)..(725): Ceres Seq. ID no. 13645709
  misc_feature: MA Experiment ID: 20000184 Result: Down-regulated in Transcription
  misc_feature: MA Experiment 20000184 PARAMETER Experiment Name: At_Shoots__P Parameter: Age (day) Value: 7
  misc_feature: MA Experiment 20000184 PARAMETER Experiment Name: At_Shoots__P Parameter: Tissue Value: Shoots vs. Whole Plant
  misc_feature: MA Experiment ID: 20000227 Result: Up-regulated in Transcription
  misc_feature: MA Experiment 20000227 PARAMETER Experiment Name: At_Root-Tips-vs-Tops_P Parameter: Tissue Value: Root Tips vs. Root Tops

SEQ ID NO: 32093 - protein, 169 aa, Arabidopsis thaliana; identical to SEQ ID NO: 28503
  peptide (1)..(169): Ceres Seq. ID no. 13645710
  misc_feature (63)..(91): Pfam Name: EF hand Pfam Description: EF hand
  misc_feature (9)..(165): Homolog of NCBI NO: 543936 NR Description: CALTRACTIN (CENTRIN)
  misc_feature (10)..(167): Homolog of NCBI NO: 37533900 NR Description: Centrin [Oryza sativa (japonica cultivar-group)]
  misc_feature (13)..(167): Homolog of NCBI NO: 21554823 NR Description: caltractin-like protein [Arabidopsis thaliana]
  misc_feature (13)..(167): Homolog of NCBI NO: 15234588 NR Description: caltractin (centrin), putative [Arabidopsis
  misc_feature (2)..(167): Homolog of NCBI NO: 34906754 NR Description: putative caltractin [Oryza sativa (japonica
  misc_feature (1)..(167): Homolog of NCBI NO: 33146874 NR Description: putative caltractin [Oryza sativa (japonica
  misc_feature (1)..(167): Homolog of NCBI NO: 6358509 NR Description: centrin [Nicotiana tabacum]
  misc_feature (1)..(167): Homolog of NCBI NO: 6358511 NR Description: centrin [Nicotiana tabacum]
  misc_feature (1)..(166): Homolog of NCBI NO: 729051 NR Description: CALTRACTIN (CENTRIN)
  misc_feature (1)..(169): Homolog of NCBI NO: 15229732 NR Description: caltractin (centrin) [Arabidopsis thaliana]

SEQ ID NO: 32094 - protein, 118 aa, Arabidopsis thaliana; identical to SEQ ID NO: 28504
  peptide (1)..(118): Ceres Seq. ID no. 13645711
  misc_feature (12)..(40): Pfam Name: EF hand Pfam Description: EF hand
  misc_feature (1)..(114): Homolog of NCBI NO: 543936 NR Description: CALTRACTIN (CENTRIN)
  misc_feature (1)..(116): Homolog of NCBI NO: 37533900 NR Description: Centrin [Oryza sativa (japonica cultivar-group)]
  misc_feature (1)..(116): Homolog of NCBI NO: 21554823 NR Description: caltractin-like protein [Arabidopsis thaliana]
  misc_feature (1)..(116): Homolog of NCBI NO: 15234588 NR Description: caltractin (centrin), putative [Arabidopsis
  misc_feature (1)..(116): Homolog of NCBI NO: 34906754 NR Description: putative caltractin [Oryza sativa (japonica
  misc_feature (1)..(116): Homolog of NCBI NO: 33146874 NR Description: putative caltractin [Oryza sativa (japonica
  misc_feature (1)..(116): Homolog of NCBI NO: 6358509 NR Description: centrin [Nicotiana tabacum]
  misc_feature (1)..(116): Homolog of NCBI NO: 6358511 NR Description: centrin [Nicotiana tabacum]
  misc_feature (1)..(115): Homolog of NCBI NO: 729051 NR Description: CALTRACTIN (CENTRIN)
  misc_feature (1)..(118): Homolog of NCBI NO: 15229732 NR Description: caltractin (centrin) [Arabidopsis thaliana]

SEQ ID NO: 32095 - protein, 111 aa, Arabidopsis thaliana; identical to SEQ ID NO: 28505
  peptide (1)..(111): Ceres Seq. ID no. 13645712
  misc_feature (5)..(33): Pfam Name: EF hand Pfam Description: EF hand
  misc_feature (1)..(107): Homolog of NCBI NO: 543936 NR Description: CALTRACTIN (CENTRIN)
  misc_feature (1)..(109): Homolog of NCBI NO: 37533900 NR Description: Centrin [Oryza sativa (japonica cultivar-group)]
  misc_feature (1)..(109): Homolog of NCBI NO: 21554823 NR Description: caltractin-like protein [Arabidopsis thaliana]
  misc_feature (1)..(109): Homolog of NCBI NO: 15234588 NR Description: caltractin (centrin), putative [Arabidopsis
  misc_feature (1)..(109): Homolog of NCBI NO: 34906754 NR Description: putative caltractin [Oryza sativa (japonica
  misc_feature (1)..(109): Homolog of NCBI NO: 33146874 NR Description: putative caltractin [Oryza sativa (japonica
  misc_feature (1)..(109): Homolog of NCBI NO: 6358509 NR Description: centrin [Nicotiana tabacum]
  misc_feature (1)..(109): Homolog of NCBI NO: 6358511 NR Description: centrin [Nicotiana tabacum]
  misc_feature (1)..(108): Homolog of NCBI NO: 729051 NR Description: CALTRACTIN (CENTRIN)
  misc_feature (1)..(111): Homolog of NCBI NO: 15229732 NR Description: caltractin (centrin) [Arabidopsis thaliana]

SEQ ID NO: 32096 - DNA, 1107 bp, Arabidopsis thaliana; identical to SEQ ID NO: 28506
  misc_feature (1)..(1107): Ceres Seq. ID no. 12334388
  misc_feature: MA Experiment ID: 108595 Result: Down-regulated in Transcription
  misc_feature: MA Experiment 108595 PARAMETER Experiment Name: At_Ler-pi_Ovule_cDNA_P Parameter: Plant Line Value: null

SEQ ID NO: 32097 - protein, 282 aa, Arabidopsis thaliana; identical to SEQ ID NO: 28507
  peptide (1)..(282): Ceres Seq. ID no. 12334389
  misc_feature (26)..(98): Homolog of NCBI NO: 34902506 NR Description: P0581F09.11 [Oryza sativa (japonica
  misc_feature (26)..(109): Homolog of NCBI NO: 18425082 NR Description: ferripyochelin-binding protein-like
  misc_feature (26)..(98): Homolog of NCBI NO: 21537242 NR Description: unknown [Arabidopsis thaliana]
  misc_feature (26)..(98): Homolog of NCBI NO: 18394761 NR Description: expressed protein
  misc_feature (26)..(98): Homolog of NCBI NO: 34904754 NR Description: putative transcription factor APFI
  misc_feature (26)..(98): Homolog of NCBI NO: 15220153 NR Description: Unknown protein
  misc_feature (26)..(98): Homolog of NCBI NO: 13507025 NR Description: transcription factor APFI [Arabidopsis thaliana]
  misc_feature (112)..(268): Homolog of NCBI NO: 32488163 NR Description: OSJNBa0033G16.15 [Oryza sativa (japonica
  misc_feature (96)..(282): Homolog of NCBI NO: 18652408 NR Description: unknown [Hordeum vulgare]
  misc_feature (26)..(282): Homolog of NCBI NO: 18401719 NR Description: expressed protein

SEQ ID NO: 32098 - protein, 257 aa, Arabidopsis thaliana; identical to SEQ ID NO: 28508
  peptide (1)..(257): Ceres Seq. ID no. 12334390
  misc_feature (1)..(73): Homolog of NCBI NO: 34902506 NR Description: P0581F09.11 [Oryza sativa (japonica
  misc_feature (1)..(84): Homolog of NCBI NO: 18425082 NR Description: ferripyochelin-binding protein-like
  misc_feature (1)..(73): Homolog of NCBI NO: 21537242 NR Description: unknown [Arabidopsis thaliana]
  misc_feature (1)..(73): Homolog of NCBI NO: 18394761 NR Description: expressed protein
  misc_feature (1)..(73): Homolog of NCBI NO: 34904754 NR Description: putative transcription factor APFI
  misc_feature (1)..(73): Homolog of NCBI NO: 15220153 NR Description: Unknown protein
  misc_feature (1)..(73): Homolog of NCBI NO: 13507025 NR Description: transcription factor APFI [Arabidopsis thaliana]
  misc_feature (87)..(243): Homolog of NCBI NO: 32488163 NR Description: OSJNBa0033G16.15 [Oryza sativa (japonica
  misc_feature (71)..(257): Homolog of NCBI NO: 18652408 NR Description: unknown [Hordeum vulgare]
  misc_feature (1)..(257): Homolog of NCBI NO: 18401719 NR Description: expressed protein

SEQ ID NO: 32099 - protein, 177 aa, Arabidopsis thaliana; identical to SEQ ID NO: 28509
  peptide (1)..(177): Ceres Seq. ID no. 12334391
  misc_feature (7)..(163): Homolog of NCBI NO: 32488163 NR Description: OSJNBa0033G16.15 [Oryza sativa (japonica
  misc_feature (1)..(177): Homolog of NCBI NO: 18652408 NR Description: unknown [Hordeum vulgare]
  misc_feature (1)..(177): Homolog of NCBI NO: 18401719 NR Description: expressed protein

SEQ ID NO: 32100 - DNA, 857 bp, Arabidopsis thaliana; identical to SEQ ID NO: 28510
  misc_feature (1)..(857): Ceres Seq. ID no. 12323469
  misc_feature: MA Experiment ID: 108461 Result: Up-regulated in Transcription
  misc_feature: MA Experiment 108461 PARAMETER Experiment Name: At_Germinating_Seeds_cDNA_P Parameter: Age (day) Value: 1 vs. 0
  misc_feature: MA Experiment 108461 PARAMETER Experiment Name: At_Germinating_Seeds_cDNA_P Parameter: Tissue Value: Germinating Seeds
  misc_feature: MA Experiment ID: 108462 Result: Up-regulated in Transcription
  misc_feature: MA Experiment 108462 PARAMETER Experiment Name: At_Germinating_Seeds_cDNA_P Parameter: Age (day) Value: 2 vs. 0
  misc_feature: MA Experiment 108462 PARAMETER Experiment Name: At_Germinating_Seeds_cDNA_P Parameter: Tissue Value: Germinating Seeds
  misc_feature: MA Experiment ID: 108463 Result: Up-regulated in Transcription
  misc_feature: MA Experiment 108463 PARAMETER Experiment Name: At_Germinating_Seeds_cDNA_P Parameter: Age (day) Value: 3 vs. 0
  misc_feature: MA Experiment 108463 PARAMETER Experiment Name: At_Germinating_Seeds_cDNA_P Parameter: Tissue Value: Germinating Seeds
  misc_feature: MA Experiment ID: 108464 Result: Up-regulated in Transcription
  misc_feature: MA Experiment 108464 PARAMETER Experiment Name: At_Germinating_Seeds_cDNA_P Parameter: Age (day) Value: 4 vs. 0
  misc_feature: MA Experiment 108464 PARAMETER Experiment Name: At_Germinating_Seeds_cDNA_P Parameter: Tissue Value: Germinating Seeds
  misc_feature: MA Experiment ID: 108579 Result: Up-regulated in Transcription
  misc_feature: MA Experiment 108579 PARAMETER Experiment Name: At_4deg_Cold_cDNA_P Parameter: Temperature (deg C) Value: 4 vs. 22
  misc_feature: MA Experiment 108579 PARAMETER Experiment Name: At_4deg_Cold_cDNA_P Parameter: Timepoint (hr) Value: 6
  misc_feature: MA Experiment 108579 PARAMETER Experiment Name: At_4deg_Cold_cDNA_P Parameter: Tissue Value: Aerial
  misc_feature: MA Experiment ID: 108595 Result: Down-regulated in Transcription
  misc_feature: MA Experiment 108595 PARAMETER Experiment Name: At_Ler-pi_Ovule_cDNA_P Parameter: Plant Line Value: null
  misc_feature: MA Experiment ID: 20000089 Result: Down-regulated in Transcription
  misc_feature: MA Experiment ID: 20000179 Result: Up-regulated in Transcription
  misc_feature: MA Experiment 20000179 PARAMETER Experiment Name: At_Germinating_Seeds_P Parameter: Age (hr) Value: 6 vs. 0
  misc_feature: MA Experiment 20000179 PARAMETER Experiment Name: At_Germinating_Seeds_P Parameter: Tissue Value: Germinating Seeds
  misc_feature: MA Experiment ID: 20000180 Result: Up-regulated in Transcription
  misc_feature: MA Experiment 20000180 PARAMETER Experiment Name: At_Germinating_Seeds_P Parameter: Age (hr) Value: 24 vs. 0
  misc_feature: MA Experiment 20000180 PARAMETER Experiment Name: At_Germinating_Seeds_P Parameter: Tissue Value: Germinating Seeds
  misc_feature: MA Experiment ID: 20000495 Result: Down-regulated in Transcription
  misc_feature: MA Experiment 20000495 PARAMETER Experiment Name: At_Guard_Cells_P Parameter: Harvest Date Value: 8/2/2002
  misc_feature: MA Experiment 20000495 PARAMETER Experiment Name: At_Guard_Cells_P Parameter: Organism Value: A. thaliana
  misc_feature: MA Experiment 20000495 PARAMETER Experiment Name: At_Guard_Cells_P Parameter: Tissue Value: Guard Cells vs. Leaves
  misc_feature: MA Experiment ID: 20000573 Result: Down-regulated in Transcription
  misc_feature: MA Experiment 20000573 PARAMETER Experiment Name: At_100uM_ABA_Mutants__P Parameter: Organism Value: A. thaliana
  misc_feature: MA Experiment 20000573 PARAMETER Experiment Name: At_100uM_ABA_Mutants__P Parameter: Plant Line Value: CS22 vs. Ler wt
  misc_feature: MA Experiment 20000573 PARAMETER Experiment Name: At_100uM_ABA_Mutants__P Parameter: Timepoint (hr) Value: N/A
  misc_feature: MA Experiment 20000573 PARAMETER Experiment Name: At_100uM_ABA_Mutants__P Parameter: Tissue Value: Whole Plant
  misc_feature: MA Experiment 20000573 PARAMETER Experiment Name: At_100uM_ABA_Mutants__P Parameter: Treatment Value: None
  misc_feature: MA Experiment ID: 20000574 Result: Down-regulated in Transcription
  misc_feature: MA Experiment 20000574 PARAMETER Experiment Name: At_100uM_ABA_Mutants__P Parameter: Organism Value: A. thaliana
  misc_feature: MA Experiment 20000574 PARAMETER Experiment Name: At_100uM_ABA_Mutants__P Parameter: Plant Line Value: CS23 vs. Ler wt
  misc_feature: MA Experiment 20000574 PARAMETER Experiment Name: At_100uM_ABA_Mutants__P Parameter: Timepoint (hr) Value: N/A
  misc_feature: MA Experiment 20000574 PARAMETER Experiment Name: At_100uM_ABA_Mutants__P Parameter: Tissue Value: Whole Plant
  misc_feature: MA Experiment 20000574 PARAMETER Experiment Name: At_100uM_ABA_Mutants__P Parameter: Treatment Value: None
  misc_feature: MA Experiment ID: 20001248 Result: Down-regulated in Transcription
  misc_feature: MA Experiment 20001248 PARAMETER Experiment Name: At_Far-red-induction_P Parameter: Age (day) Value: 7
  misc_feature: MA Experiment 20001248 PARAMETER Experiment Name: At_Far-red-induction_P Parameter: Light Value: Far-red vs. White
  misc_feature: MA Experiment 20001248 PARAMETER Experiment Name: At_Far-red-induction_P Parameter: Organism Value: A. thaliana
  misc_feature: MA Experiment 20001248 PARAMETER Experiment Name: At_Far-red-induction_P Parameter: Plant Line Value: Columbia
  misc_feature: MA Experiment 20001248 PARAMETER Experiment Name: At_Far-red-induction_P Parameter: Timepoint (hr) Value: 4
  misc_feature: MA Experiment 20001248 PARAMETER Experiment Name: At_Far-red-induction_P Parameter: Tissue Value: Whole Plant
  misc_feature: MA Experiment ID: 20001557 Result: Down-regulated in Transcription
  misc_feature: MA Experiment 20001557 PARAMETER Experiment Name: At_Drought_Soil_Dry_P Parameter: Age (day) Value: 27
  misc_feature: MA Experiment 20001557 PARAMETER Experiment Name: At_Drought_Soil_Dry_P Parameter: Organism Value: A. thaliana
  misc_feature: MA Experiment 20001557 PARAMETER Experiment Name: At_Drought_Soil_Dry_P Parameter: Plant Line Value: WS
  misc_feature: MA Experiment 20001557 PARAMETER Experiment Name: At_Drought_Soil_Dry_P Parameter: Post Timepoint (hr) Value: 3
  misc_feature: MA Experiment 20001557 PARAMETER Experiment Name: At_Drought_Soil_Dry_P Parameter: Post-Treatment Value: Re-Water vs. No Drought
  misc_feature: MA Experiment 20001557 PARAMETER Experiment Name: At_Drought_Soil_Dry_P Parameter: Timepoint (day) Value: 13
  misc_feature: MA Experiment 20001557 PARAMETER Experiment Name: At_Drought_Soil_Dry_P Parameter: Treatment Value: Drought vs. No Drought
  misc_feature: MA Experiment ID: 20001558 Result: Down-regulated in Transcription
  misc_feature: MA Experiment 20001558 PARAMETER Experiment Name: At_Drought_Soil_Dry_P Parameter: Age (day) Value: 27
  misc_feature: MA Experiment 20001558 PARAMETER Experiment Name: At_Drought_Soil_Dry_P Parameter: Organism Value: A. thaliana
  misc_feature: MA Experiment 20001558 PARAMETER Experiment Name: At_Drought_Soil_Dry_P Parameter: Plant Line Value: WS
  misc_feature: MA Experiment 20001558 PARAMETER Experiment Name: At_Drought_Soil_Dry_P Parameter: Post Timepoint (hr) Value: 6
  misc_feature: MA Experiment 20001558 PARAMETER Experiment Name: At_Drought_Soil_Dry_P Parameter: Post-Treatment Value: Re-Water vs. No Drought
  misc_feature: MA Experiment 20001558 PARAMETER Experiment Name: At_Drought_Soil_Dry_P Parameter: Timepoint (day) Value: 13
  misc_feature: MA Experiment 20001558 PARAMETER Experiment Name: At_Drought_Soil_Dry_P Parameter: Treatment Value: Drought vs. No Drought
  misc_feature: MA Experiment ID: 20001560 Result: Down-regulated in Transcription
  misc_feature: MA Experiment 20001560 PARAMETER Experiment Name: At_Drought_Soil_Dry_P Parameter: Age (day) Value: 28
  misc_feature: MA Experiment 20001560 PARAMETER Experiment Name: At_Drought_Soil_Dry_P Parameter: Organism Value: A. thaliana
  misc_feature: MA Experiment 20001560 PARAMETER Experiment Name: At_Drought_Soil_Dry_P Parameter: Plant Line Value: WS
  misc_feature: MA Experiment 20001560 PARAMETER Experiment Name: At_Drought_Soil_Dry_P Parameter: Post Timepoint (hr) Value: None
  misc_feature: MA Experiment 20001560 PARAMETER Experiment Name: At_Drought_Soil_Dry_P Parameter: Post-Treatment Value: None
  misc_feature: MA Experiment 20001560 PARAMETER Experiment Name: At_Drought_Soil_Dry_P Parameter: Timepoint (day) Value: 14
  misc_feature: MA Experiment 20001560 PARAMETER Experiment Name: At_Drought_Soil_Dry_P Parameter: Treatment Value: Drought vs. No Drought
  misc_feature: MA Experiment ID: 20001905 Result: Down-regulated in Transcription
  misc_feature: MA Experiment 20001905 PARAMETER Experiment Name: At_Drought_Reproduction_P Parameter: Age (day) Value: 40
  misc_feature: MA Experiment 20001905 PARAMETER Experiment Name: At_Drought_Reproduction_P Parameter: Organism Value: A. thaliana
  misc_feature: MA Experiment 20001905 PARAMETER Experiment Name: At_Drought_Reproduction_P Parameter: Plant Line Value: WS
  misc_feature: MA Experiment 20001905 PARAMETER Experiment Name: At_Drought_Reproduction_P Parameter: Timepoint (day) Value: 10
  misc_feature: MA Experiment 20001905 PARAMETER Experiment Name: At_Drought_Reproduction_P Parameter: Tissue Value: Rosettes
  misc_feature: MA Experiment 20001905 PARAMETER Experiment Name: At_Drought_Reproduction_P Parameter: Treatment Value: Drought vs. No Drought

SEQ ID NO: 32101 - protein, 216 aa, Arabidopsis thaliana; identical to SEQ ID NO: 28511
  peptide (1)..(216): Ceres Seq. ID no. 12323470
  misc_feature (15)..(91): Homolog of NCBI NO: 38345615 NR Description: OSJNBb0003B01.7 [Oryza sativa (japonica
  misc_feature (47)..(216): Homolog of NCBI NO: 14423380 NR Description: Unknown protein [Arabidopsis thaliana]
  misc_feature (15)..(216): Homolog of NCBI NO: 18399845 NR Description: expressed protein

SEQ ID NO: 32102 - protein, 202 aa, Arabidopsis thaliana; identical to SEQ ID NO: 28512
  peptide (1)..(202): Ceres Seq. ID no. 12323471
  misc_feature (1)..(77): Homolog of NCBI NO: 38345615 NR Description: OSJNBb0003B01.7 [Oryza sativa (japonica
  misc_feature (33)..(202): Homolog of NCBI NO: 14423380 NR Description: Unknown protein [Arabidopsis thaliana]
  misc_feature (1)..(202): Homolog of NCBI NO: 18399845 NR Description: expressed protein

SEQ ID NO: 32103 - protein, 200 aa, Arabidopsis thaliana; identical to SEQ ID NO: 28513
  peptide (1)..(200): Ceres Seq. ID no. 12323472
  misc_feature (1)..(75): Homolog of NCBI NO: 38345615 NR Description: OSJNBb0003B01.7 [Oryza sativa (japonica
  misc_feature (31)..(200): Homolog of NCBI NO: 14423380 NR Description: Unknown protein [Arabidopsis thaliana]
  misc_feature (1)..(200): Homolog of NCBI NO: 18399845 NR Description: expressed protein

SEQ ID NO: 32104 - DNA, 1261 bp, Arabidopsis thaliana; identical to SEQ ID NO: 28514
  misc_feature (1)..(1261): Ceres Seq. ID no. 13491264
  misc_feature: MA Experiment ID: 20000171 Result: Up-regulated in Transcription
  misc_feature: MA Experiment 20000171 PARAMETER Experiment Name: At_42deg_Heat_P Parameter: Age (day) Value: 14
  misc_feature: MA Experiment 20000171 PARAMETER Experiment Name: At_42deg_Heat_P Parameter: Organism Value: A. thaliana
  misc_feature: MA Experiment 20000171 PARAMETER Experiment Name: At_42deg_Heat_P Parameter: Plant Line Value: WS
  misc_feature: MA Experiment 20000171 PARAMETER Experiment Name: At_42deg_Heat_P Parameter: Temperature (deg C) Value: 42 vs. 22
  misc_feature: MA Experiment 20000171 PARAMETER Experiment Name: At_42deg_Heat_P Parameter: Timepoint (hr) Value: 1
  misc_feature: MA Experiment 20000171 PARAMETER Experiment Name: At_42deg_Heat_P Parameter: Tissue Value: Aerial
  misc_feature: MA Experiment ID: 20000173 Result: Up-regulated in Transcription
  misc_feature: MA Experiment 20000173 PARAMETER Experiment Name: At_42deg_Heat_P Parameter: Age (day) Value: 14
  misc_feature: MA Experiment 20000173 PARAMETER Experiment Name: At_42deg_Heat_P Parameter: Organism Value: A. thaliana
  misc_feature: MA Experiment 20000173 PARAMETER Experiment Name: At_42deg_Heat_P Parameter: Plant Line Value: WS
  misc_feature: MA Experiment 20000173 PARAMETER Experiment Name: At_42deg_Heat_P Parameter: Temperature (deg C) Value: 42 vs. 22
  misc_feature: MA Experiment 20000173 PARAMETER Experiment Name: At_42deg_Heat_P Parameter: Timepoint (hr) Value: 6
  misc_feature: MA Experiment 20000173 PARAMETER Experiment Name: At_42deg_Heat_P Parameter: Tissue Value: Aerial
  misc_feature: MA Experiment ID: 20000179 Result: Down-regulated in Transcription
  misc_feature: MA Experiment 20000179 PARAMETER Experiment Name: At_Germinating_Seeds_P Parameter: Age (hr) Value: 6 vs. 0
  misc_feature: MA Experiment 20000179 PARAMETER Experiment Name: At_Germinating_Seeds_P Parameter: Tissue Value: Germinating Seeds
  misc_feature: MA Experiment ID: 20000184 Result: Up-regulated in Transcription
  misc_feature: MA Experiment 20000184 PARAMETER Experiment Name: At_Shoots__P Parameter: Age (day) Value: 7
  misc_feature: MA Experiment 20000184 PARAMETER Experiment Name: At_Shoots__P Parameter: Tissue Value: Shoots vs. Whole Plant
  misc_feature: MA Experiment ID: 20000234 Result: Up-regulated in Transcription
  misc_feature: MA Experiment 20000234 PARAMETER Experiment Name: At_Siliques_P Parameter: Age (day) Value: 21
  misc_feature: MA Experiment 20000234 PARAMETER Experiment Name: At_Siliques_P Parameter: Organism Value: A. thaliana
  misc_feature: MA Experiment 20000234 PARAMETER Experiment Name: At_Siliques_P Parameter: Plant Line Value: WS
  misc_feature: MA Experiment 20000234 PARAMETER Experiment Name: At_Siliques_P Parameter: Tissue Value: Less Than 5mm Siliques vs. Whole Plant
  misc_feature: MA Experiment ID: 20000235 Result: Up-regulated in Transcription
  misc_feature: MA Experiment 20000235 PARAMETER Experiment Name: At_Siliques_P Parameter: Age (day) Value: 21
  misc_feature: MA Experiment 20000235 PARAMETER Experiment Name: At_Siliques_P Parameter: Organism Value: A. thaliana
  misc_feature: MA Experiment 20000235 PARAMETER Experiment Name: At_Siliques_P Parameter: Plant Line Value: WS
  misc_feature: MA Experiment 20000235 PARAMETER Experiment Name: At_Siliques_P Parameter: Tissue Value: 5-10mm Siliques vs. Whole Plant
  misc_feature: MA Experiment ID: 20000264 Result: Up-regulated in Transcription
  misc_feature: MA Experiment 20000264 PARAMETER Experiment Name: At_Open_Flower_P Parameter: Age (day) Value: 21
  misc_feature: MA Experiment 20000264 PARAMETER Experiment Name: At_Open_Flower_P Parameter: Plant Line Value: WS
  misc_feature: MA Experiment 20000264 PARAMETER Experiment Name: At_Open_Flower_P Parameter: Tissue Value: Open Flower vs. Whole Plant
  misc_feature: MA Experiment ID: 20000265 Result: Up-regulated in Transcription
  misc_feature: MA Experiment 20000265 PARAMETER Experiment Name: At_Open_Flower_P Parameter: Age (day) Value: 21
  misc_feature: MA Experiment 20000265 PARAMETER Experiment Name: At_Open_Flower_P Parameter: Plant Line Value: WS
  misc_feature: MA Experiment 20000265 PARAMETER Experiment Name: At_Open_Flower_P Parameter: Tissue Value: Closed Flower vs. Whole Plant
  misc_feature: MA Experiment ID: 20000286 Result: Up-regulated in Transcription
  misc_feature: MA Experiment 20000286 PARAMETER Experiment Name: At_Open_Flower_P Parameter: Age (day) Value: 21
  misc_feature: MA Experiment 20000286 PARAMETER Experiment Name: At_Open_Flower_P Parameter: Plant Line Value: WS
  misc_feature: MA Experiment 20000286 PARAMETER Experiment Name: At_Open_Flower_P Parameter: Tissue Value: Half Open vs. Whole Plant
  misc_feature: MA Experiment ID: 20000794 Result: Up-regulated in Transcription
  misc_feature: MA Experiment 20000794 PARAMETER Experiment Name: At_Petals_P Parameter: Age (day) Value: 23-25 days
  misc_feature: MA Experiment 20000794 PARAMETER Experiment Name: At_Petals_P Parameter: Plant Line Value: WS
  misc_feature: MA Experiment 20000794 PARAMETER Experiment Name: At_Petals_P Parameter: Tissue Value: Petals vs. Whole plant

SEQ ID NO: 32105 - protein, 332 aa, Arabidopsis thaliana; identical to SEQ ID NO: 28515
  peptide (1)..(332): Ceres Seq. ID no. 13491265
  misc_feature (157)..(331): Pfam Name: lactate/malate dehydrogenase, alpha/beta Pfam Description: lactate/malate dehydrogenase, alpha/beta
  misc_feature (4)..(332): Homolog of NCBI NO: 37589957 NR Description: Malate dehydrogenase, soluble [Mus musculus]
  misc_feature (1)..(332): Homolog of NCBI NO: 15982948 NR Description: NAD-dependent malate dehydrogenase [Prunus
  misc_feature (1)..(332): Homolog of NCBI NO: 11133373 NR Description: Malate dehydrogenase, cytoplasmic
  misc_feature (1)..(332): Homolog of NCBI NO: 12229778 NR Description: Malate dehydrogenase, cytoplasmic
  misc_feature (1)..(332): Homolog of NCBI NO: 10334493 NR Description: cytosolic malate dehydrogenase [Cicer arietinum]
  misc_feature (1)..(331): Homolog of NCBI NO: 18202485 NR Description: Malate dehydrogenase, cytoplasmic
  misc_feature (1)..(332): Homolog of NCBI NO: 10798652 NR Description: malate dehydrogenase [Nicotiana tabacum]
  misc_feature (1)..(332): Homolog of NCBI NO: 15219721 NR Description: malate dehydrogenase, cytosolic, putative
  misc_feature (1)..(332): Homolog of NCBI NO: 21593565 NR Description: cytosolic malate dehydrogenase [Arabidopsis
  misc_feature (1)..(332): Homolog of NCBI NO: 15239843 NR Description: malate dehydrogenase, cytosolic, putative

SEQ ID NO: 32106 - protein, 309 aa, Arabidopsis thaliana; identical to SEQ ID NO: 28516
  peptide (1)..(309): Ceres Seq. ID no. 13491266
  misc_feature (134)..(308): Pfam Name: lactate/malate dehydrogenase, alpha/beta Pfam Description: lactate/malate dehydrogenase, alpha/beta
  misc_feature (1)..(309): Homolog of NCBI NO: 37589957 NR Description: Malate dehydrogenase, soluble [Mus musculus]
  misc_feature (1)..(309): Homolog of NCBI NO: 15982948 NR Description: NAD-dependent malate dehydrogenase [Prunus
  misc_feature (1)..(309): Homolog of NCBI NO: 11133373 NR Description: Malate dehydrogenase, cytoplasmic
  misc_feature (1)..(309): Homolog of NCBI NO: 12229778 NR Description: Malate dehydrogenase, cytoplasmic
  misc_feature (1)..(309): Homolog of NCBI NO: 10334493 NR Description: cytosolic malate dehydrogenase [Cicer arietinum]
  misc_feature (1)..(308): Homolog of NCBI NO: 18202485 NR Description: Malate dehydrogenase, cytoplasmic
  misc_feature (1)..(309): Homolog of NCBI NO: 10798652 NR Description: malate dehydrogenase [Nicotiana tabacum]
  misc_feature (1)..(309): Homolog of NCBI NO: 15219721 NR Description: malate dehydrogenase, cytosolic, putative
  misc_feature (1)..(309): Homolog of NCBI NO: 21593565 NR Description: cytosolic malate dehydrogenase [Arabidopsis
  misc_feature (1)..(309): Homolog of NCBI NO: 15239843 NR Description: malate dehydrogenase, cytosolic, putative

SEQ ID NO: 32107 - protein, 303 aa, Arabidopsis thaliana; identical to SEQ ID NO: 28517
  peptide (1)..(303): Ceres Seq. ID no. 13491267
  misc_feature (128)..(302): Pfam Name: lactate/malate dehydrogenase, alpha/beta Pfam Description: lactate/malate dehydrogenase, alpha/beta
  misc_feature (1)..(303): Homolog of NCBI NO: 37589957 NR Description: Malate dehydrogenase, soluble [Mus musculus]
  misc_feature (1)..(303): Homolog of NCBI NO: 15982948 NR Description: NAD-dependent malate dehydrogenase [Prunus
  misc_feature (1)..(303): Homolog of NCBI NO: 11133373 NR Description: Malate dehydrogenase, cytoplasmic
  misc_feature (1)..(303): Homolog of NCBI NO: 12229778 NR Description: Malate dehydrogenase, cytoplasmic
  misc_feature (1)..(303): Homolog of NCBI NO: 10334493 NR Description: cytosolic malate dehydrogenase [Cicer arietinum]
  misc_feature (1)..(302): Homolog of NCBI NO: 18202485 NR Description: Malate dehydrogenase, cytoplasmic
  misc_feature (1)..(303): Homolog of NCBI NO: 10798652 NR Description: malate dehydrogenase [Nicotiana tabacum]
  misc_feature (1)..(303): Homolog of NCBI NO: 15219721 NR Description: malate dehydrogenase, cytosolic, putative
  misc_feature (1)..(303): Homolog of NCBI NO: 21593565 NR Description: cytosolic malate dehydrogenase [Arabidopsis
  misc_feature (1)..(303): Homolog of NCBI NO: 15239843 NR Description: malate dehydrogenase, cytosolic, putative

SEQ ID NO: 32108 - DNA, 871 bp, Arabidopsis thaliana; identical to SEQ ID NO: 28518
  misc_feature (1)..(871): Ceres Seq. ID no. 12348502
  misc_feature: MA Experiment ID: 108473 Result: Down-regulated in Transcription
  misc_feature: MA Experiment 108473 PARAMETER Experiment Name: At_Drought_Flowers_cDNA_P Parameter: Timepoint (hr) Value: 7 d
  misc_feature: MA Experiment 108473 PARAMETER Experiment Name: At_Drought_Flowers_cDNA_P Parameter: Tissue Value: Flower
  misc_feature: MA Experiment 108473 PARAMETER Experiment Name: At_Drought_Flowers_cDNA_P Parameter: Treatment Value: Drought vs. No Drought
  misc_feature: MA Experiment ID: 108474 Result: Down-regulated in Transcription
  misc_feature: MA Experiment 108474 PARAMETER Experiment Name: At_Drought_Flowers_cDNA_P Parameter: Timepoint (hr) Value: null
  misc_feature: MA Experiment 108474 PARAMETER Experiment Name: At_Drought_Flowers_cDNA_P Parameter: Treatment Value: Drought vs. No Drought
  misc_feature: MA Experiment ID: 108501 Result: Down-regulated in Transcription
  misc_feature: MA Experiment 108501 PARAMETER Experiment Name: At_ap2_floral_buds_cDNA_P Parameter: Plant Line Value: ap2 (Ler.)
  misc_feature: MA Experiment 108501 PARAMETER Experiment Name: At_ap2_floral_buds_cDNA_P Parameter: Tissue Value: Closed Flower
  misc_feature: MA Experiment ID: 20000265 Result: Up-regulated in Transcription
  misc_feature: MA Experiment 20000265 PARAMETER Experiment Name: At_Open_Flower_P Parameter: Age (day) Value: 21
  misc_feature: MA Experiment 20000265 PARAMETER Experiment Name: At_Open_Flower_P Parameter: Plant Line Value: WS
  misc_feature: MA Experiment 20000265 PARAMETER Experiment Name: At_Open_Flower_P Parameter: Tissue Value: Closed Flower vs. Whole Plant
  misc_feature: MA Experiment ID: 20000286 Result: Up-regulated in Transcription
  misc_feature: MA Experiment 20000286 PARAMETER Experiment Name: At_Open_Flower_P Parameter: Age (day) Value: 21
  misc_feature: MA Experiment 20000286 PARAMETER Experiment Name: At_Open_Flower_P Parameter: Plant Line Value: WS
  misc_feature: MA Experiment 20000286 PARAMETER Experiment Name: At_Open_Flower_P Parameter: Tissue Value: Half Open vs. Whole Plant
  misc_feature: MA Experiment ID: 20001910 Result: Down-regulated in Transcription
  misc_feature: MA Experiment 20001910 PARAMETER Experiment Name: At_Drought_Reproduction_P Parameter: Age (day) Value: 37
  misc_feature: MA Experiment 20001910 PARAMETER Experiment Name: At_Drought_Reproduction_P Parameter: Organism Value: A. thaliana
  misc_feature: MA Experiment 20001910 PARAMETER Experiment Name: At_Drought_Reproduction_P Parameter: Plant Line Value: WS
  misc_feature: MA Experiment 20001910 PARAMETER Experiment Name: At_Drought_Reproduction_P Parameter: Timepoint (day) Value: 7
  misc_feature: MA Experiment 20001910 PARAMETER Experiment Name: At_Drought_Reproduction_P Parameter: Tissue Value: Flowers
  misc_feature: MA Experiment 20001910 PARAMETER Experiment Name: At_Drought_Reproduction_P Parameter: Treatment Value: Drought vs. No Drought

SEQ ID NO: 32109 - protein, 249 aa, Arabidopsis thaliana; identical to SEQ ID NO: 28519
  peptide (1)..(249): Ceres Seq. ID no. 12348503
  misc_feature (127)..(230): Pfam Name: Domain of unknown function DUF220 Pfam Description: Domain of unknown function DUF220
  misc_feature (127)..(230): Pfam Name: Domain of unknown function DUF220 Pfam Description: Domain of unknown function DUF220
  misc_feature (93)..(248): Homolog of NCBI NO: 8778583 NR Description: F28C11.19 [Arabidopsis thaliana]
  misc_feature (97)..(240): Homolog of NCBI NO: 8778583 NR Description: F28C11.19 [Arabidopsis thaliana]
  misc_feature (95)..(240): Homolog of NCBI NO: 8778583 NR Description: F28C11.19 [Arabidopsis thaliana]
  misc_feature (91)..(247): Homolog of NCBI NO: 8778583 NR Description: F28C11.19 [Arabidopsis thaliana]
  misc_feature (31)..(104): Homolog of NCBI NO: 25373395 NR Description: hypothetical protein F5O8.22 - Arabidopsis
  misc_feature (93)..(248): Homolog of NCBI NO: 8778583 NR Description: F28C11.19 [Arabidopsis thaliana]
  misc_feature (95)..(240): Homolog of NCBI NO: 8778583 NR Description: F28C11.19 [Arabidopsis thaliana]
  misc_feature (31)..(104): Homolog of NCBI NO: 25373395 NR Description: hypothetical protein F5O8.22 - Arabidopsis
  misc_feature (95)..(248): Homolog of NCBI NO: 8778583 NR Description: F28C11.19 [Arabidopsis thaliana]
  misc_feature (1)..(104): Homolog of NCBI NO: 8778583 NR Description: F28C11.19 [Arabidopsis thaliana]
  misc_feature (31)..(249): Homolog of NCBI NO: 21536644 NR Description: OBP32pep protein, putative [Arabidopsis thaliana]
  misc_feature (31)..(249): Homolog of NCBI NO: 18395270 NR Description: OBP32pep protein, putative
  misc_feature (97)..(249): Homolog of NCBI NO: 25373395 NR Description: hypothetical protein F5O8.22 - Arabidopsis
  misc_feature (91)..(247): Homolog of NCBI NO: 8778583 NR Description: F28C11.19 [Arabidopsis thaliana]
  misc_feature (97)..(240): Homolog of NCBI NO: 8778583 NR Description: F28C11.19 [Arabidopsis thaliana]
  misc_feature (97)..(249): Homolog of NCBI NO: 25373395 NR Description: hypothetical protein F5O8.22 - Arabidopsis
  misc_feature (31)..(249): Homolog of NCBI NO: 18395270 NR Description: OBP32pep protein, putative
  misc_feature (31)..(249): Homolog of NCBI NO: 21536644 NR Description: OBP32pep protein, putative [Arabidopsis thaliana]
  misc_feature (1)..(104): Homolog of NCBI NO: 8778583 NR Description: F28C11.19 [Arabidopsis thaliana]
  misc_feature (95)..(248): Homolog of NCBI NO: 8778583 NR Description: F28C11.19 [Arabidopsis thaliana]

SEQ ID NO: 32110 - protein, 219 aa, Arabidopsis thaliana; identical to SEQ ID NO: 28520
  peptide (1)..(219): Ceres Seq. ID no. 12348504
  misc_feature (97)..(200): Pfam Name: Domain of unknown function DUF220 Pfam Description: Domain of unknown function DUF220
  misc_feature (97)..(200): Pfam Name: Domain of unknown function DUF220 Pfam Description: Domain of unknown function DUF220
  misc_feature (63)..(218): Homolog of NCBI NO: 8778583 NR Description: F28C11.19 [Arabidopsis thaliana]
  misc_feature (67)..(210): Homolog of NCBI NO: 8778583 NR Description: F28C11.19 [Arabidopsis thaliana]
  misc_feature (65)..(210): Homolog of NCBI NO: 8778583 NR Description: F28C11.19 [Arabidopsis thaliana]
  misc_feature (61)..(217): Homolog of NCBI NO: 8778583 NR Description: F28C11.19 [Arabidopsis thaliana]
  misc_feature (1)..(74): Homolog of NCBI NO: 25373395 NR Description: hypothetical protein F5O8.22 - Arabidopsis
  misc_feature (63)..(218): Homolog of NCBI NO: 8778583 NR Description: F28C11.19 [Arabidopsis thaliana]
  misc_feature (65)..(210): Homolog of NCBI NO: 8778583 NR Description: F28C11.19 [Arabidopsis thaliana]
  misc_feature (1)..(74): Homolog of NCBI NO: 25373395 NR Description: hypothetical protein F5O8.22 - Arabidopsis
  misc_feature (65)..(218): Homolog of NCBI NO: 8778583 NR Description: F28C11.19 [Arabidopsis thaliana]
  misc_feature (1)..(74): Homolog of NCBI NO: 8778583 NR Description: F28C11.19 [Arabidopsis thaliana]
  misc_feature (1)..(219): Homolog of NCBI NO: 21536644 NR Description: OBP32pep protein, putative [Arabidopsis thaliana]
  misc_feature (1)..(219): Homolog of NCBI NO: 18395270 NR Description: OBP32pep protein, putative
  misc_feature (67)..(219): Homolog of NCBI NO: 25373395 NR Description: hypothetical protein F5O8.22 - Arabidopsis
  misc_feature (61)..(217): Homolog of NCBI NO: 8778583 NR Description: F28C11.19 [Arabidopsis thaliana]
  misc_feature (67)..(210): Homolog of NCBI NO: 8778583 NR Description: F28C11.19 [Arabidopsis thaliana]
  misc_feature (67)..(219): Homolog of NCBI NO: 25373395 NR Description: hypothetical protein F5O8.22 - Arabidopsis
  misc_feature (1)..(219): Homolog of NCBI NO: 18395270 NR Description: OBP32pep protein, putative
  misc_feature (1)..(219): Homolog of NCBI NO: 21536644 NR Description: OBP32pep protein, putative [Arabidopsis thaliana]
  misc_feature (1)..(74): Homolog of NCBI NO: 8778583 NR Description: F28C11.19 [Arabidopsis thaliana]
  misc_feature (65)..(218): Homolog of NCBI NO: 8778583 NR Description: F28C11.19 [Arabidopsis thaliana]

SEQ ID NO: 32111 - DNA, 673 bp, Arabidopsis thaliana; identical to SEQ ID NO: 28521
  misc_feature (1)..(673): Ceres Seq. ID no. 12331840
  misc_feature: MA Experiment ID: 20000439 Result: Up-regulated in Transcription
  misc_feature: MA Experiment 20000439 PARAMETER Experiment Name: At_Roots__P Parameter: Age (day) Value: 14 vs. 21
  misc_feature: MA Experiment 20000439 PARAMETER Experiment Name: At_Roots__P Parameter: Organism Value: A. thaliana
  misc_feature: MA Experiment 20000439 PARAMETER Experiment Name: At_Roots__P Parameter: Tissue Value: Roots vs. Whole Plant
  misc_feature: MA Experiment ID: 20001451 Result: Up-regulated in Transcription
  misc_feature: MA Experiment 20001451 PARAMETER Experiment Name: At_Far-red-induction_P Parameter: Age (day) Value: 7
  misc_feature: MA Experiment 20001451 PARAMETER Experiment Name: At_Far-red-induction_P Parameter: Light Value: Far-red vs. White
  misc_feature: MA Experiment 20001451 PARAMETER Experiment Name: At_Far-red-induction_P Parameter: Organism Value: A. thaliana
  misc_feature: MA Experiment 20001451 PARAMETER Experiment Name: At_Far-red-induction_P Parameter: Plant Line Value: Columbia
  misc_feature: MA Experiment 20001451 PARAMETER Experiment Name: At_Far-red-induction_P Parameter: Timepoint (hr) Value: 24
  misc_feature: MA Experiment 20001451 PARAMETER Experiment Name: At_Far-red-induction_P Parameter: Tissue Value: Whole Plant

SEQ ID NO: 32112 - protein, 145 aa, Arabidopsis thaliana; identical to SEQ ID NO: 28522
  peptide (1)..(145): Ceres Seq. ID no. 12331841
  misc_feature (1)..(125): Pfam Name: pfkB family carbohydrate kinase Pfam Description: pfkB family carbohydrate kinase
  misc_feature (1)..(138): Homolog of NCBI NO: 20803993 NR Description: PUTATIVE SUGAR KINASE PROTEIN [Mesorhizobium loti]
  misc_feature (3)..(118): Homolog of NCBI NO: 33239956 NR Description: Sugar kinase, ribokinase family
  misc_feature (1)..(118): Homolog of NCBI NO: 17933998 NR Description: pfkB family carbohydrate kinase
  misc_feature (1)..(118): Homolog of NCBI NO: 15887433 NR Description: AGR_C_118p [Agrobacterium tumefaciens]
  misc_feature (1)..(118): Homolog of NCBI NO: 17988062 NR Description: FRUCTOKINASE [Brucella melitensis]
  misc_feature (1)..(118): Homolog of NCBI NO: 15963924 NR Description: PUTATIVE SUGAR KINASE PROTEIN [Sinorhizobium
  misc_feature (1)..(126): Homolog of NCBI NO: 29348208 NR Description: putative PfkB family carbohydrate kinase
  misc_feature (1)..(145): Homolog of NCBI NO: 39579184 NR Description: putative ribokinase [Triticum turgidum subsp.
  misc_feature (1)..(145): Homolog of NCBI NO: 34894090 NR Description: P0005A05.10 [Oryza sativa (japonica
  misc_feature (1)..(145): Homolog of NCBI NO: 15223593 NR Description: ribokinase, putative; protein id: At1g19600.1

SEQ ID NO: 32113 - DNA, 950 bp, Arabidopsis thaliana; identical to SEQ ID NO: 28523
  misc_feature (1)..(950): Ceres Seq. ID no. 12579476
  misc_feature: MA Experiment ID: 108434 Result: Up-regulated in Transcription
  misc_feature: MA Experiment 108434 PARAMETER Experiment Name: At_Root_Tips_cDNA_P Parameter: Tissue Value: Root Tips
  misc_feature: MA Experiment ID: 108463 Result: Down-regulated in Transcription
  misc_feature: MA Experiment 108463 PARAMETER Experiment Name: At_Germinating_Seeds_cDNA_P Parameter: Age (day) Value: 3 vs. 0
  misc_feature: MA Experiment 108463 PARAMETER Experiment Name: At_Germinating_Seeds_cDNA_P Parameter: Tissue Value: Germinating Seeds
  misc_feature: MA Experiment ID: 108464 Result: Down-regulated in Transcription
  misc_feature: MA Experiment 108464 PARAMETER Experiment Name: At_Germinating_Seeds_cDNA_P Parameter: Age (day) Value: 4 vs. 0
  misc_feature: MA Experiment 108464 PARAMETER Experiment Name: At_Germinating_Seeds_cDNA_P Parameter: Tissue Value: Germinating Seeds
  misc_feature: MA Experiment ID: 20000068 Result: Up-regulated in Transcription
  misc_feature: MA Experiment ID: 20000113 Result: Down-regulated in Transcription
  misc_feature: MA Experiment 20000113 PARAMETER Experiment Name: At_42deg_Heat_cDNA_P Parameter: Temperature (deg C) Value: 42 vs. 22
  misc_feature: MA Experiment 20000113 PARAMETER Experiment Name: At_42deg_Heat_cDNA_P Parameter: Timepoint (hr) Value: 8
  misc_feature: MA Experiment 20000113 PARAMETER Experiment Name: At_42deg_Heat_cDNA_P Parameter: Tissue Value: Aerial

SEQ ID NO: 32114 - protein, 66 aa, Arabidopsis thaliana; identical to SEQ ID NO: 28524
  peptide (1)..(66): Ceres Seq. ID no. 12579477
  misc_feature (1)..(50): Homolog of NCBI NO: 15234188 NR Description: hypothetical protein; protein id: At4g19240.1

SEQ ID NO: 32115 - protein, 57 aa, Arabidopsis thaliana; identical to SEQ ID NO: 28525
  peptide (1)..(57): Ceres Seq. ID no. 12579478
  misc_feature (1)..(29): Homolog of NCBI NO: 15234188 NR Description: hypothetical protein; protein id: At4g19240.1

SEQ ID NO: 32116 - protein, 46 aa, Arabidopsis thaliana; identical to SEQ ID NO: 28526
  peptide (1)..(46): Ceres Seq. ID no. 12579479

SEQ ID NO: 32117 - DNA, 1076 bp, Arabidopsis thaliana; identical to SEQ ID NO: 28527
  misc_feature (1)..(1076): Ceres Seq. ID no. 12421106
  misc_feature: MA Experiment ID: 108464 Result: Down-regulated in Transcription
  misc_feature: MA Experiment 108464 PARAMETER Experiment Name: At_Germinating_Seeds_cDNA_P Parameter: Age (day) Value: 4 vs. 0
  misc_feature: MA Experiment 108464 PARAMETER Experiment Name: At_Germinating_Seeds_cDNA_P Parameter: Tissue Value: Germinating Seeds
  misc_feature: MA Experiment ID: 108473 Result: Down-regulated in Transcription
  misc_feature: MA Experiment 108473 PARAMETER Experiment Name: At_Drought_Flowers_cDNA_P Parameter: Timepoint (hr) Value: 7 d
  misc_feature: MA Experiment 108473 PARAMETER Experiment Name: At_Drought_Flowers_cDNA_P Parameter: Tissue Value: Flower
  misc_feature: MA Experiment 108473 PARAMETER Experiment Name: At_Drought_Flowers_cDNA_P Parameter: Treatment Value: Drought vs. No Drought
  misc_feature: MA Experiment ID: 108572 Result: Down-regulated in Transcription
  misc_feature: MA Experiment 108572 PARAMETER Experiment Name: At_Drought_cDNA_P Parameter: Timepoint (hr) Value: 1
  misc_feature: MA Experiment 108572 PARAMETER Experiment Name: At_Drought_cDNA_P Parameter: Tissue Value: Aerial
  misc_feature: MA Experiment 108572 PARAMETER Experiment Name: At_Drought_cDNA_P Parameter: Treatment Value: Drought vs. No Drought
  misc_feature: MA Experiment ID: 108573 Result: Down-regulated in Transcription
  misc_feature: MA Experiment 108573 PARAMETER Experiment Name: At_Drought_cDNA_P Parameter: Timepoint (hr) Value: 6
  misc_feature: MA Experiment 108573 PARAMETER Experiment Name: At_Drought_cDNA_P Parameter: Tissue Value: Aerial
  misc_feature: MA Experiment 108573 PARAMETER Experiment Name: At_Drought_cDNA_P Parameter: Treatment Value: Drought vs. No Drought
  misc_feature: MA Experiment ID: 108577 Result: Down-regulated in Transcription
  misc_feature: MA Experiment 108577 PARAMETER Experiment Name: At_42deg_Heat_cDNA_P Parameter: Temperature (deg C) Value: 42 vs. 22
  misc_feature: MA Experiment 108577 PARAMETER Experiment Name: At_42deg_Heat_cDNA_P Parameter: Timepoint (hr) Value: 6
  misc_feature: MA Experiment 108577 PARAMETER Experiment Name: At_42deg_Heat_cDNA_P Parameter: Tissue Value: Aerial
  misc_feature: MA Experiment ID: 108668 Result: Down-regulated in Transcription
  misc_feature: MA Experiment 108668 PARAMETER Experiment Name: At_2mM_SA_cDNA_P Parameter: Plant Line Value: WS
  misc_feature: MA Experiment 108668 PARAMETER Experiment Name: At_2mM_SA_cDNA_P Parameter: Timepoint (hr) Value: 6
  misc_feature: MA Experiment 108668 PARAMETER Experiment Name: At_2mM_SA_cDNA_P Parameter: Treatment Value: 2mM SA vs. No Treatment
  misc_feature: MA Experiment ID: 20000069 Result: Down-regulated in Transcription
  misc_feature: MA Experiment 20000069 PARAMETER Experiment Name: At_100uM_ABA_Mutants_cDNA_P Parameter: Plant Line Value: CS23
  misc_feature: MA Experiment 20000069 PARAMETER Experiment Name: At_100uM_ABA_Mutants_cDNA_P Parameter: Timepoint (hr) Value: 6
  misc_feature: MA Experiment 20000069 PARAMETER Experiment Name: At_100uM_ABA_Mutants_cDNA_P Parameter: Tissue Value: Aerial
  misc_feature: MA Experiment 20000069 PARAMETER Experiment Name: At_100uM_ABA_Mutants_cDNA_P Parameter: Treatment Value: 100uM ABA vs. No Treatment
  misc_feature: MA Experiment ID: 20000111 Result: Down-regulated in Transcription
  misc_feature: MA Experiment 20000111 PARAMETER Experiment Name: At_42deg_Heat_cDNA_P Parameter: Temperature (deg C) Value: 42 vs. 22
  misc_feature: MA Experiment 20000111 PARAMETER Experiment Name: At_42deg_Heat_cDNA_P Parameter: Timepoint (hr) Value: 6
  misc_feature: MA Experiment 20000111 PARAMETER Experiment Name: At_42deg_Heat_cDNA_P Parameter: Tissue Value: Aerial
  misc_feature: MA Experiment ID: 20000173 Result: Down-regulated in Transcription
  misc_feature: MA Experiment 20000173 PARAMETER Experiment Name: At_42deg_Heat_P Parameter: Age (day) Value: 14
  misc_feature: MA Experiment 20000173 PARAMETER Experiment Name: At_42deg_Heat_P Parameter: Organism Value: A. thaliana
  misc_feature: MA Experiment 20000173 PARAMETER Experiment Name: At_42deg_Heat_P Parameter: Plant Line Value: WS
  misc_feature: MA Experiment 20000173 PARAMETER Experiment Name: At_42deg_Heat_P Parameter: Temperature (deg C) Value: 42 vs. 22
  misc_feature: MA Experiment 20000173 PARAMETER Experiment Name: At_42deg_Heat_P Parameter: Timepoint (hr) Value: 6
  misc_feature: MA Experiment 20000173 PARAMETER Experiment Name: At_42deg_Heat_P Parameter: Tissue Value: Aerial
  misc_feature: MA Experiment ID: 20000179 Result: Up-regulated in Transcription
  misc_feature: MA Experiment 20000179 PARAMETER Experiment Name: At_Germinating_Seeds_P Parameter: Age (hr) Value: 6 vs. 0
  misc_feature: MA Experiment 20000179 PARAMETER Experiment Name: At_Germinating_Seeds_P Parameter: Tissue Value: Germinating Seeds
  misc_feature: MA Experiment ID: 20000180 Result: Up-regulated in Transcription
  misc_feature: MA Experiment 20000180 PARAMETER Experiment Name: At_Germinating_Seeds_P Parameter: Age (hr) Value: 24 vs. 0
  misc_feature: MA Experiment 20000180 PARAMETER Experiment Name: At_Germinating_Seeds_P Parameter: Tissue Value: Germinating Seeds
  misc_feature: MA Experiment ID: 20000182 Result: Down-regulated in Transcription
  misc_feature: MA Experiment 20000182 PARAMETER Experiment Name: At_2mM_SA_P Parameter: Age (day) Value: 14
  misc_feature: MA Experiment 20000182 PARAMETER Experiment Name: At_2mM_SA_P Parameter: Organism Value: A. thaliana
  misc_feature: MA Experiment 20000182 PARAMETER Experiment Name: At_2mM_SA_P Parameter: Plant Line Value: WS
  misc_feature: MA Experiment 20000182 PARAMETER Experiment Name: At_2mM_SA_P Parameter: Timepoint (hr) Value: 6
  misc_feature: MA Experiment 20000182 PARAMETER Experiment Name: At_2mM_SA_P Parameter: Tissue Value: Aerial
  misc_feature: MA Experiment 20000182 PARAMETER Experiment Name: At_2mM_SA_P Parameter: Treatment Value: 2mM SA vs. No Treatment
  misc_feature: MA Experiment ID: 20000185 Result: Down-regulated in Transcription
  misc_feature: MA Experiment 20000185 PARAMETER Experiment Name: At_Roots__P Parameter: Age (day) Value: 7 vs. 21
  misc_feature: MA Experiment 20000185 PARAMETER Experiment Name: At_Roots__P Parameter: Organism Value: A. thaliana
  misc_feature: MA Experiment 20000185 PARAMETER Experiment Name: At_Roots__P Parameter: Tissue Value: Roots vs. Whole Plant
  misc_feature: MA Experiment ID: 20000224 Result: Down-regulated in Transcription
  misc_feature: MA Experiment ID: 20000227 Result: Up-regulated in Transcription
  misc_feature: MA Experiment 20000227 PARAMETER Experiment Name: At_Root-Tips-vs-Tops_P Parameter: Tissue Value: Root Tips vs. Root Tops
  misc_feature: MA Experiment ID: 20000268 Result: Down-regulated in Transcription
  misc_feature: MA Experiment 20000268 PARAMETER Experiment Name: At_100mM_NaCl__P Parameter: Age (day) Value: 14
  misc_feature: MA Experiment 20000268 PARAMETER Experiment Name: At_100mM_NaCl__P Parameter: Organism Value: A. thaliana
  misc_feature: MA Experiment 20000268 PARAMETER Experiment Name: At_100mM_NaCl__P Parameter: Plant Line Value: WS
  misc_feature: MA Experiment 20000268 PARAMETER Experiment Name: At_100mM_NaCl__P Parameter: Timepoint (hr) Value: 6
  misc_feature: MA Experiment 20000268 PARAMETER Experiment Name: At_100mM_NaCl__P Parameter: Tissue Value: Whole Plant
  misc_feature: MA Experiment 20000268 PARAMETER Experiment Name: At_100mM_NaCl__P Parameter: Treatment Value: 100mM NaCl vs. No Treatment
  misc_feature: MA Experiment ID: 20000436 Result: Down-regulated in Transcription
  misc_feature: MA Experiment 20000436 PARAMETER Experiment Name: At_Drought_P Parameter: Age (day) Value: 7
  misc_feature: MA Experiment 20000436 PARAMETER Experiment Name: At_Drought_P Parameter: Organism Value: A. thaliana
  misc_feature: MA Experiment 20000436 PARAMETER Experiment Name: At_Drought_P Parameter: Plant Line Value: WS
  misc_feature: MA Experiment 20000436 PARAMETER Experiment Name: At_Drought_P Parameter: Timepoint (hr) Value: 12
  misc_feature: MA Experiment 20000436 PARAMETER Experiment Name: At_Drought_P Parameter: Tissue Value: Whole Plant
  misc_feature: MA Experiment 20000436 PARAMETER Experiment Name: At_Drought_P Parameter: Treatment Value: Drought vs. No Drought
  misc_feature: MA Experiment ID: 20000437 Result: Down-regulated in Transcription
  misc_feature: MA Experiment 20000437 PARAMETER Experiment Name: At_Drought_P Parameter: Age (day) Value: 8
  misc_feature: MA Experiment 20000437 PARAMETER Experiment Name: At_Drought_P Parameter: Organism Value: A. thaliana
  misc_feature: MA Experiment 20000437 PARAMETER Experiment Name: At_Drought_P Parameter: Plant Line Value: WS
  misc_feature: MA Experiment 20000437 PARAMETER Experiment Name: At_Drought_P Parameter: Timepoint (hr) Value: 24
  misc_feature: MA Experiment 20000437 PARAMETER Experiment Name: At_Drought_P Parameter: Tissue Value: Whole Plant
  misc_feature: MA Experiment 20000437 PARAMETER Experiment Name: At_Drought_P Parameter: Treatment Value: Drought vs. No Drought
  misc_feature: MA Experiment ID: 20000439 Result: Down-regulated in Transcription
  misc_feature: MA Experiment 20000439 PARAMETER Experiment Name: At_Roots__P Parameter: Age (day) Value: 14 vs. 21
  misc_feature: MA Experiment 20000439 PARAMETER Experiment Name: At_Roots__P Parameter: Organism Value: A. thaliana
  misc_feature: MA Experiment 20000439 PARAMETER Experiment Name: At_Roots__P Parameter: Tissue Value: Roots vs. Whole Plant
  misc_feature: MA Experiment ID: 20000451 Result: Down-regulated in Transcription
  misc_feature: MA Experiment 20000451 PARAMETER Experiment Name: At_CS6879_Shoots-Roots_P Parameter: Age (day) Value: 14
  misc_feature: MA Experiment 20000451 PARAMETER Experiment Name: At_CS6879_Shoots-Roots_P Parameter: Organism Value: A. thaliana
  misc_feature: MA Experiment 20000451 PARAMETER Experiment Name: At_CS6879_Shoots-Roots_P Parameter: Plant Line Value: CS6879 vs. WS
  misc_feature: MA Experiment 20000451 PARAMETER Experiment Name: At_CS6879_Shoots-Roots_P Parameter: Tissue Value: Roots
  misc_feature: MA Experiment ID: 20000452 Result: Down-regulated in Transcription
  misc_feature: MA Experiment 20000452 PARAMETER Experiment Name: At_CS6879_Shoots-Roots_P Parameter: Age (day) Value: 14
  misc_feature: MA Experiment 20000452 PARAMETER Experiment Name: At_CS6879_Shoots-Roots_P Parameter: Organism Value: A. thaliana
  misc_feature: MA Experiment 20000452 PARAMETER Experiment Name: At_CS6879_Shoots-Roots_P Parameter: Plant Line Value: CS6879 vs. WS
  misc_feature: MA Experiment 20000452 PARAMETER Experiment Name: At_CS6879_Shoots-Roots_P Parameter: Tissue Value: Shoots
  misc_feature: MA Experiment ID: 20000496 Result: Up-regulated in Transcription
  misc_feature: MA Experiment 20000496 PARAMETER Experiment Name: At_Guard_Cells_P Parameter: Harvest Date Value: 7/19/2002
  misc_feature: MA Experiment 20000496 PARAMETER Experiment Name: At_Guard_Cells_P Parameter: Organism Value: Canola
  misc_feature: MA Experiment 20000496 PARAMETER Experiment Name: At_Guard_Cells_P Parameter: Tissue Value: Guard Cells vs. Leaves
  misc_feature: MA Experiment ID: 20001554 Result: Down-regulated in Transcription
  misc_feature: MA Experiment 20001554 PARAMETER Experiment Name: At_Drought_Soil_Dry_P Parameter: Age (day) Value: 21
  misc_feature: MA Experiment 20001554 PARAMETER Experiment Name: At_Drought_Soil_Dry_P Parameter: Organism Value: A. thaliana
  misc_feature: MA Experiment 20001554 PARAMETER Experiment Name: At_Drought_Soil_Dry_P Parameter: Plant Line Value: WS
  misc_feature: MA Experiment 20001554 PARAMETER Experiment Name: At_Drought_Soil_Dry_P Parameter: Post Timepoint (hr) Value: None
  misc_feature: MA Experiment 20001554 PARAMETER Experiment Name: At_Drought_Soil_Dry_P Parameter: Post-Treatment Value: None
  misc_feature: MA Experiment 20001554 PARAMETER Experiment Name: At_Drought_Soil_Dry_P Parameter: Timepoint (day) Value: 7
  misc_feature: MA Experiment 20001554 PARAMETER Experiment Name: At_Drought_Soil_Dry_P Parameter: Treatment Value: Drought vs. No Drought
  misc_feature: MA Experiment ID: 20001556 Result: Down-regulated in Transcription
  misc_feature: MA Experiment 20001556 PARAMETER Experiment Name: At_Drought_Soil_Dry_P Parameter: Age (day) Value: 26
  misc_feature: MA Experiment 20001556 PARAMETER Experiment Name: At_Drought_Soil_Dry_P Parameter: Organism Value: A. thaliana
  misc_feature: MA Experiment 20001556 PARAMETER Experiment Name: At_Drought_Soil_Dry_P Parameter: Plant Line Value: WS
  misc_feature: MA Experiment 20001556 PARAMETER Experiment Name: At_Drought_Soil_Dry_P Parameter: Post Timepoint (hr) Value: None
  misc_feature: MA Experiment 20001556 PARAMETER Experiment Name: At_Drought_Soil_Dry_P Parameter: Post-Treatment Value: None
  misc_feature: MA Experiment 20001556 PARAMETER Experiment Name: At_Drought_Soil_Dry_P Parameter: Timepoint (day) Value: 12
  misc_feature: MA Experiment 20001556 PARAMETER Experiment Name: At_Drought_Soil_Dry_P Parameter: Treatment Value: Drought vs. No Drought
  misc_feature: MA Experiment ID: 20001557 Result: Up-regulated in Transcription
  misc_feature: MA Experiment 20001557 PARAMETER Experiment Name: At_Drought_Soil_Dry_P Parameter: Age (day) Value: 27
  misc_feature: MA Experiment 20001557 PARAMETER Experiment Name: At_Drought_Soil_Dry_P Parameter: Organism Value: A. thaliana
  misc_feature: MA Experiment 20001557 PARAMETER Experiment Name: At_Drought_Soil_Dry_P Parameter: Plant Line Value: WS
  misc_feature: MA Experiment 20001557 PARAMETER Experiment Name: At_Drought_Soil_Dry_P Parameter: Post Timepoint (hr) Value: 3
  misc_feature: MA Experiment 20001557 PARAMETER Experiment Name: At_Drought_Soil_Dry_P Parameter: Post-Treatment Value: Re-Water vs. No Drought
  misc_feature: MA Experiment 20001557 PARAMETER Experiment Name: At_Drought_Soil_Dry_P Parameter: Timepoint (day) Value: 13
  misc_feature: MA Experiment 20001557 PARAMETER Experiment Name: At_Drought_Soil_Dry_P Parameter: Treatment Value: Drought vs. No Drought
  misc_feature: MA Experiment ID: 20001558 Result: Up-regulated in Transcription
  misc_feature: MA Experiment 20001558 PARAMETER Experiment Name: At_Drought_Soil_Dry_P Parameter: Age (day) Value: 27
  misc_feature: MA Experiment 20001558 PARAMETER Experiment Name: At_Drought_Soil_Dry_P Parameter: Organism Value: A. thaliana
  misc_feature: MA Experiment 20001558 PARAMETER Experiment Name: At_Drought_Soil_Dry_P Parameter: Plant Line Value: WS
  misc_feature: MA Experiment 20001558 PARAMETER Experiment Name: At_Drought_Soil_Dry_P Parameter: Post Timepoint (hr) Value: 6
  misc_feature: MA Experiment 20001558 PARAMETER Experiment Name: At_Drought_Soil_Dry_P Parameter: Post-Treatment Value: Re-Water vs. No Drought
  misc_feature: MA Experiment 20001558 PARAMETER Experiment Name: At_Drought_Soil_Dry_P Parameter: Timepoint (day) Value: 13
  misc_feature: MA Experiment 20001558 PARAMETER Experiment Name: At_Drought_Soil_Dry_P Parameter: Treatment Value: Drought vs. No Drought
  misc_feature: MA Experiment ID: 20001560 Result: Up-regulated in Transcription
  misc_feature: MA Experiment 20001560 PARAMETER Experiment Name: At_Drought_Soil_Dry_P Parameter: Age (day) Value: 28
  misc_feature: MA Experiment 20001560 PARAMETER Experiment Name: At_Drought_Soil_Dry_P Parameter: Organism Value: A. thaliana
  misc_feature: MA Experiment 20001560 PARAMETER Experiment Name: At_Drought_Soil_Dry_P Parameter: Plant Line Value: WS
  misc_feature: MA Experiment 20001560 PARAMETER Experiment Name: At_Drought_Soil_Dry_P Parameter: Post Timepoint (hr) Value: None
  misc_feature: MA Experiment 20001560 PARAMETER Experiment Name: At_Drought_Soil_Dry_P Parameter: Post-Treatment Value: None
  misc_feature: MA Experiment 20001560 PARAMETER Experiment Name: At_Drought_Soil_Dry_P Parameter: Timepoint (day) Value: 14
  misc_feature: MA Experiment 20001560 PARAMETER Experiment Name: At_Drought_Soil_Dry_P Parameter: Treatment Value: Drought vs. No Drought
  misc_feature: MA Experiment ID: 20001910 Result: Down-regulated in Transcription
  misc_feature: MA Experiment 20001910 PARAMETER Experiment Name: At_Drought_Reproduction_P Parameter: Age (day) Value: 37
  misc_feature: MA Experiment 20001910 PARAMETER Experiment Name: At_Drought_Reproduction_P Parameter: Organism Value: A. thaliana
  misc_feature: MA Experiment 20001910 PARAMETER Experiment Name: At_Drought_Reproduction_P Parameter: Plant Line Value: WS
  misc_feature: MA Experiment 20001910 PARAMETER Experiment Name: At_Drought_Reproduction_P Parameter: Timepoint (day) Value: 7
  misc_feature: MA Experiment 20001910 PARAMETER Experiment Name: At_Drought_Reproduction_P Parameter: Tissue Value: Flowers
  misc_feature: MA Experiment 20001910 PARAMETER Experiment Name: At_Drought_Reproduction_P Parameter: Treatment Value: Drought vs. No Drought
  misc_feature: MA Experiment ID: 20001911 Result: Down-regulated in Transcription
  misc_feature: MA Experiment 20001911 PARAMETER Experiment Name: At_Drought_Reproduction_P Parameter: Age (day) Value: 40
  misc_feature: MA Experiment 20001911 PARAMETER Experiment Name: At_Drought_Reproduction_P Parameter: Organism Value: A. thaliana
  misc_feature: MA Experiment 20001911 PARAMETER Experiment Name: At_Drought_Reproduction_P Parameter: Plant Line Value: WS
  misc_feature: MA Experiment 20001911 PARAMETER Experiment Name: At_Drought_Reproduction_P Parameter: Timepoint (day) Value: 10
  misc_feature: MA Experiment 20001911 PARAMETER Experiment Name: At_Drought_Reproduction_P Parameter: Tissue Value: Flowers
  misc_feature: MA Experiment 20001911 PARAMETER Experiment Name: At_Drought_Reproduction_P Parameter: Treatment Value: Drought vs. No Drought

SEQ ID NO: 32118 - protein, 291 aa, Arabidopsis thaliana; identical to SEQ ID NO: 28528
  peptide (1)..(291): Ceres Seq. ID no. 12421107
  misc_feature (27)..(208): Pfam Name: Glycosyl hydrolases family 16 Pfam Description: Glycosyl hydrolases family 16
  misc_feature (9)..(286): Homolog of NCBI NO: 22947852 NR Description: xyloglucan endotransglycosylase [Malus x
  misc_feature (9)..(287): Homolog of NCBI NO: 8886865 NR Description: xyloglucan endotransglycosylase XET1 [Asparagus
  misc_feature (8)..(286): Homolog of NCBI NO: 8886867 NR Description: xyloglucan endotransglycosylase XET2 [Asparagus
  misc_feature (9)..(288): Homolog of NCBI NO: 543905 NR Description: Brassinosteroid-regulated protein BRU1 precursor
  misc_feature (8)..(291): Homolog of NCBI NO: 15236412 NR Description: xyloglucan endotransglycosylase (XTR7)
  misc_feature (8)..(291): Homolog of NCBI NO: 38605153 NR Description: Probable xyloglucan
  misc_feature (1)..(291): Homolog of NCBI NO: 18403867 NR Description: xyloglucan endotransglycosylase, putative
  misc_feature (1)..(291): Homolog of NCBI NO: 21536689 NR Description: xyloglucan endotransglycosylase, putative

SEQ ID NO: 32119 - protein, 281 aa, Arabidopsis thaliana; identical to SEQ ID NO: 28529
  peptide (1)..(281): Ceres Seq. ID no. 12421108
  misc_feature (17)..(198): Pfam Name: Glycosyl hydrolases family 16 Pfam Description: Glycosyl hydrolases family 16
  misc_feature (1)..(276): Homolog of NCBI NO: 22947852 NR Description: xyloglucan endotransglycosylase [Malus x
  misc_feature (1)..(277): Homolog of NCBI NO: 8886865 NR Description: xyloglucan endotransglycosylase XET1 [Asparagus
  misc_feature (1)..(276): Homolog of NCBI NO: 8886867 NR Description: xyloglucan endotransglycosylase XET2 [Asparagus
  misc_feature (1)..(278): Homolog of NCBI NO: 543905 NR Description: Brassinosteroid-regulated protein BRU1 precursor
  misc_feature (1)..(281): Homolog of NCBI NO: 15236412 NR Description: xyloglucan endotransglycosylase (XTR7)
  misc_feature (1)..(281): Homolog of NCBI NO: 38605153 NR Description: Probable xyloglucan
  misc_feature (1)..(281): Homolog of NCBI NO: 18403867 NR Description: xyloglucan endotransglycosylase, putative
  misc_feature (1)..(281): Homolog of NCBI NO: 21536689 NR Description: xyloglucan endotransglycosylase, putative

SEQ ID NO: 32120 - protein, 274 aa, Arabidopsis thaliana; identical to SEQ ID NO: 28530
  peptide (1)..(274): Ceres Seq. ID no. 12421109
  misc_feature (10)..(191): Pfam Name: Glycosyl hydrolases family 16 Pfam Description: Glycosyl hydrolases family 16
  misc_feature (1)..(269): Homolog of NCBI NO: 22947852 NR Description: xyloglucan endotransglycosylase [Malus x
  misc_feature (1)..(270): Homolog of NCBI NO: 8886865 NR Description: xyloglucan endotransglycosylase XET1 [Asparagus
  misc_feature (1)..(269): Homolog of NCBI NO: 8886867 NR Description: xyloglucan endotransglycosylase XET2 [Asparagus
  misc_feature (1)..(271): Homolog of NCBI NO: 543905 NR Description: Brassinosteroid-regulated protein BRU1 precursor
  misc_feature (1)..(274): Homolog of NCBI NO: 15236412 NR Description: xyloglucan endotransglycosylase (XTR7)
  misc_feature (1)..(274): Homolog of NCBI NO: 38605153 NR Description: Probable xyloglucan
  misc_feature (1)..(274): Homolog of NCBI NO: 18403867 NR Description: xyloglucan endotransglycosylase, putative
  misc_feature (1)..(274): Homolog of NCBI NO: 21536689 NR Description: xyloglucan endotransglycosylase, putative

SEQ ID NO: 32121 - DNA, 743 bp, Arabidopsis thaliana; identical to SEQ ID NO: 28531
  misc_feature (1)..(743): Ceres Seq. ID no. 12338308
  misc_feature: MA Experiment ID: 108461 Result: Up-regulated in Transcription
  misc_feature: MA Experiment 108461 PARAMETER Experiment Name: At_Germinating_Seeds_cDNA_P Parameter: Age (day) Value: 1 vs. 0
  misc_feature: MA Experiment 108461 PARAMETER Experiment Name: At_Germinating_Seeds_cDNA_P Parameter: Tissue Value: Germinating Seeds
  misc_feature: MA Experiment ID: 108488 Result: Down-regulated in Transcription
  misc_feature: MA Experiment ID: 20000179 Result: Up-regulated in Transcription
  misc_feature: MA Experiment 20000179 PARAMETER Experiment Name: At_Germinating_Seeds_P Parameter: Age (hr) Value: 6 vs. 0
  misc_feature: MA Experiment 20000179 PARAMETER Experiment Name: At_Germinating_Seeds_P Parameter: Tissue Value: Germinating Seeds
  misc_feature: MA Experiment ID: 20000180 Result: Up-regulated in Transcription
  misc_feature: MA Experiment 20000180 PARAMETER Experiment Name: At_Germinating_Seeds_P Parameter: Age (hr) Value: 24 vs. 0
  misc_feature: MA Experiment 20000180 PARAMETER Experiment Name: At_Germinating_Seeds_P Parameter: Tissue Value: Germinating Seeds
  misc_feature: MA Experiment ID: 20000214 Result: Down-regulated in Transcription
  misc_feature: MA Experiment 20000214 PARAMETER Experiment Name: At_4deg_Cold_P Parameter: Timepoint (hr) Value: 6
  misc_feature: MA Experiment ID: 20000224 Result: Up-regulated in Transcription
  misc_feature: MA Experiment ID: 20001558 Result: Down-regulated in Transcription
  misc_feature: MA Experiment 20001558 PARAMETER Experiment Name: At_Drought_Soil_Dry_P Parameter: Age (day) Value: 27
  misc_feature: MA Experiment 20001558 PARAMETER Experiment Name: At_Drought_Soil_Dry_P Parameter: Organism Value: A. thaliana
  misc_feature: MA Experiment 20001558 PARAMETER Experiment Name: At_Drought_Soil_Dry_P Parameter: Plant Line Value: WS
  misc_feature: MA Experiment 20001558 PARAMETER Experiment Name: At_Drought_Soil_Dry_P Parameter: Post Timepoint (hr) Value: 6
  misc_feature: MA Experiment 20001558 PARAMETER Experiment Name: At_Drought_Soil_Dry_P Parameter: Post-Treatment Value: Re-Water vs. No Drought
  misc_feature: MA Experiment 20001558 PARAMETER Experiment Name: At_Drought_Soil_Dry_P Parameter: Timepoint (day) Value: 13
  misc_feature: MA Experiment 20001558 PARAMETER Experiment Name: At_Drought_Soil_Dry_P Parameter: Treatment Value: Drought vs. No Drought
  misc_feature: Phenotype: WHOLE PLANT Other
  misc_feature: Phenotype: INFLORESCENCE Height-Short
  misc_feature: Phenotype: FERTILITY Fertility-Reduced
  misc_feature: Phenotype: FERTILITY Fertility-Reduced
  misc_feature: Phenotype: FERTILITY Fertility-Reduced

SEQ ID NO: 32122 - protein, 137 aa, Arabidopsis thaliana; identical to SEQ ID NO: 28532
  peptide (1)..(137): Ceres Seq. ID no. 12338309
  misc_feature (17)..(104): Homolog of NCBI NO: 26453128 NR Description: unknown protein [Arabidopsis thaliana]
  misc_feature (17)..(104): Homolog of NCBI NO: 21592601 NR Description: unknown [Arabidopsis thaliana]
  misc_feature (17)..(104): Homolog of NCBI NO: 18414599 NR Description: Expressed protein
  misc_feature (38)..(99): Homolog of NCBI NO: 10176961 NR Description: gene_id:MHJ24.11~unknown protein [Arabidopsis
  misc_feature (35)..(114): Homolog of NCBI NO: 100536 NR Description: hypothetical protein - swollen duckweed
  misc_feature (35)..(102): Homolog of NCBI NO: 100535 NR Description: hypothetical protein - swollen duckweed
  misc_feature (1)..(99): Homolog of NCBI NO: 18424791 NR Description: expressed protein
  misc_feature (30)..(133): Homolog of NCBI NO: 4164473 NR Description: negatively light-regulated protein [Vernicia
  misc_feature (1)..(102): Homolog of NCBI NO: 34902768 NR Description: unnamed protein product [Oryza sativa (japonica
  misc_feature (1)..(137): Homolog of NCBI NO: 18409295 NR Description: expressed protein

SEQ ID NO: 32123 - protein, 115 aa, Arabidopsis thaliana; identical to SEQ ID NO: 28533
  peptide (1)..(115): Ceres Seq. ID no. 12338310
  misc_feature (1)..(82): Homolog of NCBI NO: 26453128 NR Description: unknown protein [Arabidopsis thaliana]
  misc_feature (1)..(82): Homolog of NCBI NO: 21592601 NR Description: unknown [Arabidopsis thaliana]
  misc_feature (1)..(82): Homolog of NCBI NO: 18414599 NR Description: Expressed protein
  misc_feature (16)..(77): Homolog of NCBI NO: 10176961 NR Description: gene_id:MHJ24.11~unknown protein [Arabidopsis
  misc_feature (13)..(92): Homolog of NCBI NO: 100536 NR Description: hypothetical protein - swollen duckweed
  misc_feature (13)..(80): Homolog of NCBI NO: 100535 NR Description: hypothetical protein - swollen duckweed
  misc_feature (1)..(77): Homolog of NCBI NO: 18424791 NR Description: expressed protein
  misc_feature (8)..(111): Homolog of NCBI NO: 4164473 NR Description: negatively light-regulated protein [Vernicia
  misc_feature (1)..(80): Homolog of NCBI NO: 34902768 NR Description: unnamed protein product [Oryza sativa (japonica
  misc_feature (1)..(115): Homolog of NCBI NO: 18409295 NR Description: expressed protein

SEQ ID NO: 32124 - DNA, 731 bp, Arabidopsis thaliana; identical to SEQ ID NO: 28534
  misc_feature (1)..(731): Ceres Seq. ID no. 12333813
  misc_feature: MA Experiment ID: 108434 Result: Up-regulated in Transcription
  misc_feature: MA Experiment 108434 PARAMETER Experiment Name: At_Root_Tips_cDNA_P Parameter: Tissue Value: Root Tips
  misc_feature: MA Experiment ID: 108462 Result: Up-regulated in Transcription
  misc_feature: MA Experiment 108462 PARAMETER Experiment Name: At_Germinating_Seeds_cDNA_P Parameter: Age (day) Value: 2 vs. 0
  misc_feature: MA Experiment 108462 PARAMETER Experiment Name: At_Germinating_Seeds_cDNA_P Parameter: Tissue Value: Germinating Seeds
  misc_feature: MA Experiment ID: 20000111 Result: Down-regulated in Transcription
  misc_feature: MA Experiment 20000111 PARAMETER Experiment Name: At_42deg_Heat_cDNA_P Parameter: Temperature (deg C) Value: 42 vs. 22
  misc_feature: MA Experiment 20000111 PARAMETER Experiment Name: At_42deg_Heat_cDNA_P Parameter: Timepoint (hr) Value: 6
  misc_feature: MA Experiment 20000111 PARAMETER Experiment Name: At_42deg_Heat_cDNA_P Parameter: Tissue Value: Aerial
  misc_feature: MA Experiment ID: 20000113 Result: Down-regulated in Transcription
  misc_feature: MA Experiment 20000113 PARAMETER Experiment Name: At_42deg_Heat_cDNA_P Parameter: Temperature (deg C) Value: 42 vs. 22
  misc_feature: MA Experiment 20000113 PARAMETER Experiment Name: At_42deg_Heat_cDNA_P Parameter: Timepoint (hr) Value: 8
  misc_feature: MA Experiment 20000113 PARAMETER Experiment Name: At_42deg_Heat_cDNA_P Parameter: Tissue Value: Aerial
  misc_feature: MA Experiment ID: 20000171 Result: Down-regulated in Transcription
  misc_feature: MA Experiment 20000171 PARAMETER Experiment Name: At_42deg_Heat_P Parameter: Age (day) Value: 14
  misc_feature: MA Experiment 20000171 PARAMETER Experiment Name: At_42deg_Heat_P Parameter: Organism Value: A. thaliana
  misc_feature: MA Experiment 20000171 PARAMETER Experiment Name: At_42deg_Heat_P Parameter: Plant Line Value: WS
  misc_feature: MA Experiment 20000171 PARAMETER Experiment Name: At_42deg_Heat_P Parameter: Temperature (deg C) Value: 42 vs. 22
  misc_feature: MA Experiment 20000171 PARAMETER Experiment Name: At_42deg_Heat_P Parameter: Timepoint (hr) Value: 1
  misc_feature: MA Experiment 20000171 PARAMETER Experiment Name: At_42deg_Heat_P Parameter: Tissue Value: Aerial
  misc_feature: MA Experiment ID: 20000173 Result: Down-regulated in Transcription
  misc_feature: MA Experiment 20000173 PARAMETER Experiment Name: At_42deg_Heat_P Parameter: Age (day) Value: 14
  misc_feature: MA Experiment 20000173 PARAMETER Experiment Name: At_42deg_Heat_P Parameter: Organism Value: A. thaliana
  misc_feature: MA Experiment 20000173 PARAMETER Experiment Name: At_42deg_Heat_P Parameter: Plant Line Value: WS
  misc_feature: MA Experiment 20000173 PARAMETER Experiment Name: At_42deg_Heat_P Parameter: Temperature (deg C) Value: 42 vs. 22
  misc_feature: MA Experiment 20000173 PARAMETER Experiment Name: At_42deg_Heat_P Parameter: Timepoint (hr) Value: 6
  misc_feature: MA Experiment 20000173 PARAMETER Experiment Name: At_42deg_Heat_P Parameter: Tissue Value: Aerial
  misc_feature: MA Experiment ID: 20000180 Result: Up-regulated in Transcription
  misc_feature: MA Experiment 20000180 PARAMETER Experiment Name: At_Germinating_Seeds_P Parameter: Age (hr) Value: 24 vs. 0
  misc_feature: MA Experiment 20000180 PARAMETER Experiment Name: At_Germinating_Seeds_P Parameter: Tissue Value: Germinating Seeds
  misc_feature: MA Experiment ID: 20000184 Result: Down-regulated in Transcription
  misc_feature: MA Experiment 20000184 PARAMETER Experiment Name: At_Shoots__P Parameter: Age (day) Value: 7
  misc_feature: MA Experiment 20000184 PARAMETER Experiment Name: At_Shoots__P Parameter: Tissue Value: Shoots vs. Whole Plant
  misc_feature: MA Experiment ID: 20000224 Result: Up-regulated in Transcription
  misc_feature: MA Experiment ID: 20000234 Result: Up-regulated in Transcription
  misc_feature: MA Experiment 20000234 PARAMETER Experiment Name: At_Siliques_P Parameter: Age (day) Value: 21
  misc_feature: MA Experiment 20000234 PARAMETER Experiment Name: At_Siliques_P Parameter: Organism Value: A. thaliana
  misc_feature: MA Experiment 20000234 PARAMETER Experiment Name: At_Siliques_P Parameter: Plant Line Value: WS
  misc_feature: MA Experiment 20000234 PARAMETER Experiment Name: At_Siliques_P Parameter: Tissue Value: Less Than 5mm Siliques vs. Whole Plant
  misc_feature: MA Experiment ID: 20000265 Result: Up-regulated in Transcription
  misc_feature: MA Experiment 20000265 PARAMETER Experiment Name: At_Open_Flower_P Parameter: Age (day) Value: 21
  misc_feature: MA Experiment 20000265 PARAMETER Experiment Name: At_Open_Flower_P Parameter: Plant Line Value: WS
  misc_feature: MA Experiment 20000265 PARAMETER Experiment Name: At_Open_Flower_P Parameter: Tissue Value: Closed Flower vs. Whole Plant
  misc_feature: MA Experiment ID: 20000286 Result: Up-regulated in Transcription
  misc_feature: MA Experiment 20000286 PARAMETER Experiment Name: At_Open_Flower_P Parameter: Age (day) Value: 21
  misc_feature: MA Experiment 20000286 PARAMETER Experiment Name: At_Open_Flower_P Parameter: Plant Line Value: WS
  misc_feature: MA Experiment 20000286 PARAMETER Experiment Name: At_Open_Flower_P Parameter: Tissue Value: Half Open vs. Whole Plant
  misc_feature: MA Experiment ID: 20000794 Result: Up-regulated in Transcription
  misc_feature: MA Experiment 20000794 PARAMETER Experiment Name: At_Petals_P Parameter: Age (day) Value: 23-25 days
  misc_feature: MA Experiment 20000794 PARAMETER Experiment Name: At_Petals_P Parameter: Plant Line Value: WS
  misc_feature: MA Experiment 20000794 PARAMETER Experiment Name: At_Petals_P Parameter: Tissue Value: Petals vs. Whole plant

SEQ ID NO: 32125 - protein, 76 aa, Arabidopsis thaliana; identical to SEQ ID NO: 28535
  peptide (1)..(76): Ceres Seq. ID no. 12333814
  misc_feature (1)..(51): Pfam Name: CRAL/TRIO domain Pfam Description: CRAL/TRIO domain
  misc_feature (1)..(76): Homolog of NCBI NO: 30684014 NR Description: SEC14 cytosolic factor, putative [Arabidopsis
  misc_feature (1)..(75): Homolog of NCBI NO: 25402783 NR Description: protein F10B6.22 [imported] - Arabidopsis

SEQ ID NO: 32126 - protein, 63 aa, Arabidopsis thaliana; identical to SEQ ID NO: 28536
  peptide (1)..(63): Ceres Seq. ID no. 12333815
  misc_feature (34)..(57): Homolog of NCBI NO: 25402783 NR Description: protein F10B6.22 [imported] - Arabidopsis

SEQ ID NO: 32127 - protein, 58 aa, Arabidopsis thaliana; identical to SEQ ID NO: 28537
  peptide (1)..(58): Ceres Seq. ID no. 12333816

SEQ ID NO: 32128 - DNA, 681 bp, Arabidopsis thaliana; identical to SEQ ID NO: 28538
  misc_feature (1)..(681): Ceres Seq. ID no. 12389159
  misc_feature: MA Experiment ID: 108434 Result: Down-regulated in Transcription
  misc_feature: MA Experiment 108434 PARAMETER Experiment Name: At_Root_Tips_cDNA_P Parameter: Tissue Value: Root Tips
  misc_feature: MA Experiment ID: 108462 Result: Down-regulated in Transcription
  misc_feature: MA Experiment 108462 PARAMETER Experiment Name: At_Germinating_Seeds_cDNA_P Parameter: Age (day) Value: 2 vs. 0
  misc_feature: MA Experiment 108462 PARAMETER Experiment Name: At_Germinating_Seeds_cDNA_P Parameter: Tissue Value: Germinating Seeds
  misc_feature: MA Experiment ID: 108463 Result: Down-regulated in Transcription
  misc_feature: MA Experiment 108463 PARAMETER Experiment Name: At_Germinating_Seeds_cDNA_P Parameter: Age (day) Value: 3 vs. 0
  misc_feature: MA Experiment 108463 PARAMETER Experiment Name: At_Germinating_Seeds_cDNA_P Parameter: Tissue Value: Germinating Seeds
  misc_feature: MA Experiment ID: 108561 Result: Up-regulated in Transcription
  misc_feature: MA Experiment 108561 PARAMETER Experiment Name: At_100uM_ABA_cDNA_P Parameter: Timepoint (hr) Value: 6
  misc_feature: MA Experiment 108561 PARAMETER Experiment Name: At_100uM_ABA_cDNA_P Parameter: Tissue Value: Aerial
  misc_feature: MA Experiment 108561 PARAMETER Experiment Name: At_100uM_ABA_cDNA_P Parameter: Treatment Value: 100uM ABA vs. No Treatment
  misc_feature: MA Experiment ID: 108576 Result: Up-regulated in Transcription
  misc_feature: MA Experiment 108576 PARAMETER Experiment Name: At_42deg_Heat_cDNA_P Parameter: Temperature (deg C) Value: 42 vs. 22
  misc_feature: MA Experiment 108576 PARAMETER Experiment Name: At_42deg_Heat_cDNA_P Parameter: Timepoint (hr) Value: 1
  misc_feature: MA Experiment 108576 PARAMETER Experiment Name: At_42deg_Heat_cDNA_P Parameter: Tissue Value: Aerial
  misc_feature: MA Experiment ID: 108595 Result: Up-regulated in Transcription
  misc_feature: MA Experiment 108595 PARAMETER Experiment Name: At_Ler-pi_Ovule_cDNA_P Parameter: Plant Line Value: null
  misc_feature: MA Experiment ID: 20000069 Result: Up-regulated in Transcription
  misc_feature: MA Experiment 20000069 PARAMETER Experiment Name: At_100uM_ABA_Mutants_cDNA_P Parameter: Plant Line Value: CS23
  misc_feature: MA Experiment 20000069 PARAMETER Experiment Name: At_100uM_ABA_Mutants_cDNA_P Parameter: Timepoint (hr) Value: 6
  misc_feature: MA Experiment 20000069 PARAMETER Experiment Name: At_100uM_ABA_Mutants_cDNA_P Parameter: Tissue Value: Aerial
  misc_feature: MA Experiment 20000069 PARAMETER Experiment Name: At_100uM_ABA_Mutants_cDNA_P Parameter: Treatment Value: 100uM ABA vs. No Treatment
  misc_feature: MA Experiment ID: 20000072 Result: Up-regulated in Transcription
  misc_feature: MA Experiment 20000072 PARAMETER Experiment Name: At_100uM_ABA_Mutants_cDNA_P Parameter: Plant Line Value: CS8105
  misc_feature: MA Experiment 20000072 PARAMETER Experiment Name: At_100uM_ABA_Mutants_cDNA_P Parameter: Timepoint (hr) Value: 6
  misc_feature: MA Experiment 20000072 PARAMETER Experiment Name: At_100uM_ABA_Mutants_cDNA_P Parameter: Tissue Value: Aerial
  misc_feature: MA Experiment 20000072 PARAMETER Experiment Name: At_100uM_ABA_Mutants_cDNA_P Parameter: Treatment Value: 100uM ABA vs. No Treatment
  misc_feature: MA Experiment ID: 20000093 Result: Up-regulated in Transcription
  misc_feature: MA Experiment 20000093 PARAMETER Experiment Name: At_42deg_Heat_cDNA_P Parameter: Temperature (deg C) Value: 42 vs. 22
  misc_feature: MA Experiment 20000093 PARAMETER Experiment Name: At_42deg_Heat_cDNA_P Parameter: Timepoint (hr) Value: 0.5
  misc_feature: MA Experiment 20000093 PARAMETER Experiment Name: At_42deg_Heat_cDNA_P Parameter: Tissue Value: Aerial
  misc_feature: MA Experiment ID: 20000111 Result: Up-regulated in Transcription
  misc_feature: MA Experiment 20000111 PARAMETER Experiment Name: At_42deg_Heat_cDNA_P Parameter: Temperature (deg C) Value: 42 vs. 22
  misc_feature: MA Experiment 20000111 PARAMETER Experiment Name: At_42deg_Heat_cDNA_P Parameter: Timepoint (hr) Value: 6
  misc_feature: MA Experiment 20000111 PARAMETER Experiment Name: At_42deg_Heat_cDNA_P Parameter: Tissue Value: Aerial
  misc_feature: MA Experiment ID: 20000112 Result: Up-regulated in Transcription
  misc_feature: MA Experiment 20000112 PARAMETER Experiment Name: At_42deg_Heat_cDNA_P Parameter: Temperature (deg C) Value: 42 vs. 22
  misc_feature: MA Experiment 20000112 PARAMETER Experiment Name: At_42deg_Heat_cDNA_P Parameter: Timepoint (hr) Value: 2
  misc_feature: MA Experiment 20000112 PARAMETER Experiment Name: At_42deg_Heat_cDNA_P Parameter: Tissue Value: Aerial
  misc_feature: MA Experiment ID: 20000113 Result: Up-regulated in Transcription
  misc_feature: MA Experiment 20000113 PARAMETER Experiment Name: At_42deg_Heat_cDNA_P Parameter: Temperature (deg C) Value: 42 vs. 22
  misc_feature: MA Experiment 20000113 PARAMETER Experiment Name: At_42deg_Heat_cDNA_P Parameter: Timepoint (hr) Value: 8
  misc_feature: MA Experiment 20000113 PARAMETER Experiment Name: At_42deg_Heat_cDNA_P Parameter: Tissue Value: Aerial
  misc_feature: MA Experiment ID: 20000144 Result: Up-regulated in Transcription
  misc_feature: MA Experiment 20000144 PARAMETER Experiment Name: At_42deg_Heat_cDNA_P Parameter: Temperature (deg C) Value: 42 vs. 22
  misc_feature: MA Experiment 20000144 PARAMETER Experiment Name: At_42deg_Heat_cDNA_P Parameter: Timepoint (hr) Value: 1
  misc_feature: MA Experiment 20000144 PARAMETER Experiment Name: At_42deg_Heat_cDNA_P Parameter: Tissue Value: Aerial
  misc_feature: MA Experiment ID: 20000314 Result: Up-regulated in Transcription
  misc_feature: MA Experiment 20000314 PARAMETER Experiment Name: At_14day_Shoots-Roots_Sub_P Parameter: Age (day) Value: 14
  misc_feature: MA Experiment 20000314 PARAMETER Experiment Name: At_14day_Shoots-Roots_Sub_P Parameter: Organism Value: A. thaliana
  misc_feature: MA Experiment 20000314 PARAMETER Experiment Name: At_14day_Shoots-Roots_Sub_P Parameter: Plant Line Value: WS
  misc_feature: MA Experiment 20000314 PARAMETER Experiment Name: At_14day_Shoots-Roots_Sub_P Parameter: Tissue Value: Roots vs. Whole Plant
  misc_feature: MA Experiment ID: 20000327 Result: Up-regulated in Transcription
  misc_feature: MA Experiment 20000327 PARAMETER Experiment Name: At_42deg_Heat_Sub_P Parameter: Age (day) Value: 14
  misc_feature: MA Experiment 20000327 PARAMETER Experiment Name: At_42deg_Heat_Sub_P Parameter: Organism Value: A. thaliana
  misc_feature: MA Experiment 20000327 PARAMETER Experiment Name: At_42deg_Heat_Sub_P Parameter: Plant Line Value: WS
  misc_feature: MA Experiment 20000327 PARAMETER Experiment Name: At_42deg_Heat_Sub_P Parameter: Temperature (deg C) Value: 42 vs. 22
  misc_feature: MA Experiment 20000327 PARAMETER Experiment Name: At_42deg_Heat_Sub_P Parameter: Timepoint (hr) Value: 1
  misc_feature: MA Experiment 20000327 PARAMETER Experiment Name: At_42deg_Heat_Sub_P Parameter: Tissue Value: Aerial
  misc_feature: MA Experiment ID: 20000328 Result: Up-regulated in Transcription
  misc_feature: MA Experiment 20000328 PARAMETER Experiment Name: At_42deg_Heat_Sub_P Parameter: Age (day) Value: 14
  misc_feature: MA Experiment 20000328 PARAMETER Experiment Name: At_42deg_Heat_Sub_P Parameter: Organism Value: A. thaliana
  misc_feature: MA Experiment 20000328 PARAMETER Experiment Name: At_42deg_Heat_Sub_P Parameter: Plant Line Value: WS
  misc_feature: MA Experiment 20000328 PARAMETER Experiment Name: At_42deg_Heat_Sub_P Parameter: Temperature (deg C) Value: 42 vs. 22
  misc_feature: MA Experiment 20000328 PARAMETER Experiment Name: At_42deg_Heat_Sub_P Parameter: Timepoint (hr) Value: 6
  misc_feature: MA Experiment 20000328 PARAMETER Experiment Name: At_42deg_Heat_Sub_P Parameter: Tissue Value: Aerial
  misc_feature: MA Experiment ID: 20000329 Result: Down-regulated in Transcription
  misc_feature: MA Experiment 20000329 PARAMETER Experiment Name: At_4deg_Cold_Sub_P Parameter: Age (day) Value: 14
  misc_feature: MA Experiment 20000329 PARAMETER Experiment Name: At_4deg_Cold_Sub_P Parameter: Organism Value: A. thaliana
  misc_feature: MA Experiment 20000329 PARAMETER Experiment Name: At_4deg_Cold_Sub_P Parameter: Plant Line Value: WS
  misc_feature: MA Experiment 20000329 PARAMETER Experiment Name: At_4deg_Cold_Sub_P Parameter: Temperature (deg C) Value: 4 vs. 22
  misc_feature: MA Experiment 20000329 PARAMETER Experiment Name: At_4deg_Cold_Sub_P Parameter: Timepoint (hr) Value: 6
  misc_feature: MA Experiment 20000329 PARAMETER Experiment Name: At_4deg_Cold_Sub_P Parameter: Tissue Value: Aerial
  misc_feature: MA Experiment ID: 20000347 Result: Up-regulated in Transcription
  misc_feature: MA Experiment 20000347 PARAMETER Experiment Name: At_2mM_SA_Sub_P Parameter: Age (day) Value: 14
  misc_feature: MA Experiment 20000347 PARAMETER Experiment Name: At_2mM_SA_Sub_P Parameter: Organism Value: A. thaliana
  misc_feature: MA Experiment 20000347 PARAMETER Experiment Name: At_2mM_SA_Sub_P Parameter: Plant Line Value: WS
  misc_feature: MA Experiment 20000347 PARAMETER Experiment Name: At_2mM_SA_Sub_P Parameter: Timepoint (hr) Value: 6
  misc_feature: MA Experiment 20000347 PARAMETER Experiment Name: At_2mM_SA_Sub_P Parameter: Tissue Value: Aerial
  misc_feature: MA Experiment 20000347 PARAMETER Experiment Name: At_2mM_SA_Sub_P Parameter: Treatment Value: 2mM SA vs. No Treatment
  misc_feature: MA Experiment ID: 20000355 Result: Up-regulated in Transcription
  misc_feature: MA Experiment 20000355 PARAMETER Experiment Name: At_Siliques_Sub_P Parameter: Age (day) Value: 21
  misc_feature: MA Experiment 20000355 PARAMETER Experiment Name: At_Siliques_Sub_P Parameter: Organism Value: A. thaliana
  misc_feature: MA Experiment 20000355 PARAMETER Experiment Name: At_Siliques_Sub_P Parameter: Plant Line Value: WS
  misc_feature: MA Experiment 20000355 PARAMETER Experiment Name: At_Siliques_Sub_P Parameter: Tissue Value: Less Than 5mm Siliques vs. Whole Plant
  misc_feature: MA Experiment ID: 20001807 Result: Down-regulated in Transcription
  misc_feature: MA Experiment 20001807 PARAMETER Experiment Name: At_50mM_NH4NO3_L-to-H_Sub_P Parameter: Timepoint (hr) Value: 6
  misc_feature: MA Experiment 20001807 PARAMETER Experiment Name: At_50mM_NH4NO3_L-to-H_Sub_P Parameter: Tissue Value: Leaf
  misc_feature: MA Experiment 20001807 PARAMETER Experiment Name: At_50mM_NH4NO3_L-to-H_Sub_P Parameter: Treatment Value: 50mM NH4NO3 vs 100mM Mannitol

SEQ ID NO: 32129 - protein, 182 aa, Arabidopsis thaliana; identical to SEQ ID NO: 28539
  peptide (1)..(182): Ceres Seq. ID no. 12389160
  misc_feature (26)..(180): Pfam Name: AhpC/TSA family Pfam Description: AhpC/TSA family
  misc_feature (21)..(182): Homolog of NCBI NO: 30841938 NR Description: thioredoxin peroxidase 1 [Lycopersicon esculentum]

SEQ ID NO: 32130 - protein, 162 aa, Arabidopsis thaliana; identical to SEQ ID NO: 28540
  peptide (1)..(162): Ceres Seq. ID no. 12389161
  misc_feature (6)..(160): Pfam Name: AhpC/TSA family Pfam Description: AhpC/TSA family
  misc_feature (1)..(162): Homolog of NCBI NO: 30841938 NR Description: thioredoxin peroxidase 1 [Lycopersicon esculentum]

SEQ ID NO: 32131 - protein, 110 aa, Arabidopsis thaliana; identical to SEQ ID NO: 28541
  peptide (1)..(110): Ceres Seq. ID no. 12389162
  misc_feature (1)..(108): Pfam Name: AhpC/TSA family Pfam Description: AhpC/TSA family
  misc_feature (1)..(110): Homolog of NCBI NO: 30841938 NR Description: thioredoxin peroxidase 1 [Lycopersicon esculentum]

SEQ ID NO: 32132 - DNA, 1341 bp, Arabidopsis thaliana; identical to SEQ ID NO: 28542
  misc_feature (1)..(1341): Ceres Seq. ID no. 12370545
  misc_feature: MA Experiment ID: 20000169 Result: Down-regulated in Transcription
  misc_feature: MA Experiment 20000169 PARAMETER Experiment Name: At_100uM_ABA_P Parameter: Age (day) Value: 14
  misc_feature: MA Experiment 20000169 PARAMETER Experiment Name: At_100uM_ABA_P Parameter: Organism Value: A. thaliana
  misc_feature: MA Experiment 20000169 PARAMETER Experiment Name: At_100uM_ABA_P Parameter: Plant Line Value: WS
  misc_feature: MA Experiment 20000169 PARAMETER Experiment Name: At_100uM_ABA_P Parameter: Timepoint (hr) Value: 6
  misc_feature: MA Experiment 20000169 PARAMETER Experiment Name: At_100uM_ABA_P Parameter: Tissue Value: Aerial
  misc_feature: MA Experiment 20000169 PARAMETER Experiment Name: At_100uM_ABA_P Parameter: Treatment Value: 100uM ABA vs. No Treatment
  misc_feature: MA Experiment ID: 20000185 Result: Down-regulated in Transcription
  misc_feature: MA Experiment 20000185 PARAMETER Experiment Name: At_Roots__P Parameter: Age (day) Value: 7 vs. 21
  misc_feature: MA Experiment 20000185 PARAMETER Experiment Name: At_Roots__P Parameter: Organism Value: A. thaliana
  misc_feature: MA Experiment 20000185 PARAMETER Experiment Name: At_Roots__P Parameter: Tissue Value: Roots vs. Whole Plant
  misc_feature: MA Experiment ID: 20000265 Result: Up-regulated in Transcription
  misc_feature: MA Experiment 20000265 PARAMETER Experiment Name: At_Open_Flower_P Parameter: Age (day) Value: 21
  misc_feature: MA Experiment 20000265 PARAMETER Experiment Name: At_Open_Flower_P Parameter: Plant Line Value: WS
  misc_feature: MA Experiment 20000265 PARAMETER Experiment Name: At_Open_Flower_P Parameter: Tissue Value: Closed Flower vs. Whole Plant
  misc_feature: MA Experiment ID: 20000439 Result: Down-regulated in Transcription
  misc_feature: MA Experiment 20000439 PARAMETER Experiment Name: At_Roots__P Parameter: Age (day) Value: 14 vs. 21
  misc_feature: MA Experiment 20000439 PARAMETER Experiment Name: At_Roots__P Parameter: Organism Value: A. thaliana
  misc_feature: MA Experiment 20000439 PARAMETER Experiment Name: At_Roots__P Parameter: Tissue Value: Roots vs. Whole Plant
  misc_feature: MA Experiment ID: 20000496 Result: Up-regulated in Transcription
  misc_feature: MA Experiment 20000496 PARAMETER Experiment Name: At_Guard_Cells_P Parameter: Harvest Date Value: 7/19/2002
  misc_feature: MA Experiment 20000496 PARAMETER Experiment Name: At_Guard_Cells_P Parameter: Organism Value: Canola
  misc_feature: MA Experiment 20000496 PARAMETER Experiment Name: At_Guard_Cells_P Parameter: Tissue Value: Guard Cells vs. Leaves
  misc_feature: MA Experiment ID: 20001247 Result: Up-regulated in Transcription
  misc_feature: MA Experiment 20001247 PARAMETER Experiment Name: At_Far-red-induction_P Parameter: Age (day) Value: 7
  misc_feature: MA Experiment 20001247 PARAMETER Experiment Name: At_Far-red-induction_P Parameter: Light Value: Far-red vs. White
  misc_feature: MA Experiment 20001247 PARAMETER Experiment Name: At_Far-red-induction_P Parameter: Organism Value: A. thaliana
  misc_feature: MA Experiment 20001247 PARAMETER Experiment Name: At_Far-red-induction_P Parameter: Plant Line Value: Columbia
  misc_feature: MA Experiment 20001247 PARAMETER Experiment Name: At_Far-red-induction_P Parameter: Timepoint (hr) Value: 1
  misc_feature: MA Experiment 20001247 PARAMETER Experiment Name: At_Far-red-induction_P Parameter: Tissue Value: Whole Plant
  misc_feature: MA Experiment ID: 20001451 Result: Up-regulated in Transcription
  misc_feature: MA Experiment 20001451 PARAMETER Experiment Name: At_Far-red-induction_P Parameter: Age (day) Value: 7
  misc_feature: MA Experiment 20001451 PARAMETER Experiment Name: At_Far-red-induction_P Parameter: Light Value: Far-red vs. White
  misc_feature: MA Experiment 20001451 PARAMETER Experiment Name: At_Far-red-induction_P Parameter: Organism Value: A. thaliana
  misc_feature: MA Experiment 20001451 PARAMETER Experiment Name: At_Far-red-induction_P Parameter: Plant Line Value: Columbia
  misc_feature: MA Experiment 20001451 PARAMETER Experiment Name: At_Far-red-induction_P Parameter: Timepoint (hr) Value: 24
  misc_feature: MA Experiment 20001451 PARAMETER Experiment Name: At_Far-red-induction_P Parameter: Tissue Value: Whole Plant
  misc_feature: MA Experiment ID: 20001557 Result: Up-regulated in Transcription
  misc_feature: MA Experiment 20001557 PARAMETER Experiment Name: At_Drought_Soil_Dry_P Parameter: Age (day) Value: 27
  misc_feature: MA Experiment 20001557 PARAMETER Experiment Name: At_Drought_Soil_Dry_P Parameter: Organism Value: A. thaliana
  misc_feature: MA Experiment 20001557 PARAMETER Experiment Name: At_Drought_Soil_Dry_P Parameter: Plant Line Value: WS
  misc_feature: MA Experiment 20001557 PARAMETER Experiment Name: At_Drought_Soil_Dry_P Parameter: Post Timepoint (hr) Value: 3
  misc_feature: MA Experiment 20001557 PARAMETER Experiment Name: At_Drought_Soil_Dry_P Parameter: Post-Treatment Value: Re-Water vs. No Drought
  misc_feature: MA Experiment 20001557 PARAMETER Experiment Name: At_Drought_Soil_Dry_P Parameter: Timepoint (day) Value: 13
  misc_feature: MA Experiment 20001557 PARAMETER Experiment Name: At_Drought_Soil_Dry_P Parameter: Treatment Value: Drought vs. No Drought
  misc_feature: MA Experiment ID: 20001558 Result: Up-regulated in Transcription
  misc_feature: MA Experiment 20001558 PARAMETER Experiment Name: At_Drought_Soil_Dry_P Parameter: Age (day) Value: 27
  misc_feature: MA Experiment 20001558 PARAMETER Experiment Name: At_Drought_Soil_Dry_P Parameter: Organism Value: A. thaliana
  misc_feature: MA Experiment 20001558 PARAMETER Experiment Name: At_Drought_Soil_Dry_P Parameter: Plant Line Value: WS
  misc_feature: MA Experiment 20001558 PARAMETER Experiment Name: At_Drought_Soil_Dry_P Parameter: Post Timepoint (hr) Value: 6
  misc_feature: MA Experiment 20001558 PARAMETER Experiment Name: At_Drought_Soil_Dry_P Parameter: Post-Treatment Value: Re-Water vs. No Drought
  misc_feature: MA Experiment 20001558 PARAMETER Experiment Name: At_Drought_Soil_Dry_P Parameter: Timepoint (day) Value: 13
  misc_feature: MA Experiment 20001558 PARAMETER Experiment Name: At_Drought_Soil_Dry_P Parameter: Treatment Value: Drought vs. No Drought
  misc_feature: MA Experiment ID: 20001560 Result: Up-regulated in Transcription
  misc_feature: MA Experiment 20001560 PARAMETER Experiment Name: At_Drought_Soil_Dry_P Parameter: Age (day) Value: 28
  misc_feature: MA Experiment 20001560 PARAMETER Experiment Name: At_Drought_Soil_Dry_P Parameter: Organism Value: A. thaliana
  misc_feature: MA Experiment 20001560 PARAMETER Experiment Name: At_Drought_Soil_Dry_P Parameter: Plant Line Value: WS
  misc_feature: MA Experiment 20001560 PARAMETER Experiment Name: At_Drought_Soil_Dry_P Parameter: Post Timepoint (hr) Value: None
  misc_feature: MA Experiment 20001560 PARAMETER Experiment Name: At_Drought_Soil_Dry_P Parameter: Post-Treatment Value: None
  misc_feature: MA Experiment 20001560 PARAMETER Experiment Name: At_Drought_Soil_Dry_P Parameter: Timepoint (day) Value: 14
  misc_feature: MA Experiment 20001560 PARAMETER Experiment Name: At_Drought_Soil_Dry_P Parameter: Treatment Value: Drought vs. No Drought

SEQ ID NO: 32133 - protein, 309 aa, Arabidopsis thaliana; identical to SEQ ID NO: 28543
  peptide (1)..(309): Ceres Seq. ID no. 12370546
  misc_feature (71)..(130): Pfam Name: ZF-HD protein dimerisation region Pfam Description: ZF-HD protein dimerisation region
  misc_feature (204)..(301): Homolog of NCBI NO: 21554149 NR Description: unknown [Arabidopsis thaliana]
  misc_feature (17)..(128): Homolog of NCBI NO: 21554149 NR Description: unknown [Arabidopsis thaliana]
  misc_feature (58)..(128): Homolog of NCBI NO: 5091602 NR Description: 10A19I.6 [Oryza sativa]
  misc_feature (167)..(298): Homolog of NCBI NO: 5091602 NR Description: 10A19I.6 [Oryza sativa]
  misc_feature (67)..(307): Homolog of NCBI NO: 19387257 NR Description: hypothetical protein [Oryza sativa (japonica
  misc_feature (240)..(305): Homolog of NCBI NO: 15238445 NR Description: hypothetical protein common family; protein id:
  misc_feature (14)..(206): Homolog of NCBI NO: 15238445 NR Description: hypothetical protein common family; protein id:
  misc_feature (235)..(302): Homolog of NCBI NO: 15233925 NR Description: putative protein
  misc_feature (74)..(176): Homolog of NCBI NO: 15233925 NR Description: putative protein
  misc_feature (1)..(309): Homolog of NCBI NO: 18410804 NR Description: expressed protein

SEQ ID NO: 32134 - protein, 307 aa, Arabidopsis thaliana; identical to SEQ ID NO: 28544
  peptide (1)..(307): Ceres Seq. ID no. 12370547
  misc_feature (69)..(128): Pfam Name: ZF-HD protein dimerisation region Pfam Description: ZF-HD protein dimerisation region
  misc_feature (202)..(299): Homolog of NCBI NO: 21554149 NR Description: unknown [Arabidopsis thaliana]
  misc_feature (15)..(126): Homolog of NCBI NO: 21554149 NR Description: unknown [Arabidopsis thaliana]
  misc_feature (56)..(126): Homolog of NCBI NO: 5091602 NR Description: 10A19I.6 [Oryza sativa]
  misc_feature (165)..(296): Homolog of NCBI NO: 5091602 NR Description: 10A19I.6 [Oryza sativa]
  misc_feature (65)..(305): Homolog of NCBI NO: 19387257 NR Description: hypothetical protein [Oryza sativa (japonica
  misc_feature (238)..(303): Homolog of NCBI NO: 15238445 NR Description: hypothetical protein common family; protein id:
  misc_feature (12)..(204): Homolog of NCBI NO: 15238445 NR Description: hypothetical protein common family; protein id:
  misc_feature (233)..(300): Homolog of NCBI NO: 15233925 NR Description: putative protein
  misc_feature (72)..(174): Homolog of NCBI NO: 15233925 NR Description: putative protein
  misc_feature (1)..(307): Homolog of NCBI NO: 18410804 NR Description: expressed protein

SEQ ID NO: 32135 - protein, 302 aa, Arabidopsis thaliana; identical to SEQ ID NO: 28545
  peptide (1)..(302): Ceres Seq. ID no. 12370548
  misc_feature (64)..(123): Pfam Name: ZF-HD protein dimerisation region Pfam Description: ZF-HD protein dimerisation region
  misc_feature (197)..(294): Homolog of NCBI NO: 21554149 NR Description: unknown [Arabidopsis thaliana]
  misc_feature (10)..(121): Homolog of NCBI NO: 21554149 NR Description: unknown [Arabidopsis thaliana]
  misc_feature (51)..(121): Homolog of NCBI NO: 5091602 NR Description: 10A19I.6 [Oryza sativa]
  misc_feature (160)..(291): Homolog of NCBI NO: 5091602 NR Description: 10A19I.6 [Oryza sativa]
  misc_feature (60)..(300): Homolog of NCBI NO: 19387257 NR Description: hypothetical protein [Oryza sativa (japonica
  misc_feature (233)..(298): Homolog of NCBI NO: 15238445 NR Description: hypothetical protein common family; protein id:
  misc_feature (7)..(199): Homolog of NCBI NO: 15238445 NR Description: hypothetical protein common family; protein id:
  misc_feature (228)..(295): Homolog of NCBI NO: 15233925 NR Description: putative protein
  misc_feature (67)..(169): Homolog of NCBI NO: 15233925 NR Description: putative protein
  misc_feature (1)..(302): Homolog of NCBI NO: 18410804 NR Description: expressed protein

SEQ ID NO: 32136 - DNA, 1094 bp, Arabidopsis thaliana; identical to SEQ ID NO: 28546
  misc_feature (1)..(1094): Ceres Seq. ID no. 12333831
  misc_feature: MA Experiment ID: 108433 Result: Down-regulated in Transcription
  misc_feature: MA Experiment 108433 PARAMETER Experiment Name: At_rhl_Mutant2_cDNA_P Parameter: Age (day) Value: 7
  misc_feature: MA Experiment 108433 PARAMETER Experiment Name: At_rhl_Mutant2_cDNA_P Parameter: Organism Value: A. thaliana
  misc_feature: MA Experiment 108433 PARAMETER Experiment Name: At_rhl_Mutant2_cDNA_P Parameter: Plant Line Value: rhl Mutant vs. wt landsburg
  misc_feature: MA Experiment 108433 PARAMETER Experiment Name: At_rhl_Mutant2_cDNA_P Parameter: Tissue Value: Roots
  misc_feature: MA Experiment ID: 108434 Result: Up-regulated in Transcription
  misc_feature: MA Experiment 108434 PARAMETER Experiment Name: At_Root_Tips_cDNA_P Parameter: Tissue Value: Root Tips
  misc_feature: MA Experiment ID: 108435 Result: Up-regulated in Transcription
  misc_feature: MA Experiment 108435 PARAMETER Experiment Name: At_stm_Mutants_cDNA_P Parameter: Plant Line Value: wt Landsburg vs stm
  misc_feature: MA Experiment 108435 PARAMETER Experiment Name: At_stm_Mutants_cDNA_P Parameter: Tissue Value: Shoot Apical Meristem Region
  misc_feature: MA Experiment ID: 108462 Result: Down-regulated in Transcription
  misc_feature: MA Experiment 108462 PARAMETER Experiment Name: At_Germinating_Seeds_cDNA_P Parameter: Age (day) Value: 2 vs. 0
  misc_feature: MA Experiment 108462 PARAMETER Experiment Name: At_Germinating_Seeds_cDNA_P Parameter: Tissue Value: Germinating Seeds
  misc_feature: MA Experiment ID: 108463 Result: Down-regulated in Transcription
  misc_feature: MA Experiment 108463 PARAMETER Experiment Name: At_Germinating_Seeds_cDNA_P Parameter: Age (day) Value: 3 vs. 0
  misc_feature: MA Experiment 108463 PARAMETER Experiment Name: At_Germinating_Seeds_cDNA_P Parameter: Tissue Value: Germinating Seeds
  misc_feature: MA Experiment ID: 108464 Result: Down-regulated in Transcription
  misc_feature: MA Experiment 108464 PARAMETER Experiment Name: At_Germinating_Seeds_cDNA_P Parameter: Age (day) Value: 4 vs. 0
  misc_feature: MA Experiment 108464 PARAMETER Experiment Name: At_Germinating_Seeds_cDNA_P Parameter: Tissue Value: Germinating Seeds
  misc_feature: MA Experiment ID: 20000184 Result: Up-regulated in Transcription
  misc_feature: MA Experiment 20000184 PARAMETER Experiment Name: At_Shoots__P Parameter: Age (day) Value: 7
  misc_feature: MA Experiment 20000184 PARAMETER Experiment Name: At_Shoots__P Parameter: Tissue Value: Shoots vs. Whole Plant
  misc_feature: MA Experiment ID: 20000227 Result: Up-regulated in Transcription
  misc_feature: MA Experiment 20000227 PARAMETER Experiment Name: At_Root-Tips-vs-Tops_P Parameter: Tissue Value: Root Tips vs. Root Tops
  misc_feature: MA Experiment ID: 20000451 Result: Up-regulated in Transcription
  misc_feature: MA Experiment 20000451 PARAMETER Experiment Name: At_CS6879_Shoots-Roots_P Parameter: Age (day) Value: 14
  misc_feature: MA Experiment 20000451 PARAMETER Experiment Name: At_CS6879_Shoots-Roots_P Parameter: Organism Value: A. thaliana
  misc_feature: MA Experiment 20000451 PARAMETER Experiment Name: At_CS6879_Shoots-Roots_P Parameter: Plant Line Value: CS6879 vs. WS
  misc_feature: MA Experiment 20000451 PARAMETER Experiment Name: At_CS6879_Shoots-Roots_P Parameter: Tissue Value: Roots
  misc_feature: MA Experiment ID: 20000794 Result: Down-regulated in Transcription
  misc_feature: MA Experiment 20000794 PARAMETER Experiment Name: At_Petals_P Parameter: Age (day) Value: 23-25 days
  misc_feature: MA Experiment 20000794 PARAMETER Experiment Name: At_Petals_P Parameter: Plant Line Value: WS
  misc_feature: MA Experiment 20000794 PARAMETER Experiment Name: At_Petals_P Parameter: Tissue Value: Petals vs. Whole plant
  misc_feature: MA Experiment ID: 20001557 Result: Up-regulated in Transcription
  misc_feature: MA Experiment 20001557 PARAMETER Experiment Name: At_Drought_Soil_Dry_P Parameter: Age (day) Value: 27
  misc_feature: MA Experiment 20001557 PARAMETER Experiment Name: At_Drought_Soil_Dry_P Parameter: Organism Value: A. thaliana
  misc_feature: MA Experiment 20001557 PARAMETER Experiment Name: At_Drought_Soil_Dry_P Parameter: Plant Line Value: WS
  misc_feature: MA Experiment 20001557 PARAMETER Experiment Name: At_Drought_Soil_Dry_P Parameter: Post Timepoint (hr) Value: 3
  misc_feature: MA Experiment 20001557 PARAMETER Experiment Name: At_Drought_Soil_Dry_P Parameter: Post-Treatment Value: Re-Water vs. No Drought
  misc_feature: MA Experiment 20001557 PARAMETER Experiment Name: At_Drought_Soil_Dry_P Parameter: Timepoint (day) Value: 13
  misc_feature: MA Experiment 20001557 PARAMETER Experiment Name: At_Drought_Soil_Dry_P Parameter: Treatment Value: Drought vs. No Drought
  misc_feature: Phenotype: ROSETTE LEAVES Shape-Oval
  misc_feature: Phenotype: ROSETTE LEAVES Other
  misc_feature: Phenotype: WHOLE PLANT Color-Dark Green
  misc_feature: Phenotype: WHOLE PLANT Color-Dark Green
  misc_feature: Phenotype: WHOLE PLANT Size-Small
  misc_feature: Phenotype: WHOLE PLANT Size-Small
  misc_feature: Phenotype: INFLORESCENCE Height-Short
  misc_feature: Phenotype: INFLORESCENCE Strength-Weak
  misc_feature: Phenotype: ROSETTE LEAVES Shape-Serrate
  misc_feature: Phenotype: INFLORESCENCE Height-Short
  misc_feature: Phenotype: INFLORESCENCE Strength-Strong
  misc_feature: Phenotype: ROSETTE LEAVES Shape-Serrate
  misc_feature: Phenotype: ROSETTE LEAVES Other
  misc_feature: Phenotype: WHOLE PLANT Color-Dark Green
  misc_feature: Phenotype: INFLORESCENCE Height-Short
  misc_feature: Phenotype: INFLORESCENCE Strength-Strong

SEQ ID NO: 32137 - protein, 254 aa, Arabidopsis thaliana; identical to SEQ ID NO: 28547
  peptide (1)..(254): Ceres Seq. ID no. 12333832
  misc_feature (7)..(85): Pfam Name: LSM domain Pfam Description: LSM domain
  misc_feature (1)..(229): Homolog of NCBI NO: 10720263 NR Description: Small nuclear ribonucleoprotein associated
  misc_feature (1)..(240): Homolog of NCBI NO: 12643865 NR Description: Small nuclear ribonucleoprotein associated
  misc_feature (1)..(229): Homolog of NCBI NO: 38150007 NR Description: small nuclear ribonucleoprotein polypeptide B/B'
  misc_feature (1)..(240): Homolog of NCBI NO: 8099650 NR Description: snRNP-associated protein; SmB [Danio rerio]
  misc_feature (1)..(229): Homolog of NCBI NO: 7208221 NR Description: small nuclear ribonucleoprotein B' [Macropus
  misc_feature (1)..(247): Homolog of NCBI NO: 33146808 NR Description: putative snRNP(small nuclear ribonucleoprotein
  misc_feature (1)..(247): Homolog of NCBI NO: 34900024 NR Description: putative snRNP protein [Oryza sativa (japonica
  misc_feature (1)..(253): Homolog of NCBI NO: 15237095 NR Description: putative snRNP protein
  misc_feature (1)..(254): Homolog of NCBI NO: 21536707 NR Description: putative snRNP protein [Arabidopsis thaliana]
  misc_feature (1)..(254): Homolog of NCBI NO: 15241519 NR Description: putative protein

SEQ ID NO: 32138 - protein, 252 aa, Arabidopsis thaliana; identical to SEQ ID NO: 28548
  peptide (1)..(252): Ceres Seq. ID no. 12333833
  misc_feature (5)..(83): Pfam Name: LSM domain Pfam Description: LSM domain
  misc_feature (1)..(227): Homolog of NCBI NO: 10720263 NR Description: Small nuclear ribonucleoprotein associated
  misc_feature (1)..(238): Homolog of NCBI NO: 12643865 NR Description: Small nuclear ribonucleoprotein associated
  misc_feature (1)..(227): Homolog of NCBI NO: 38150007 NR Description: small nuclear ribonucleoprotein polypeptide B/B'
  misc_feature (1)..(238): Homolog of NCBI NO: 8099650 NR Description: snRNP-associated protein; SmB [Danio rerio]
  misc_feature (1)..(227): Homolog of NCBI NO: 7208221 NR Description: small nuclear ribonucleoprotein B' [Macropus
  misc_feature (1)..(245): Homolog of NCBI NO: 33146808 NR Description: putative snRNP(small nuclear ribonucleoprotein
  misc_feature (1)..(245): Homolog of NCBI NO: 34900024 NR Description: putative snRNP protein [Oryza sativa (japonica
  misc_feature (1)..(251): Homolog of NCBI NO: 15237095 NR Description: putative snRNP protein
  misc_feature (1)..(252): Homolog of NCBI NO: 21536707 NR Description: putative snRNP protein [Arabidopsis thaliana]
  misc_feature (1)..(252): Homolog of NCBI NO: 15241519 NR Description: putative protein

SEQ ID NO: 32139 - protein, 246 aa, Arabidopsis thaliana; identical to SEQ ID NO: 28549
  peptide (1)..(246): Ceres Seq. ID no. 12333834
  misc_feature (1)..(77): Pfam Name: LSM domain Pfam Description: LSM domain
  misc_feature (1)..(221): Homolog of NCBI NO: 10720263 NR Description: Small nuclear ribonucleoprotein associated
  misc_feature (1)..(232): Homolog of NCBI NO: 12643865 NR Description: Small nuclear ribonucleoprotein associated
  misc_feature (1)..(221): Homolog of NCBI NO: 38150007 NR Description: small nuclear ribonucleoprotein polypeptide B/B'
  misc_feature (1)..(232): Homolog of NCBI NO: 8099650 NR Description: snRNP-associated protein; SmB [Danio rerio]
  misc_feature (1)..(221): Homolog of NCBI NO: 7208221 NR Description: small nuclear ribonucleoprotein B' [Macropus
  misc_feature (1)..(239): Homolog of NCBI NO: 33146808 NR Description: putative snRNP(small nuclear ribonucleoprotein
  misc_feature (1)..(239): Homolog of NCBI NO: 34900024 NR Description: putative snRNP protein [Oryza sativa (japonica
  misc_feature (1)..(245): Homolog of NCBI NO: 15237095 NR Description: putative snRNP protein
  misc_feature (1)..(246): Homolog of NCBI NO: 21536707 NR Description: putative snRNP protein [Arabidopsis thaliana]
  misc_feature (1)..(246): Homolog of NCBI NO: 15241519 NR Description: putative protein

SEQ ID NO: 32140 - DNA, 1415 bp, Arabidopsis thaliana; identical to SEQ ID NO: 28550
  misc_feature (1)..(1415): Ceres Seq. ID no. 12396906
  misc_feature: MA Experiment ID: 108572 Result: Up-regulated in Transcription
  misc_feature: MA Experiment 108572 PARAMETER Experiment Name: At_Drought_cDNA_P Parameter: Timepoint (hr) Value: 1
  misc_feature: MA Experiment 108572 PARAMETER Experiment Name: At_Drought_cDNA_P Parameter: Tissue Value: Aerial
  misc_feature: MA Experiment 108572 PARAMETER Experiment Name: At_Drought_cDNA_P Parameter: Treatment Value: Drought vs. No Drought
  misc_feature: MA Experiment ID: 108576 Result: Up-regulated in Transcription
  misc_feature: MA Experiment 108576 PARAMETER Experiment Name: At_42deg_Heat_cDNA_P Parameter: Temperature (deg C) Value: 42 vs. 22
  misc_feature: MA Experiment 108576 PARAMETER Experiment Name: At_42deg_Heat_cDNA_P Parameter: Timepoint (hr) Value: 1
  misc_feature: MA Experiment 108576 PARAMETER Experiment Name: At_42deg_Heat_cDNA_P Parameter: Tissue Value: Aerial
  misc_feature: MA Experiment ID: 20000111 Result: Up-regulated in Transcription
  misc_feature: MA Experiment 20000111 PARAMETER Experiment Name: At_42deg_Heat_cDNA_P Parameter: Temperature (deg C) Value: 42 vs. 22
  misc_feature: MA Experiment 20000111 PARAMETER Experiment Name: At_42deg_Heat_cDNA_P Parameter: Timepoint (hr) Value: 6
  misc_feature: MA Experiment 20000111 PARAMETER Experiment Name: At_42deg_Heat_cDNA_P Parameter: Tissue Value: Aerial

SEQ ID NO: 32141 - protein, 394 aa, Arabidopsis thaliana; identical to SEQ ID NO: 28551
  peptide (1)..(394): Ceres Seq. ID no. 12396907
  misc_feature (99)..(222): Pfam Name: ATPase family associated with various cellular Pfam Description: ATPase family associated with various cellular
  misc_feature (46)..(388): Homolog of NCBI NO: 30913228 NR Description: Activator 1 subunit 3 (Replication factor C
  misc_feature (46)..(381): Homolog of NCBI NO: 13431787 NR Description: Activator 1 40 kDa subunit (Replication factor C
  misc_feature (65)..(389): Homolog of NCBI NO: 19921076 NR Description: CG5313-PA [Drosophila melanogaster]
  misc_feature (60)..(372): Homolog of NCBI NO: 34872605 NR Description: similar to replication factor C 5 isoform 1
  misc_feature (72)..(393): Homolog of NCBI NO: 23271821 NR Description: Similar to replication factor C (activator 1) 5,
  misc_feature (60)..(393): Homolog of NCBI NO: 20841441 NR Description: replication factor C (activator 1) 5 [Mus
  misc_feature (65)..(393): Homolog of NCBI NO: 6677723 NR Description: replication factor C (activator 1) 5, 36.5kDa
  misc_feature (56)..(393): Homolog of NCBI NO: 27882432 NR Description: Similar to replication factor C (activator 1) 5
  misc_feature (26)..(393): Homolog of NCBI NO: 10798790 NR Description: replication factor C 36kDa subunit
  misc_feature (26)..(394): Homolog of NCBI NO: 15223967 NR Description: putative replication factor C

SEQ ID NO: 32142 - protein, 369 aa, Arabidopsis thaliana; identical to SEQ ID NO: 28552
  peptide (1)..(369): Ceres Seq. ID no. 12396908
  misc_feature (74)..(197): Pfam Name: ATPase family associated with various cellular Pfam Description: ATPase family associated with various cellular
  misc_feature (21)..(363): Homolog of NCBI NO: 30913228 NR Description: Activator 1 subunit 3 (Replication factor C
  misc_feature (21)..(356): Homolog of NCBI NO: 13431787 NR Description: Activator 1 40 kDa subunit (Replication factor C
  misc_feature (40)..(364): Homolog of NCBI NO: 19921076 NR Description: CG5313-PA [Drosophila melanogaster]
  misc_feature (35)..(347): Homolog of NCBI NO: 34872605 NR Description: similar to replication factor C 5 isoform 1
  misc_feature (47)..(368): Homolog of NCBI NO: 23271821 NR Description: Similar to replication factor C (activator 1) 5,
  misc_feature (35)..(368): Homolog of NCBI NO: 20841441 NR Description: replication factor C (activator 1) 5 [Mus
  misc_feature (40)..(368): Homolog of NCBI NO: 6677723 NR Description: replication factor C (activator 1) 5, 36.5kDa
  misc_feature (31)..(368): Homolog of NCBI NO: 27882432 NR Description: Similar to replication factor C (activator 1) 5
  misc_feature (1)..(368): Homolog of NCBI NO: 10798790 NR Description: replication factor C 36kDa subunit
  misc_feature (1)..(369): Homolog of NCBI NO: 15223967 NR Description: putative replication factor C

SEQ ID NO: 32143 - protein, 362 aa, Arabidopsis thaliana; identical to SEQ ID NO: 28553
  peptide (1)..(362): Ceres Seq. ID no. 12396909
  misc_feature (67)..(190): Pfam Name: ATPase family associated with various cellular Pfam Description: ATPase family associated with various cellular
  misc_feature (14)..(356): Homolog of NCBI NO: 30913228 NR Description: Activator 1 subunit 3 (Replication factor C
  misc_feature (14)..(349): Homolog of NCBI NO: 13431787 NR Description: Activator 1 40 kDa subunit (Replication factor C
  misc_feature (33)..(357): Homolog of NCBI NO: 19921076 NR Description: CG5313-PA [Drosophila melanogaster]
  misc_feature (28)..(340): Homolog of NCBI NO: 34872605 NR Description: similar to replication factor C 5 isoform 1
  misc_feature (40)..(361): Homolog of NCBI NO: 23271821 NR Description: Similar to replication factor C (activator 1) 5,
  misc_feature (28)..(361): Homolog of NCBI NO: 20841441 NR Description: replication factor C (activator 1) 5 [Mus
  misc_feature (33)..(361): Homolog of NCBI NO: 6677723 NR Description: replication factor C (activator 1) 5, 36.5kDa
  misc_feature (24)..(361): Homolog of NCBI NO: 27882432 NR Description: Similar to replication factor C (activator 1) 5
  misc_feature (1)..(361): Homolog of NCBI NO: 10798790 NR Description: replication factor C 36kDa subunit
  misc_feature (1)..(362): Homolog of NCBI NO: 15223967 NR Description: putative replication factor C

SEQ ID NO: 32144 - DNA, 800 bp, Arabidopsis thaliana; identical to SEQ ID NO: 28554
  misc_feature (1)..(800): Ceres Seq. ID no. 12331823
  misc_feature: MA Experiment ID: 108435 Result: Down-regulated in Transcription
  misc_feature: MA Experiment 108435 PARAMETER Experiment Name: At_stm_Mutants_cDNA_P Parameter: Plant Line Value: wt Landsburg vs stm
  misc_feature: MA Experiment 108435 PARAMETER Experiment Name: At_stm_Mutants_cDNA_P Parameter: Tissue Value: Shoot Apical Meristem Region
  misc_feature: MA Experiment ID: 108595 Result: Down-regulated in Transcription
  misc_feature: MA Experiment 108595 PARAMETER Experiment Name: At_Ler-pi_Ovule_cDNA_P Parameter: Plant Line Value: null
  misc_feature: MA Experiment ID: 20000439 Result: Down-regulated in Transcription
  misc_feature: MA Experiment 20000439 PARAMETER Experiment Name: At_Roots__P Parameter: Age (day) Value: 14 vs. 21
  misc_feature: MA Experiment 20000439 PARAMETER Experiment Name: At_Roots__P Parameter: Organism Value: A. thaliana
  misc_feature: MA Experiment 20000439 PARAMETER Experiment Name: At_Roots__P Parameter: Tissue Value: Roots vs. Whole Plant
  misc_feature: MA Experiment ID: 20001905 Result: Down-regulated in Transcription
  misc_feature: MA Experiment 20001905 PARAMETER Experiment Name: At_Drought_Reproduction_P Parameter: Age (day) Value: 40
  misc_feature: MA Experiment 20001905 PARAMETER Experiment Name: At_Drought_Reproduction_P Parameter: Organism Value: A. thaliana
  misc_feature: MA Experiment 20001905 PARAMETER Experiment Name: At_Drought_Reproduction_P Parameter: Plant Line Value: WS
  misc_feature: MA Experiment 20001905 PARAMETER Experiment Name: At_Drought_Reproduction_P Parameter: Timepoint (day) Value: 10
  misc_feature: MA Experiment 20001905 PARAMETER Experiment Name: At_Drought_Reproduction_P Parameter: Tissue Value: Rosettes
  misc_feature: MA Experiment 20001905 PARAMETER Experiment Name: At_Drought_Reproduction_P Parameter: Treatment Value: Drought vs. No Drought

SEQ ID NO: 32145 - protein, 186 aa, Arabidopsis thaliana; identical to SEQ ID NO: 28555
  peptide (1)..(186): Ceres Seq. ID no. 12331824
  misc_feature (20)..(185): Homolog of NCBI NO: 1351239 NR Description: Thioredoxin M-type, chloroplast precursor (TRX-M)
  misc_feature (20)..(185): Homolog of NCBI NO: 1388088 NR Description: thioredoxin m
  misc_feature (12)..(185): Homolog of NCBI NO: 15594012 NR Description: putative thioredoxin m2 [Pisum sativum]
  misc_feature (21)..(185): Homolog of NCBI NO: 15232567 NR Description: thioredoxin m4
  misc_feature (21)..(185): Homolog of NCBI NO: 6539614 NR Description: thioredoxin m4 [Arabidopsis thaliana]
  misc_feature (1)..(185): Homolog of NCBI NO: 11135407 NR Description: Thioredoxin M-type, chloroplast precursor (TRX-M)
  misc_feature (1)..(185): Homolog of NCBI NO: 30678634 NR Description: thioredoxin M-type 1, chloroplast precursor
  misc_feature (1)..(186): Homolog of NCBI NO: 21618235 NR Description: putative M-type thioredoxin [Arabidopsis thaliana]
  misc_feature (1)..(186): Homolog of NCBI NO: 6539610 NR Description: thioredoxin m2 [Arabidopsis thaliana]
  misc_feature (1)..(186): Homolog of NCBI NO: 15236327 NR Description: putative M-type thioredoxin

SEQ ID NO: 32146 - protein, 152 aa, Arabidopsis thaliana; identical to SEQ ID NO: 28556
  peptide (1)..(152): Ceres Seq. ID no. 12331825
  misc_feature (1)..(151): Homolog of NCBI NO: 1351239 NR Description: Thioredoxin M-type, chloroplast precursor (TRX-M)
  misc_feature (1)..(151): Homolog of NCBI NO: 1388088 NR Description: thioredoxin m
  misc_feature (1)..(151): Homolog of NCBI NO: 15594012 NR Description: putative thioredoxin m2 [Pisum sativum]
  misc_feature (1)..(151): Homolog of NCBI NO: 15232567 NR Description: thioredoxin m4
  misc_feature (1)..(151): Homolog of NCBI NO: 6539614 NR Description: thioredoxin m4 [Arabidopsis thaliana]
  misc_feature (1)..(151): Homolog of NCBI NO: 11135407 NR Description: Thioredoxin M-type, chloroplast precursor (TRX-M)
  misc_feature (1)..(151): Homolog of NCBI NO: 30678634 NR Description: thioredoxin M-type 1, chloroplast precursor
  misc_feature (1)..(152): Homolog of NCBI NO: 21618235 NR Description: putative M-type thioredoxin [Arabidopsis thaliana]
  misc_feature (1)..(152): Homolog of NCBI NO: 6539610 NR Description: thioredoxin m2 [Arabidopsis thaliana]
  misc_feature (1)..(152): Homolog of NCBI NO: 15236327 NR Description: putative M-type thioredoxin

SEQ ID NO: 32147 - protein, 98 aa, Arabidopsis thaliana; identical to SEQ ID NO: 28557
  peptide (1)..(98): Ceres Seq. ID no. 12331826

SEQ ID NO: 32148 - DNA, 960 bp, Arabidopsis thaliana; identical to SEQ ID NO: 28558
  misc_feature (1)..(960): Ceres Seq. ID no. 13488570
  misc_feature: MA Experiment ID: 108462 Result: Down-regulated in Transcription
  misc_feature: MA Experiment 108462 PARAMETER Experiment Name: At_Germinating_Seeds_cDNA_P Parameter: Age (day) Value: 2 vs. 0
  misc_feature: MA Experiment 108462 PARAMETER Experiment Name: At_Germinating_Seeds_cDNA_P Parameter: Tissue Value: Germinating Seeds
  misc_feature: MA Experiment ID: 108463 Result: Down-regulated in Transcription
  misc_feature: MA Experiment 108463 PARAMETER Experiment Name: At_Germinating_Seeds_cDNA_P Parameter: Age (day) Value: 3 vs. 0
  misc_feature: MA Experiment 108463 PARAMETER Experiment Name: At_Germinating_Seeds_cDNA_P Parameter: Tissue Value: Germinating Seeds
  misc_feature: MA Experiment ID: 108464 Result: Down-regulated in Transcription
  misc_feature: MA Experiment 108464 PARAMETER Experiment Name: At_Germinating_Seeds_cDNA_P Parameter: Age (day) Value: 4 vs. 0
  misc_feature: MA Experiment 108464 PARAMETER Experiment Name: At_Germinating_Seeds_cDNA_P Parameter: Tissue Value: Germinating Seeds
  misc_feature: MA Experiment ID: 108561 Result: Down-regulated in Transcription
  misc_feature: MA Experiment 108561 PARAMETER Experiment Name: At_100uM_ABA_cDNA_P Parameter: Timepoint (hr) Value: 6
  misc_feature: MA Experiment 108561 PARAMETER Experiment Name: At_100uM_ABA_cDNA_P Parameter: Tissue Value: Aerial
  misc_feature: MA Experiment 108561 PARAMETER Experiment Name: At_100uM_ABA_cDNA_P Parameter: Treatment Value: 100uM ABA vs. No Treatment
  misc_feature: MA Experiment ID: 108572 Result: Down-regulated in Transcription
  misc_feature: MA Experiment 108572 PARAMETER Experiment Name: At_Drought_cDNA_P Parameter: Timepoint (hr) Value: 1
  misc_feature: MA Experiment 108572 PARAMETER Experiment Name: At_Drought_cDNA_P Parameter: Tissue Value: Aerial
  misc_feature: MA Experiment 108572 PARAMETER Experiment Name: At_Drought_cDNA_P Parameter: Treatment Value: Drought vs. No Drought
  misc_feature: MA Experiment ID: 108573 Result: Down-regulated in Transcription
  misc_feature: MA Experiment 108573 PARAMETER Experiment Name: At_Drought_cDNA_P Parameter: Timepoint (hr) Value: 6
  misc_feature: MA Experiment 108573 PARAMETER Experiment Name: At_Drought_cDNA_P Parameter: Tissue Value: Aerial
  misc_feature: MA Experiment 108573 PARAMETER Experiment Name: At_Drought_cDNA_P Parameter: Treatment Value: Drought vs. No Drought
  misc_feature: MA Experiment ID: 108595 Result: Down-regulated in Transcription
  misc_feature: MA Experiment 108595 PARAMETER Experiment Name: At_Ler-pi_Ovule_cDNA_P Parameter: Plant Line Value: null
  misc_feature: MA Experiment ID: 108605 Result: Down-regulated in Transcription
  misc_feature: MA Experiment 108605 PARAMETER Experiment Name: At_100uM_ABA_cDNA_P Parameter: Timepoint (hr) Value: 6
  misc_feature: MA Experiment 108605 PARAMETER Experiment Name: At_100uM_ABA_cDNA_P Parameter: Tissue Value: Aerial
  misc_feature: MA Experiment 108605 PARAMETER Experiment Name: At_100uM_ABA_cDNA_P Parameter: Treatment Value: 100uM ABA vs. No Treatment
  misc_feature: MA Experiment ID: 108607 Result: Down-regulated in Transcription
  misc_feature: MA Experiment 108607 PARAMETER Experiment Name: At_100uM_ABA_cDNA_P Parameter: Timepoint (hr) Value: 4
  misc_feature: MA Experiment 108607 PARAMETER Experiment Name: At_100uM_ABA_cDNA_P Parameter: Tissue Value: Aerial
  misc_feature: MA Experiment 108607 PARAMETER Experiment Name: At_100uM_ABA_cDNA_P Parameter: Treatment Value: 100uM ABA vs. No Treatment
  misc_feature: MA Experiment ID: 108668 Result: Down-regulated in Transcription
  misc_feature: MA Experiment 108668 PARAMETER Experiment Name: At_2mM_SA_cDNA_P Parameter: Plant Line Value: WS
  misc_feature: MA Experiment 108668 PARAMETER Experiment Name: At_2mM_SA_cDNA_P Parameter: Timepoint (hr) Value: 6
  misc_feature: MA Experiment 108668 PARAMETER Experiment Name: At_2mM_SA_cDNA_P Parameter: Treatment Value: 2mM SA vs. No Treatment
  misc_feature: MA Experiment ID: 20000069 Result: Down-regulated in Transcription
  misc_feature: MA Experiment 20000069 PARAMETER Experiment Name: At_100uM_ABA_Mutants_cDNA_P Parameter: Plant Line Value: CS23
  misc_feature: MA Experiment 20000069 PARAMETER Experiment Name: At_100uM_ABA_Mutants_cDNA_P Parameter: Timepoint (hr) Value: 6
  misc_feature: MA Experiment 20000069 PARAMETER Experiment Name: At_100uM_ABA_Mutants_cDNA_P Parameter: Tissue Value: Aerial
  misc_feature: MA Experiment 20000069 PARAMETER Experiment Name: At_100uM_ABA_Mutants_cDNA_P Parameter: Treatment Value: 100uM ABA vs. No Treatment
  misc_feature: MA Experiment ID: 20000070 Result: Down-regulated in Transcription
  misc_feature: MA Experiment 20000070 PARAMETER Experiment Name: At_100uM_ABA_Mutants_cDNA_P Parameter: Plant Line Value: CS24
  misc_feature: MA Experiment 20000070 PARAMETER Experiment Name: At_100uM_ABA_Mutants_cDNA_P Parameter: Timepoint (hr) Value: 6
  misc_feature: MA Experiment 20000070 PARAMETER Experiment Name: At_100uM_ABA_Mutants_cDNA_P Parameter: Tissue Value: Aerial
  misc_feature: MA Experiment 20000070 PARAMETER Experiment Name: At_100uM_ABA_Mutants_cDNA_P Parameter: Treatment Value: 100uM ABA vs. No Treatment
  misc_feature: MA Experiment ID: 20000071 Result: Down-regulated in Transcription
  misc_feature: MA Experiment 20000071 PARAMETER Experiment Name: At_100uM_ABA_Mutants_cDNA_P Parameter: Plant Line Value: CS8104
  misc_feature: MA Experiment 20000071 PARAMETER Experiment Name: At_100uM_ABA_Mutants_cDNA_P Parameter: Timepoint (hr) Value: 6
  misc_feature: MA Experiment 20000071 PARAMETER Experiment Name: At_100uM_ABA_Mutants_cDNA_P Parameter: Tissue Value: Aerial
  misc_feature: MA Experiment 20000071 PARAMETER Experiment Name: At_100uM_ABA_Mutants_cDNA_P Parameter: Treatment Value: 100uM ABA vs. No Treatment
  misc_feature: MA Experiment ID: 20000117 Result: Down-regulated in Transcription
  misc_feature: MA Experiment 20000117 PARAMETER Experiment Name: At_100uM_ABA_Mutants_cDNA_P Parameter: Plant Line Value: Columbia
  misc_feature: MA Experiment 20000117 PARAMETER Experiment Name: At_100uM_ABA_Mutants_cDNA_P Parameter: Timepoint (hr) Value: 6
  misc_feature: MA Experiment 20000117 PARAMETER Experiment Name: At_100uM_ABA_Mutants_cDNA_P Parameter: Tissue Value: Aerial
  misc_feature: MA Experiment 20000117 PARAMETER Experiment Name: At_100uM_ABA_Mutants_cDNA_P Parameter: Treatment Value: 100uM ABA vs. No Treatment
  misc_feature: MA Experiment ID: 20000169 Result: Down-regulated in Transcription
  misc_feature: MA Experiment 20000169 PARAMETER Experiment Name: At_100uM_ABA_P Parameter: Age (day) Value: 14
  misc_feature: MA Experiment 20000169 PARAMETER Experiment Name: At_100uM_ABA_P Parameter: Organism Value: A. thaliana
  misc_feature: MA Experiment 20000169 PARAMETER Experiment Name: At_100uM_ABA_P Parameter: Plant Line Value: WS
  misc_feature: MA Experiment 20000169 PARAMETER Experiment Name: At_100uM_ABA_P Parameter: Timepoint (hr) Value: 6
  misc_feature: MA Experiment 20000169 PARAMETER Experiment Name: At_100uM_ABA_P Parameter: Tissue Value: Aerial
  misc_feature: MA Experiment 20000169 PARAMETER Experiment Name: At_100uM_ABA_P Parameter: Treatment Value: 100uM ABA vs. No Treatment
  misc_feature: MA Experiment ID: 20000179 Result: Down-regulated in Transcription
  misc_feature: MA Experiment 20000179 PARAMETER Experiment Name: At_Germinating_Seeds_P Parameter: Age (hr) Value: 6 vs. 0
  misc_feature: MA Experiment 20000179 PARAMETER Experiment Name: At_Germinating_Seeds_P Parameter: Tissue Value: Germinating Seeds
  misc_feature: MA Experiment ID: 20000234 Result: Up-regulated in Transcription
  misc_feature: MA Experiment 20000234 PARAMETER Experiment Name: At_Siliques_P Parameter: Age (day) Value: 21
  misc_feature: MA Experiment 20000234 PARAMETER Experiment Name: At_Siliques_P Parameter: Organism Value: A. thaliana
  misc_feature: MA Experiment 20000234 PARAMETER Experiment Name: At_Siliques_P Parameter: Plant Line Value: WS
  misc_feature: MA Experiment 20000234 PARAMETER Experiment Name: At_Siliques_P Parameter: Tissue Value: Less Than 5mm Siliques vs. Whole Plant
  misc_feature: MA Experiment ID: 20000235 Result: Up-regulated in Transcription
  misc_feature: MA Experiment 20000235 PARAMETER Experiment Name: At_Siliques_P Parameter: Age (day) Value: 21
  misc_feature: MA Experiment 20000235 PARAMETER Experiment Name: At_Siliques_P Parameter: Organism Value: A. thaliana
  misc_feature: MA Experiment 20000235 PARAMETER Experiment Name: At_Siliques_P Parameter: Plant Line Value: WS
  misc_feature: MA Experiment 20000235 PARAMETER Experiment Name: At_Siliques_P Parameter: Tissue Value: 5-10mm Siliques vs. Whole Plant
  misc_feature: MA Experiment ID: 20000264 Result: Up-regulated in Transcription
  misc_feature: MA Experiment 20000264 PARAMETER Experiment Name: At_Open_Flower_P Parameter: Age (day) Value: 21
  misc_feature: MA Experiment 20000264 PARAMETER Experiment Name: At_Open_Flower_P Parameter: Plant Line Value: WS
  misc_feature: MA Experiment 20000264 PARAMETER Experiment Name: At_Open_Flower_P Parameter: Tissue Value: Open Flower vs. Whole Plant
  misc_feature: MA Experiment ID: 20000286 Result: Up-regulated in Transcription
  misc_feature: MA Experiment 20000286 PARAMETER Experiment Name: At_Open_Flower_P Parameter: Age (day) Value: 21
  misc_feature: MA Experiment 20000286 PARAMETER Experiment Name: At_Open_Flower_P Parameter: Plant Line Value: WS
  misc_feature: MA Experiment 20000286 PARAMETER Experiment Name: At_Open_Flower_P Parameter: Tissue Value: Half Open vs. Whole Plant
  misc_feature: MA Experiment ID: 20000436 Result: Down-regulated in Transcription
  misc_feature: MA Experiment 20000436 PARAMETER Experiment Name: At_Drought_P Parameter: Age (day) Value: 7
  misc_feature: MA Experiment 20000436 PARAMETER Experiment Name: At_Drought_P Parameter: Organism Value: A. thaliana
  misc_feature: MA Experiment 20000436 PARAMETER Experiment Name: At_Drought_P Parameter: Plant Line Value: WS
  misc_feature: MA Experiment 20000436 PARAMETER Experiment Name: At_Drought_P Parameter: Timepoint (hr) Value: 12
  misc_feature: MA Experiment 20000436 PARAMETER Experiment Name: At_Drought_P Parameter: Tissue Value: Whole Plant
  misc_feature: MA Experiment 20000436 PARAMETER Experiment Name: At_Drought_P Parameter: Treatment Value: Drought vs. No Drought
  misc_feature: MA Experiment ID: 20000437 Result: Down-regulated in Transcription
  misc_feature: MA Experiment 20000437 PARAMETER Experiment Name: At_Drought_P Parameter: Age (day) Value: 8
  misc_feature: MA Experiment 20000437 PARAMETER Experiment Name: At_Drought_P Parameter: Organism Value: A. thaliana
  misc_feature: MA Experiment 20000437 PARAMETER Experiment Name: At_Drought_P Parameter: Plant Line Value: WS
  misc_feature: MA Experiment 20000437 PARAMETER Experiment Name: At_Drought_P Parameter: Timepoint (hr) Value: 24
  misc_feature: MA Experiment 20000437 PARAMETER Experiment Name: At_Drought_P Parameter: Tissue Value: Whole Plant
  misc_feature: MA Experiment 20000437 PARAMETER Experiment Name: At_Drought_P Parameter: Treatment Value: Drought vs. No Drought
  misc_feature: MA Experiment ID: 20000445 Result: Down-regulated in Transcription
  misc_feature: MA Experiment 20000445 PARAMETER Experiment Name: At_100uM_NAA__P Parameter: Age (day) Value: 14
  misc_feature: MA Experiment 20000445 PARAMETER Experiment Name: At_100uM_NAA__P Parameter: Organism Value: A. thaliana
  misc_feature: MA Experiment 20000445 PARAMETER Experiment Name: At_100uM_NAA__P Parameter: Plant Line Value: WS
  misc_feature: MA Experiment 20000445 PARAMETER Experiment Name: At_100uM_NAA__P Parameter: Timepoint (hr) Value: 6
  misc_feature: MA Experiment 20000445 PARAMETER Experiment Name: At_100uM_NAA__P Parameter: Tissue Value: Aerial
  misc_feature: MA Experiment 20000445 PARAMETER Experiment Name: At_100uM_NAA__P Parameter: Treatment Value: 100uM NAA vs. No Treatment
  misc_feature: MA Experiment ID: 20001248 Result: Down-regulated in Transcription
  misc_feature: MA Experiment 20001248 PARAMETER Experiment Name: At_Far-red-induction_P Parameter: Age (day) Value: 7
  misc_feature: MA Experiment 20001248 PARAMETER Experiment Name: At_Far-red-induction_P Parameter: Light Value: Far-red vs. White
  misc_feature: MA Experiment 20001248 PARAMETER Experiment Name: At_Far-red-induction_P Parameter: Organism Value: A. thaliana
  misc_feature: MA Experiment 20001248 PARAMETER Experiment Name: At_Far-red-induction_P Parameter: Plant Line Value: Columbia
  misc_feature: MA Experiment 20001248 PARAMETER Experiment Name: At_Far-red-induction_P Parameter: Timepoint (hr) Value: 4
  misc_feature: MA Experiment 20001248 PARAMETER Experiment Name: At_Far-red-induction_P Parameter: Tissue Value: Whole Plant
  misc_feature: MA Experiment ID: 20001451 Result: Down-regulated in Transcription
  misc_feature: MA Experiment 20001451 PARAMETER Experiment Name: At_Far-red-induction_P Parameter: Age (day) Value: 7
  misc_feature: MA Experiment 20001451 PARAMETER Experiment Name: At_Far-red-induction_P Parameter: Light Value: Far-red vs. White
  misc_feature: MA Experiment 20001451 PARAMETER Experiment Name: At_Far-red-induction_P Parameter: Organism Value: A. thaliana
  misc_feature: MA Experiment 20001451 PARAMETER Experiment Name: At_Far-red-induction_P Parameter: Plant Line Value: Columbia
  misc_feature: MA Experiment 20001451 PARAMETER Experiment Name: At_Far-red-induction_P Parameter: Timepoint (hr) Value: 24
  misc_feature: MA Experiment 20001451 PARAMETER Experiment Name: At_Far-red-induction_P Parameter: Tissue Value: Whole Plant
  misc_feature: MA Experiment ID: 20001558 Result: Up-regulated in Transcription
  misc_feature: MA Experiment 20001558 PARAMETER Experiment Name: At_Drought_Soil_Dry_P Parameter: Age (day) Value: 27
  misc_feature: MA Experiment 20001558 PARAMETER Experiment Name: At_Drought_Soil_Dry_P Parameter: Organism Value: A. thaliana
  misc_feature: MA Experiment 20001558 PARAMETER Experiment Name: At_Drought_Soil_Dry_P Parameter: Plant Line Value: WS
  misc_feature: MA Experiment 20001558 PARAMETER Experiment Name: At_Drought_Soil_Dry_P Parameter: Post Timepoint (hr) Value: 6
  misc_feature: MA Experiment 20001558 PARAMETER Experiment Name: At_Drought_Soil_Dry_P Parameter: Post-Treatment Value: Re-Water vs. No Drought
  misc_feature: MA Experiment 20001558 PARAMETER Experiment Name: At_Drought_Soil_Dry_P Parameter: Timepoint (day) Value: 13
  misc_feature: MA Experiment 20001558 PARAMETER Experiment Name: At_Drought_Soil_Dry_P Parameter: Treatment Value: Drought vs. No Drought
  misc_feature: MA Experiment ID: 20001757 Result: Up-regulated in Transcription
  misc_feature: MA Experiment 20001757 PARAMETER Experiment Name: At_50mM_NH4NO3_L-to-H_P Parameter: Timepoint (hr) Value: 6
  misc_feature: MA Experiment 20001757 PARAMETER Experiment Name: At_50mM_NH4NO3_L-to-H_P Parameter: Tissue Value: Leaf
  misc_feature: MA Experiment 20001757 PARAMETER Experiment Name: At_50mM_NH4NO3_L-to-H_P Parameter: Treatment Value: 50mM NH4NO3 vs 100mM Mannitol
  misc_feature: MA Experiment ID: 20001905 Result: Down-regulated in Transcription
  misc_feature: MA Experiment 20001905 PARAMETER Experiment Name: At_Drought_Reproduction_P Parameter: Age (day) Value: 40
  misc_feature: MA Experiment 20001905 PARAMETER Experiment Name: At_Drought_Reproduction_P Parameter: Organism Value: A. thaliana
  misc_feature: MA Experiment 20001905 PARAMETER Experiment Name: At_Drought_Reproduction_P Parameter: Plant Line Value: WS
  misc_feature: MA Experiment 20001905 PARAMETER Experiment Name: At_Drought_Reproduction_P Parameter: Timepoint (day) Value: 10
  misc_feature: MA Experiment 20001905 PARAMETER Experiment Name: At_Drought_Reproduction_P Parameter: Tissue Value: Rosettes
  misc_feature: MA Experiment 20001905 PARAMETER Experiment Name: At_Drought_Reproduction_P Parameter: Treatment Value: Drought vs. No Drought

SEQ ID NO: 32149 - protein, 285 aa, Arabidopsis thaliana; identical to SEQ ID NO: 28559
  peptide (1)..(285): Ceres Seq. ID no. 13488571
  misc_feature (27)..(281): Homolog of NCBI NO: 34902316 NR Description: Unknown protein [Oryza sativa (japonica
  misc_feature (20)..(220): Homolog of NCBI NO: 28207166 NR Description: hypothetical protein [Arabidopsis thaliana]
  misc_feature (20)..(285): Homolog of NCBI NO: 28207164 NR Description: hypothetical protein [Arabidopsis thaliana]
  misc_feature (20)..(285): Homolog of NCBI NO: 15227474 NR Description: expressed protein [Arabidopsis thaliana]

SEQ ID NO: 32150 - protein, 266 aa, Arabidopsis thaliana; identical to SEQ ID NO: 28560
  peptide (1)..(266): Ceres Seq. ID no. 13488572
  misc_feature (8)..(262): Homolog of NCBI NO: 34902316 NR Description: Unknown protein [Oryza sativa (japonica
  misc_feature (1)..(201): Homolog of NCBI NO: 28207166 NR Description: hypothetical protein [Arabidopsis thaliana]
  misc_feature (1)..(266): Homolog of NCBI NO: 28207164 NR Description: hypothetical protein [Arabidopsis thaliana]
  misc_feature (1)..(266): Homolog of NCBI NO: 15227474 NR Description: expressed protein [Arabidopsis thaliana]

SEQ ID NO: 32151 - protein, 180 aa, Arabidopsis thaliana; identical to SEQ ID NO: 28561
  peptide (1)..(180): Ceres Seq. ID no. 13488573
  misc_feature (1)..(176): Homolog of NCBI NO: 34902316 NR Description: Unknown protein [Oryza sativa (japonica
  misc_feature (1)..(115): Homolog of NCBI NO: 28207166 NR Description: hypothetical protein [Arabidopsis thaliana]
  misc_feature (1)..(180): Homolog of NCBI NO: 28207164 NR Description: hypothetical protein [Arabidopsis thaliana]
  misc_feature (1)..(180): Homolog of NCBI NO: 15227474 NR Description: expressed protein [Arabidopsis thaliana]

SEQ ID NO: 32152 - DNA, 966 bp, Arabidopsis thaliana; identical to SEQ ID NO: 28562
  misc_feature (1)..(966): Ceres Seq. ID no. 12322155
  misc_feature: MA Experiment ID: 108434 Result: Up-regulated in Transcription
  misc_feature: MA Experiment 108434 PARAMETER Experiment Name: At_Root_Tips_cDNA_P Parameter: Tissue Value: Root Tips
  misc_feature: MA Experiment ID: 108462 Result: Down-regulated in Transcription
  misc_feature: MA Experiment 108462 PARAMETER Experiment Name: At_Germinating_Seeds_cDNA_P Parameter: Age (day) Value: 2 vs. 0
  misc_feature: MA Experiment 108462 PARAMETER Experiment Name: At_Germinating_Seeds_cDNA_P Parameter: Tissue Value: Germinating Seeds
  misc_feature: MA Experiment ID: 108463 Result: Down-regulated in Transcription
  misc_feature: MA Experiment 108463 PARAMETER Experiment Name: At_Germinating_Seeds_cDNA_P Parameter: Age (day) Value: 3 vs. 0
  misc_feature: MA Experiment 108463 PARAMETER Experiment Name: At_Germinating_Seeds_cDNA_P Parameter: Tissue Value: Germinating Seeds

SEQ ID NO: 32153 - protein, 141 aa, Arabidopsis thaliana; identical to SEQ ID NO: 28563
  peptide (1)..(141): Ceres Seq. ID no. 12322156
  misc_feature (32)..(141): Homolog of NCBI NO: 15010564 NR Description: At1g51510/F5D21_5 [Arabidopsis thaliana]
  misc_feature (32)..(119): Homolog of NCBI NO: 30524687 NR Description: salt tolerance protein 4 [Beta vulgaris]
  misc_feature (32)..(120): Homolog of NCBI NO: 25405472 NR Description: probable RNA-binding protein 35994-37391
  misc_feature (32)..(120): Homolog of NCBI NO: 21536738 NR Description: RNA-binding protein, putative [Arabidopsis
  misc_feature (32)..(120): Homolog of NCBI NO: 18403559 NR Description: RNA-binding protein, putative

SEQ ID NO: 32154 - protein, 110 aa, Arabidopsis thaliana; identical to SEQ ID NO: 28564
  peptide (1)..(110): Ceres Seq. ID no. 12322157
  misc_feature (1)..(110): Homolog of NCBI NO: 15010564 NR Description: At1g51510/F5D21_5 [Arabidopsis thaliana]
  misc_feature (1)..(88): Homolog of NCBI NO: 30524687 NR Description: salt tolerance protein 4 [Beta vulgaris]
  misc_feature (1)..(89): Homolog of NCBI NO: 25405472 NR Description: probable RNA-binding protein 35994-37391
  misc_feature (1)..(89): Homolog of NCBI NO: 21536738 NR Description: RNA-binding protein, putative [Arabidopsis
  misc_feature (1)..(89): Homolog of NCBI NO: 18403559 NR Description: RNA-binding protein, putative

SEQ ID NO: 32155 - protein, 92 aa, Arabidopsis thaliana; identical to SEQ ID NO: 28565
  peptide (1)..(92): Ceres Seq. ID no. 12322158
  misc_feature (1)..(92): Homolog of NCBI NO: 15010564 NR Description: At1g51510/F5D21_5 [Arabidopsis thaliana]
  misc_feature (1)..(70): Homolog of NCBI NO: 30524687 NR Description: salt tolerance protein 4 [Beta vulgaris]
  misc_feature (1)..(71): Homolog of NCBI NO: 25405472 NR Description: probable RNA-binding protein 35994-37391
  misc_feature (1)..(71): Homolog of NCBI NO: 21536738 NR Description: RNA-binding protein, putative [Arabidopsis
  misc_feature (1)..(71): Homolog of NCBI NO: 18403559 NR Description: RNA-binding protein, putative

SEQ ID NO: 32156 - DNA, 822 bp, Arabidopsis thaliana; identical to SEQ ID NO: 28566
  misc_feature (1)..(822): Ceres Seq. ID no. 12396880
  misc_feature: MA Experiment ID: 108434 Result: Up-regulated in Transcription
  misc_feature: MA Experiment 108434 PARAMETER Experiment Name: At_Root_Tips_cDNA_P Parameter: Tissue Value: Root Tips
  misc_feature: MA Experiment ID: 108462 Result: Down-regulated in Transcription
  misc_feature: MA Experiment 108462 PARAMETER Experiment Name: At_Germinating_Seeds_cDNA_P Parameter: Age (day) Value: 2 vs. 0
  misc_feature: MA Experiment 108462 PARAMETER Experiment Name: At_Germinating_Seeds_cDNA_P Parameter: Tissue Value: Germinating Seeds
  misc_feature: MA Experiment ID: 108463 Result: Down-regulated in Transcription
  misc_feature: MA Experiment 108463 PARAMETER Experiment Name: At_Germinating_Seeds_cDNA_P Parameter: Age (day) Value: 3 vs. 0
  misc_feature: MA Experiment 108463 PARAMETER Experiment Name: At_Germinating_Seeds_cDNA_P Parameter: Tissue Value: Germinating Seeds
  misc_feature: MA Experiment ID: 108464 Result: Down-regulated in Transcription
  misc_feature: MA Experiment 108464 PARAMETER Experiment Name: At_Germinating_Seeds_cDNA_P Parameter: Age (day) Value: 4 vs. 0
  misc_feature: MA Experiment 108464 PARAMETER Experiment Name: At_Germinating_Seeds_cDNA_P Parameter: Tissue Value: Germinating Seeds
  misc_feature: MA Experiment ID: 108573 Result: Down-regulated in Transcription
  misc_feature: MA Experiment 108573 PARAMETER Experiment Name: At_Drought_cDNA_P Parameter: Timepoint (hr) Value: 6
  misc_feature: MA Experiment 108573 PARAMETER Experiment Name: At_Drought_cDNA_P Parameter: Tissue Value: Aerial
  misc_feature: MA Experiment 108573 PARAMETER Experiment Name: At_Drought_cDNA_P Parameter: Treatment Value: Drought vs. No Drought
  misc_feature: MA Experiment ID: 108605 Result: Down-regulated in Transcription
  misc_feature: MA Experiment 108605 PARAMETER Experiment Name: At_100uM_ABA_cDNA_P Parameter: Timepoint (hr) Value: 6
  misc_feature: MA Experiment 108605 PARAMETER Experiment Name: At_100uM_ABA_cDNA_P Parameter: Tissue Value: Aerial
  misc_feature: MA Experiment 108605 PARAMETER Experiment Name: At_100uM_ABA_cDNA_P Parameter: Treatment Value: 100uM ABA vs. No Treatment
  misc_feature: MA Experiment ID: 108609 Result: Down-regulated in Transcription
  misc_feature: MA Experiment 108609 PARAMETER Experiment Name: At_100uM_ABA_cDNA_P Parameter: Timepoint (hr) Value: 24
  misc_feature: MA Experiment 108609 PARAMETER Experiment Name: At_100uM_ABA_cDNA_P Parameter: Tissue Value: Aerial
  misc_feature: MA Experiment 108609 PARAMETER Experiment Name: At_100uM_ABA_cDNA_P Parameter: Treatment Value: 100uM ABA vs. No Treatment
  misc_feature: MA Experiment ID: 20000090 Result: Up-regulated in Transcription
  misc_feature: MA Experiment ID: 20000113 Result: Up-regulated in Transcription
  misc_feature: MA Experiment 20000113 PARAMETER Experiment Name: At_42deg_Heat_cDNA_P Parameter: Temperature (deg C) Value: 42 vs. 22
  misc_feature: MA Experiment 20000113 PARAMETER Experiment Name: At_42deg_Heat_cDNA_P Parameter: Timepoint (hr) Value: 8
  misc_feature: MA Experiment 20000113 PARAMETER Experiment Name: At_42deg_Heat_cDNA_P Parameter: Tissue Value: Aerial
  misc_feature: MA Experiment ID: 20000173 Result: Up-regulated in Transcription
  misc_feature: MA Experiment 20000173 PARAMETER Experiment Name: At_42deg_Heat_P Parameter: Age (day) Value: 14
  misc_feature: MA Experiment 20000173 PARAMETER Experiment Name: At_42deg_Heat_P Parameter: Organism Value: A. thaliana
  misc_feature: MA Experiment 20000173 PARAMETER Experiment Name: At_42deg_Heat_P Parameter: Plant Line Value: WS
  misc_feature: MA Experiment 20000173 PARAMETER Experiment Name: At_42deg_Heat_P Parameter: Temperature (deg C) Value: 42 vs. 22
  misc_feature: MA Experiment 20000173 PARAMETER Experiment Name: At_42deg_Heat_P Parameter: Timepoint (hr) Value: 6
  misc_feature: MA Experiment 20000173 PARAMETER Experiment Name: At_42deg_Heat_P Parameter: Tissue Value: Aerial
  misc_feature: MA Experiment ID: 20000456 Result: Up-regulated in Transcription
  misc_feature: MA Experiment 20000456 PARAMETER Experiment Name: At_100uM_BA_P Parameter: Age (day) Value: 14
  misc_feature: MA Experiment 20000456 PARAMETER Experiment Name: At_100uM_BA_P Parameter: Organism Value: A. thaliana
  misc_feature: MA Experiment 20000456 PARAMETER Experiment Name: At_100uM_BA_P Parameter: Plant Line Value: WS
  misc_feature: MA Experiment 20000456 PARAMETER Experiment Name: At_100uM_BA_P Parameter: Timepoint (hr) Value: 6
  misc_feature: MA Experiment 20000456 PARAMETER Experiment Name: At_100uM_BA_P Parameter: Tissue Value: Aerial
  misc_feature: MA Experiment 20000456 PARAMETER Experiment Name: At_100uM_BA_P Parameter: Treatment Value: 100uM BA vs. No Treatment
  misc_feature: MA Experiment ID: 20000794 Result: Down-regulated in Transcription
  misc_feature: MA Experiment 20000794 PARAMETER Experiment Name: At_Petals_P Parameter: Age (day) Value: 23-25 days
  misc_feature: MA Experiment 20000794 PARAMETER Experiment Name: At_Petals_P Parameter: Plant Line Value: WS
  misc_feature: MA Experiment 20000794 PARAMETER Experiment Name: At_Petals_P Parameter: Tissue Value: Petals vs. Whole plant
  misc_feature: MA Experiment ID: 20001458 Result: Up-regulated in Transcription
  misc_feature: MA Experiment 20001458 PARAMETER Experiment Name: At_50mM_NH4NO3_L-to-H_P Parameter: Age (day) Value: Undefined
  misc_feature: MA Experiment 20001458 PARAMETER Experiment Name: At_50mM_NH4NO3_L-to-H_P Parameter: Organism Value: Undefined
  misc_feature: MA Experiment 20001458 PARAMETER Experiment Name: At_50mM_NH4NO3_L-to-H_P Parameter: Plant Line Value: Undefined
  misc_feature: MA Experiment 20001458 PARAMETER Experiment Name: At_50mM_NH4NO3_L-to-H_P Parameter: Timepoint (hr) Value: 2
  misc_feature: MA Experiment 20001458 PARAMETER Experiment Name: At_50mM_NH4NO3_L-to-H_P Parameter: Tissue Value: Siliques
  misc_feature: MA Experiment 20001458 PARAMETER Experiment Name: At_50mM_NH4NO3_L-to-H_P Parameter: Treatment Value: 50mM NH4NO3 vs. 100mM Manitol
  misc_feature: MA Experiment ID: 20001557 Result: Up-regulated in Transcription
  misc_feature: MA Experiment 20001557 PARAMETER Experiment Name: At_Drought_Soil_Dry_P Parameter: Age (day) Value: 27
  misc_feature: MA Experiment 20001557 PARAMETER Experiment Name: At_Drought_Soil_Dry_P Parameter: Organism Value: A. thaliana
  misc_feature: MA Experiment 20001557 PARAMETER Experiment Name: At_Drought_Soil_Dry_P Parameter: Plant Line Value: WS
  misc_feature: MA Experiment 20001557 PARAMETER Experiment Name: At_Drought_Soil_Dry_P Parameter: Post Timepoint (hr) Value: 3
  misc_feature: MA Experiment 20001557 PARAMETER Experiment Name: At_Drought_Soil_Dry_P Parameter: Post-Treatment Value: Re-Water vs. No Drought
  misc_feature: MA Experiment 20001557 PARAMETER Experiment Name: At_Drought_Soil_Dry_P Parameter: Timepoint (day) Value: 13
  misc_feature: MA Experiment 20001557 PARAMETER Experiment Name: At_Drought_Soil_Dry_P Parameter: Treatment Value: Drought vs. No Drought
  misc_feature: MA Experiment ID: 20001558 Result: Up-regulated in Transcription
  misc_feature: MA Experiment 20001558 PARAMETER Experiment Name: At_Drought_Soil_Dry_P Parameter: Age (day) Value: 27
  misc_feature: MA Experiment 20001558 PARAMETER Experiment Name: At_Drought_Soil_Dry_P Parameter: Organism Value: A. thaliana
  misc_feature: MA Experiment 20001558 PARAMETER Experiment Name: At_Drought_Soil_Dry_P Parameter: Plant Line Value: WS
  misc_feature: MA Experiment 20001558 PARAMETER Experiment Name: At_Drought_Soil_Dry_P Parameter: Post Timepoint (hr) Value: 6
  misc_feature: MA Experiment 20001558 PARAMETER Experiment Name: At_Drought_Soil_Dry_P Parameter: Post-Treatment Value: Re-Water vs. No Drought
  misc_feature: MA Experiment 20001558 PARAMETER Experiment Name: At_Drought_Soil_Dry_P Parameter: Timepoint (day) Value: 13
  misc_feature: MA Experiment 20001558 PARAMETER Experiment Name: At_Drought_Soil_Dry_P Parameter: Treatment Value: Drought vs. No Drought
  misc_feature: MA Experiment ID: 20001757 Result: Up-regulated in Transcription
  misc_feature: MA Experiment 20001757 PARAMETER Experiment Name: At_50mM_NH4NO3_L-to-H_P Parameter: Timepoint (hr) Value: 6
  misc_feature: MA Experiment 20001757 PARAMETER Experiment Name: At_50mM_NH4NO3_L-to-H_P Parameter: Tissue Value: Leaf
  misc_feature: MA Experiment 20001757 PARAMETER Experiment Name: At_50mM_NH4NO3_L-to-H_P Parameter: Treatment Value: 50mM NH4NO3 vs 100mM Mannitol

SEQ ID NO: 32157 - protein, 202 aa, Arabidopsis thaliana; identical to SEQ ID NO: 28567
  peptide (1)..(202): Ceres Seq. ID no. 12396881
  misc_feature (51)..(152): Pfam Name: Gar1 protein RNA binding region Pfam Description: Gar1 protein RNA binding region
  misc_feature (6)..(200): Homolog of NCBI NO: 28279152 NR Description: Similar to nucleolar protein family A, member 1
  misc_feature (7)..(200): Homolog of NCBI NO: 26344814 NR Description: unnamed protein product [Mus musculus]
  misc_feature (7)..(200): Homolog of NCBI NO: 13384710 NR Description: nucleolar protein family A, member 1
  misc_feature (7)..(200): Homolog of NCBI NO: 28913737 NR Description: Similar to nucleolar protein family A, member 1
  misc_feature (6)..(200): Homolog of NCBI NO: 18256903 NR Description: Similar to nucleolar protein family A, member 1
  misc_feature (7)..(200): Homolog of NCBI NO: 9506713 NR Description: nucleolar protein family A, member 1; GAR1
  misc_feature (1)..(201): Homolog of NCBI NO: 15238764 NR Description: putative protein; protein id: At5g18180.1
  misc_feature (1)..(201): Homolog of NCBI NO: 6006850 NR Description: putative GAR1 protein [Arabidopsis thaliana]
  misc_feature (1)..(202): Homolog of NCBI NO: 21536739 NR Description: putative GAR1 protein [Arabidopsis thaliana]
  misc_feature (1)..(202): Homolog of NCBI NO: 18396707 NR Description: putative GAR1 protein

SEQ ID NO: 32158 - protein, 198 aa, Arabidopsis thaliana; identical to SEQ ID NO: 28568
  peptide (1)..(198): Ceres Seq. ID no. 12396882
  misc_feature (47)..(148): Pfam Name: Gar1 protein RNA binding region Pfam Description: Gar1 protein RNA binding region
  misc_feature (2)..(196): Homolog of NCBI NO: 28279152 NR Description: Similar to nucleolar protein family A, member 1
  misc_feature (3)..(196): Homolog of NCBI NO: 26344814 NR Description: unnamed protein product [Mus musculus]
  misc_feature (3)..(196): Homolog of NCBI NO: 13384710 NR Description: nucleolar protein family A, member 1
  misc_feature (3)..(196): Homolog of NCBI NO: 28913737 NR Description: Similar to nucleolar protein family A, member 1
  misc_feature (2)..(196): Homolog of NCBI NO: 18256903 NR Description: Similar to nucleolar protein family A, member 1
  misc_feature (3)..(196): Homolog of NCBI NO: 9506713 NR Description: nucleolar protein family A, member 1; GAR1
  misc_feature (1)..(197): Homolog of NCBI NO: 15238764 NR Description: putative protein; protein id: At5g18180.1
  misc_feature (1)..(197): Homolog of NCBI NO: 6006850 NR Description: putative GAR1 protein [Arabidopsis thaliana]
  misc_feature (1)..(198): Homolog of NCBI NO: 21536739 NR Description: putative GAR1 protein [Arabidopsis thaliana]
  misc_feature (1)..(198): Homolog of NCBI NO: 18396707 NR Description: putative GAR1 protein

SEQ ID NO: 32159 - DNA, 847 bp, Arabidopsis thaliana; identical to SEQ ID NO: 28569
  misc_feature (1)..(847): Ceres Seq. ID no. 13496902
  misc_feature: MA Experiment ID: 108434 Result: Down-regulated in Transcription
  misc_feature: MA Experiment 108434 PARAMETER Experiment Name: At_Root_Tips_cDNA_P Parameter: Tissue Value: Root Tips
  misc_feature: MA Experiment ID: 108461 Result: Up-regulated in Transcription
  misc_feature: MA Experiment 108461 PARAMETER Experiment Name: At_Germinating_Seeds_cDNA_P Parameter: Age (day) Value: 1 vs. 0
  misc_feature: MA Experiment 108461 PARAMETER Experiment Name: At_Germinating_Seeds_cDNA_P Parameter: Tissue Value: Germinating Seeds
  misc_feature: MA Experiment ID: 108462 Result: Up-regulated in Transcription
  misc_feature: MA Experiment 108462 PARAMETER Experiment Name: At_Germinating_Seeds_cDNA_P Parameter: Age (day) Value: 2 vs. 0
  misc_feature: MA Experiment 108462 PARAMETER Experiment Name: At_Germinating_Seeds_cDNA_P Parameter: Tissue Value: Germinating Seeds
  misc_feature: MA Experiment ID: 20000071 Result: Down-regulated in Transcription
  misc_feature: MA Experiment 20000071 PARAMETER Experiment Name: At_100uM_ABA_Mutants_cDNA_P Parameter: Plant Line Value: CS8104
  misc_feature: MA Experiment 20000071 PARAMETER Experiment Name: At_100uM_ABA_Mutants_cDNA_P Parameter: Timepoint (hr) Value: 6
  misc_feature: MA Experiment 20000071 PARAMETER Experiment Name: At_100uM_ABA_Mutants_cDNA_P Parameter: Tissue Value: Aerial
  misc_feature: MA Experiment 20000071 PARAMETER Experiment Name: At_100uM_ABA_Mutants_cDNA_P Parameter: Treatment Value: 100uM ABA vs. No Treatment
  misc_feature: MA Experiment ID: 20000086 Result: Down-regulated in Transcription
  misc_feature: MA Experiment 20000086 PARAMETER Experiment Name: At_100uM_ABA_Mutants_cDNA_P Parameter: Plant Line Value: CS22
  misc_feature: MA Experiment 20000086 PARAMETER Experiment Name: At_100uM_ABA_Mutants_cDNA_P Parameter: Timepoint (hr) Value: 6
  misc_feature: MA Experiment 20000086 PARAMETER Experiment Name: At_100uM_ABA_Mutants_cDNA_P Parameter: Tissue Value: Aerial
  misc_feature: MA Experiment 20000086 PARAMETER Experiment Name: At_100uM_ABA_Mutants_cDNA_P Parameter: Treatment Value: 100uM ABA vs. No Treatment
  misc_feature: MA Experiment ID: 20000089 Result: Down-regulated in Transcription
  misc_feature: MA Experiment ID: 20000090 Result: Down-regulated in Transcription
  misc_feature: MA Experiment ID: 20000117 Result: Down-regulated in Transcription
  misc_feature: MA Experiment 20000117 PARAMETER Experiment Name: At_100uM_ABA_Mutants_cDNA_P Parameter: Plant Line Value: Columbia
  misc_feature: MA Experiment 20000117 PARAMETER Experiment Name: At_100uM_ABA_Mutants_cDNA_P Parameter: Timepoint (hr) Value: 6
  misc_feature: MA Experiment 20000117 PARAMETER Experiment Name: At_100uM_ABA_Mutants_cDNA_P Parameter: Tissue Value: Aerial
  misc_feature: MA Experiment 20000117 PARAMETER Experiment Name: At_100uM_ABA_Mutants_cDNA_P Parameter: Treatment Value: 100uM ABA vs. No Treatment
  misc_feature: MA Experiment ID: 20000185 Result: Down-regulated in Transcription
  misc_feature: MA Experiment 20000185 PARAMETER Experiment Name: At_Roots__P Parameter: Age (day) Value: 7 vs. 21
  misc_feature: MA Experiment 20000185 PARAMETER Experiment Name: At_Roots__P Parameter: Organism Value: A. thaliana
  misc_feature: MA Experiment 20000185 PARAMETER Experiment Name: At_Roots__P Parameter: Tissue Value: Roots vs. Whole Plant
  misc_feature: MA Experiment ID: 20000234 Result: Up-regulated in Transcription
  misc_feature: MA Experiment 20000234 PARAMETER Experiment Name: At_Siliques_P Parameter: Age (day) Value: 21
  misc_feature: MA Experiment 20000234 PARAMETER Experiment Name: At_Siliques_P Parameter: Organism Value: A. thaliana
  misc_feature: MA Experiment 20000234 PARAMETER Experiment Name: At_Siliques_P Parameter: Plant Line Value: WS
  misc_feature: MA Experiment 20000234 PARAMETER Experiment Name: At_Siliques_P Parameter: Tissue Value: Less Than 5mm Siliques vs. Whole Plant
  misc_feature: MA Experiment ID: 20000264 Result: Up-regulated in Transcription
  misc_feature: MA Experiment 20000264 PARAMETER Experiment Name: At_Open_Flower_P Parameter: Age (day) Value: 21
  misc_feature: MA Experiment 20000264 PARAMETER Experiment Name: At_Open_Flower_P Parameter: Plant Line Value: WS
  misc_feature: MA Experiment 20000264 PARAMETER Experiment Name: At_Open_Flower_P Parameter: Tissue Value: Open Flower vs. Whole Plant
  misc_feature: MA Experiment ID: 20000286 Result: Up-regulated in Transcription
  misc_feature: MA Experiment 20000286 PARAMETER Experiment Name: At_Open_Flower_P Parameter: Age (day) Value: 21
  misc_feature: MA Experiment 20000286 PARAMETER Experiment Name: At_Open_Flower_P Parameter: Plant Line Value: WS
  misc_feature: MA Experiment 20000286 PARAMETER Experiment Name: At_Open_Flower_P Parameter: Tissue Value: Half Open vs. Whole Plant
  misc_feature: MA Experiment ID: 20000436 Result: Down-regulated in Transcription
  misc_feature: MA Experiment 20000436 PARAMETER Experiment Name: At_Drought_P Parameter: Age (day) Value: 7
  misc_feature: MA Experiment 20000436 PARAMETER Experiment Name: At_Drought_P Parameter: Organism Value: A. thaliana
  misc_feature: MA Experiment 20000436 PARAMETER Experiment Name: At_Drought_P Parameter: Plant Line Value: WS
  misc_feature: MA Experiment 20000436 PARAMETER Experiment Name: At_Drought_P Parameter: Timepoint (hr) Value: 12
  misc_feature: MA Experiment 20000436 PARAMETER Experiment Name: At_Drought_P Parameter: Tissue Value: Whole Plant
  misc_feature: MA Experiment 20000436 PARAMETER Experiment Name: At_Drought_P Parameter: Treatment Value: Drought vs. No Drought
  misc_feature: MA Experiment ID: 20000439 Result: Down-regulated in Transcription
  misc_feature: MA Experiment 20000439 PARAMETER Experiment Name: At_Roots__P Parameter: Age (day) Value: 14 vs. 21
  misc_feature: MA Experiment 20000439 PARAMETER Experiment Name: At_Roots__P Parameter: Organism Value: A. thaliana
  misc_feature: MA Experiment 20000439 PARAMETER Experiment Name: At_Roots__P Parameter: Tissue Value: Roots vs. Whole Plant
  misc_feature: MA Experiment ID: 20000445 Result: Down-regulated in Transcription
  misc_feature: MA Experiment 20000445 PARAMETER Experiment Name: At_100uM_NAA__P Parameter: Age (day) Value: 14
  misc_feature: MA Experiment 20000445 PARAMETER Experiment Name: At_100uM_NAA__P Parameter: Organism Value: A. thaliana
  misc_feature: MA Experiment 20000445 PARAMETER Experiment Name: At_100uM_NAA__P Parameter: Plant Line Value: WS
  misc_feature: MA Experiment 20000445 PARAMETER Experiment Name: At_100uM_NAA__P Parameter: Timepoint (hr) Value: 6
  misc_feature: MA Experiment 20000445 PARAMETER Experiment Name: At_100uM_NAA__P Parameter: Tissue Value: Aerial
  misc_feature: MA Experiment 20000445 PARAMETER Experiment Name: At_100uM_NAA__P Parameter: Treatment Value: 100uM NAA vs. No Treatment
  misc_feature: MA Experiment ID: 20000573 Result: Down-regulated in Transcription
  misc_feature: MA Experiment 20000573 PARAMETER Experiment Name: At_100uM_ABA_Mutants__P Parameter: Organism Value: A. thaliana
  misc_feature: MA Experiment 20000573 PARAMETER Experiment Name: At_100uM_ABA_Mutants__P Parameter: Plant Line Value: CS22 vs. Ler wt
  misc_feature: MA Experiment 20000573 PARAMETER Experiment Name: At_100uM_ABA_Mutants__P Parameter: Timepoint (hr) Value: N/A
  misc_feature: MA Experiment 20000573 PARAMETER Experiment Name: At_100uM_ABA_Mutants__P Parameter: Tissue Value: Whole Plant
  misc_feature: MA Experiment 20000573 PARAMETER Experiment Name: At_100uM_ABA_Mutants__P Parameter: Treatment Value: None
  misc_feature: MA Experiment ID: 20000794 Result: Up-regulated in Transcription
  misc_feature: MA Experiment 20000794 PARAMETER Experiment Name: At_Petals_P Parameter: Age (day) Value: 23-25 days
  misc_feature: MA Experiment 20000794 PARAMETER Experiment Name: At_Petals_P Parameter: Plant Line Value: WS
  misc_feature: MA Experiment 20000794 PARAMETER Experiment Name: At_Petals_P Parameter: Tissue Value: Petals vs. Whole plant
  misc_feature: MA Experiment ID: 20001247 Result: Up-regulated in Transcription
  misc_feature: MA Experiment 20001247 PARAMETER Experiment Name: At_Far-red-induction_P Parameter: Age (day) Value: 7
  misc_feature: MA Experiment 20001247 PARAMETER Experiment Name: At_Far-red-induction_P Parameter: Light Value: Far-red vs. White
  misc_feature: MA Experiment 20001247 PARAMETER Experiment Name: At_Far-red-induction_P Parameter: Organism Value: A. thaliana
  misc_feature: MA Experiment 20001247 PARAMETER Experiment Name: At_Far-red-induction_P Parameter: Plant Line Value: Columbia
  misc_feature: MA Experiment 20001247 PARAMETER Experiment Name: At_Far-red-induction_P Parameter: Timepoint (hr) Value: 1
  misc_feature: MA Experiment 20001247 PARAMETER Experiment Name: At_Far-red-induction_P Parameter: Tissue Value: Whole Plant
  misc_feature: MA Experiment ID: 20001248 Result: Down-regulated in Transcription
  misc_feature: MA Experiment 20001248 PARAMETER Experiment Name: At_Far-red-induction_P Parameter: Age (day) Value: 7
  misc_feature: MA Experiment 20001248 PARAMETER Experiment Name: At_Far-red-induction_P Parameter: Light Value: Far-red vs. White
  misc_feature: MA Experiment 20001248 PARAMETER Experiment Name: At_Far-red-induction_P Parameter: Organism Value: A. thaliana
  misc_feature: MA Experiment 20001248 PARAMETER Experiment Name: At_Far-red-induction_P Parameter: Plant Line Value: Columbia
  misc_feature: MA Experiment 20001248 PARAMETER Experiment Name: At_Far-red-induction_P Parameter: Timepoint (hr) Value: 4
  misc_feature: MA Experiment 20001248 PARAMETER Experiment Name: At_Far-red-induction_P Parameter: Tissue Value: Whole Plant
  misc_feature: MA Experiment ID: 20001756 Result: Up-regulated in Transcription
  misc_feature: MA Experiment 20001756 PARAMETER Experiment Name: At_50mM_NH4NO3_L-to-H_P Parameter: Timepoint (hr) Value: 4
  misc_feature: MA Experiment 20001756 PARAMETER Experiment Name: At_50mM_NH4NO3_L-to-H_P Parameter: Tissue Value: Leaf
  misc_feature: MA Experiment 20001756 PARAMETER Experiment Name: At_50mM_NH4NO3_L-to-H_P Parameter: Treatment Value: 50mM NH4NO3 vs 100mM Mannitol
  misc_feature: MA Experiment ID: 20001757 Result: Up-regulated in Transcription
  misc_feature: MA Experiment 20001757 PARAMETER Experiment Name: At_50mM_NH4NO3_L-to-H_P Parameter: Timepoint (hr) Value: 6
  misc_feature: MA Experiment 20001757 PARAMETER Experiment Name: At_50mM_NH4NO3_L-to-H_P Parameter: Tissue Value: Leaf
  misc_feature: MA Experiment 20001757 PARAMETER Experiment Name: At_50mM_NH4NO3_L-to-H_P Parameter: Treatment Value: 50mM NH4NO3 vs 100mM Mannitol
  misc_feature: MA Experiment ID: 20001905 Result: Down-regulated in Transcription
  misc_feature: MA Experiment 20001905 PARAMETER Experiment Name: At_Drought_Reproduction_P Parameter: Age (day) Value: 40
  misc_feature: MA Experiment 20001905 PARAMETER Experiment Name: At_Drought_Reproduction_P Parameter: Organism Value: A. thaliana
  misc_feature: MA Experiment 20001905 PARAMETER Experiment Name: At_Drought_Reproduction_P Parameter: Plant Line Value: WS
  misc_feature: MA Experiment 20001905 PARAMETER Experiment Name: At_Drought_Reproduction_P Parameter: Timepoint (day) Value: 10
  misc_feature: MA Experiment 20001905 PARAMETER Experiment Name: At_Drought_Reproduction_P Parameter: Tissue Value: Rosettes
  misc_feature: MA Experiment 20001905 PARAMETER Experiment Name: At_Drought_Reproduction_P Parameter: Treatment Value: Drought vs. No Drought
  misc_feature: MA Experiment ID: 20001911 Result: Down-regulated in Transcription
  misc_feature: MA Experiment 20001911 PARAMETER Experiment Name: At_Drought_Reproduction_P Parameter: Age (day) Value: 40
  misc_feature: MA Experiment 20001911 PARAMETER Experiment Name: At_Drought_Reproduction_P Parameter: Organism Value: A. thaliana
  misc_feature: MA Experiment 20001911 PARAMETER Experiment Name: At_Drought_Reproduction_P Parameter: Plant Line Value: WS
  misc_feature: MA Experiment 20001911 PARAMETER Experiment Name: At_Drought_Reproduction_P Parameter: Timepoint (day) Value: 10
  misc_feature: MA Experiment 20001911 PARAMETER Experiment Name: At_Drought_Reproduction_P Parameter: Tissue Value: Flowers
  misc_feature: MA Experiment 20001911 PARAMETER Experiment Name: At_Drought_Reproduction_P Parameter: Treatment Value: Drought vs. No Drought

SEQ ID NO: 32160 - protein, 183 aa, Arabidopsis thaliana; identical to SEQ ID NO: 28570
  peptide (1)..(183): Ceres Seq. ID no. 13496903
  misc_feature (9)..(181): Homolog of NCBI NO: 15238973 NR Description: adenine phosphoribosyltransferase - like protein
  misc_feature (5)..(181): Homolog of NCBI NO: 30689934 NR Description: adenine phosphoribosyltransferase 1, APRT
  misc_feature (9)..(181): Homolog of NCBI NO: 9711921 NR Description: Adenine phosphoribosyltransferase [Hordeum
  misc_feature (9)..(181): Homolog of NCBI NO: 2499932 NR Description: Adenine phosphoribosyltransferase 1 (APRT)
  misc_feature (1)..(181): Homolog of NCBI NO: 18396344 NR Description: adenine phosphoribosyltransferase 1, APRT
  misc_feature (5)..(180): Homolog of NCBI NO: 32492063 NR Description: adenine phosphoribosyltransferase [Brassica napus]
  misc_feature (5)..(181): Homolog of NCBI NO: 33354190 NR Description: putative adenine phosphoribosyl transferase
  misc_feature (1)..(183): Homolog of NCBI NO: 15234553 NR Description: adenine phosphoribosyltransferase -related
  misc_feature (1)..(183): Homolog of NCBI NO: 21536749 NR Description: adenine phosphoribosyltransferase (EC
  misc_feature (1)..(183): Homolog of NCBI NO: 15235709 NR Description: adenine phosphoribosyltransferase (EC 2.4.2.7) -

SEQ ID NO: 32161 - protein, 153 aa, Arabidopsis thaliana; identical to SEQ ID NO: 28571
  peptide (1)..(153): Ceres Seq. ID no. 13496904
  misc_feature (1)..(151): Homolog of NCBI NO: 15238973 NR Description: adenine phosphoribosyltransferase - like protein
  misc_feature (1)..(151): Homolog of NCBI NO: 30689934 NR Description: adenine phosphoribosyltransferase 1, APRT
  misc_feature (1)..(151): Homolog of NCBI NO: 9711921 NR Description: Adenine phosphoribosyltransferase [Hordeum
  misc_feature (1)..(151): Homolog of NCBI NO: 2499932 NR Description: Adenine phosphoribosyltransferase 1 (APRT)
  misc_feature (1)..(151): Homolog of NCBI NO: 18396344 NR Description: adenine phosphoribosyltransferase 1, APRT
  misc_feature (1)..(150): Homolog of NCBI NO: 32492063 NR Description: adenine phosphoribosyltransferase [Brassica napus]
  misc_feature (1)..(151): Homolog of NCBI NO: 33354190 NR Description: putative adenine phosphoribosyl transferase
  misc_feature (1)..(153): Homolog of NCBI NO: 15234553 NR Description: adenine phosphoribosyltransferase -related
  misc_feature (1)..(153): Homolog of NCBI NO: 21536749 NR Description: adenine phosphoribosyltransferase (EC
  misc_feature (1)..(153): Homolog of NCBI NO: 15235709 NR Description: adenine phosphoribosyltransferase (EC 2.4.2.7) -

SEQ ID NO: 32162 - DNA, 1072 bp, Arabidopsis thaliana; identical to SEQ ID NO: 28572
  misc_feature (1)..(1072): Ceres Seq. ID no. 13622027
  misc_feature: MA Experiment ID: 20000090 Result: Down-regulated in Transcription
  misc_feature: MA Experiment ID: 20000171 Result: Down-regulated in Transcription
  misc_feature: MA Experiment 20000171 PARAMETER Experiment Name: At_42deg_Heat_P Parameter: Age (day) Value: 14
  misc_feature: MA Experiment 20000171 PARAMETER Experiment Name: At_42deg_Heat_P Parameter: Organism Value: A. thaliana
  misc_feature: MA Experiment 20000171 PARAMETER Experiment Name: At_42deg_Heat_P Parameter: Plant Line Value: WS
  misc_feature: MA Experiment 20000171 PARAMETER Experiment Name: At_42deg_Heat_P Parameter: Temperature (deg C) Value: 42 vs. 22
  misc_feature: MA Experiment 20000171 PARAMETER Experiment Name: At_42deg_Heat_P Parameter: Timepoint (hr) Value: 1
  misc_feature: MA Experiment 20000171 PARAMETER Experiment Name: At_42deg_Heat_P Parameter: Tissue Value: Aerial
  misc_feature: MA Experiment ID: 20000173 Result: Down-regulated in Transcription
  misc_feature: MA Experiment 20000173 PARAMETER Experiment Name: At_42deg_Heat_P Parameter: Age (day) Value: 14
  misc_feature: MA Experiment 20000173 PARAMETER Experiment Name: At_42deg_Heat_P Parameter: Organism Value: A. thaliana
  misc_feature: MA Experiment 20000173 PARAMETER Experiment Name: At_42deg_Heat_P Parameter: Plant Line Value: WS
  misc_feature: MA Experiment 20000173 PARAMETER Experiment Name: At_42deg_Heat_P Parameter: Temperature (deg C) Value: 42 vs. 22
  misc_feature: MA Experiment 20000173 PARAMETER Experiment Name: At_42deg_Heat_P Parameter: Timepoint (hr) Value: 6
  misc_feature: MA Experiment 20000173 PARAMETER Experiment Name: At_42deg_Heat_P Parameter: Tissue Value: Aerial
  misc_feature: MA Experiment ID: 20000182 Result: Down-regulated in Transcription
  misc_feature: MA Experiment 20000182 PARAMETER Experiment Name: At_2mM_SA_P Parameter: Age (day) Value: 14
  misc_feature: MA Experiment 20000182 PARAMETER Experiment Name: At_2mM_SA_P Parameter: Organism Value: A. thaliana
  misc_feature: MA Experiment 20000182 PARAMETER Experiment Name: At_2mM_SA_P Parameter: Plant Line Value: WS
  misc_feature: MA Experiment 20000182 PARAMETER Experiment Name: At_2mM_SA_P Parameter: Timepoint (hr) Value: 6
  misc_feature: MA Experiment 20000182 PARAMETER Experiment Name: At_2mM_SA_P Parameter: Tissue Value: Aerial
  misc_feature: MA Experiment 20000182 PARAMETER Experiment Name: At_2mM_SA_P Parameter: Treatment Value: 2mM SA vs. No Treatment
  misc_feature: MA Experiment ID: 20000184 Result: Up-regulated in Transcription
  misc_feature: MA Experiment 20000184 PARAMETER Experiment Name: At_Shoots__P Parameter: Age (day) Value: 7
  misc_feature: MA Experiment 20000184 PARAMETER Experiment Name: At_Shoots__P Parameter: Tissue Value: Shoots vs. Whole Plant
  misc_feature: MA Experiment ID: 20000227 Result: Up-regulated in Transcription
  misc_feature: MA Experiment 20000227 PARAMETER Experiment Name: At_Root-Tips-vs-Tops_P Parameter: Tissue Value: Root Tips vs. Root Tops
  misc_feature: MA Experiment ID: 20000264 Result: Up-regulated in Transcription
  misc_feature: MA Experiment 20000264 PARAMETER Experiment Name: At_Open_Flower_P Parameter: Age (day) Value: 21
  misc_feature: MA Experiment 20000264 PARAMETER Experiment Name: At_Open_Flower_P Parameter: Plant Line Value: WS
  misc_feature: MA Experiment 20000264 PARAMETER Experiment Name: At_Open_Flower_P Parameter: Tissue Value: Open Flower vs. Whole Plant
  misc_feature: MA Experiment ID: 20000265 Result: Up-regulated in Transcription
  misc_feature: MA Experiment 20000265 PARAMETER Experiment Name: At_Open_Flower_P Parameter: Age (day) Value: 21
  misc_feature: MA Experiment 20000265 PARAMETER Experiment Name: At_Open_Flower_P Parameter: Plant Line Value: WS
  misc_feature: MA Experiment 20000265 PARAMETER Experiment Name: At_Open_Flower_P Parameter: Tissue Value: Closed Flower vs. Whole Plant
  misc_feature: MA Experiment ID: 20000286 Result: Up-regulated in Transcription
  misc_feature: MA Experiment 20000286 PARAMETER Experiment Name: At_Open_Flower_P Parameter: Age (day) Value: 21
  misc_feature: MA Experiment 20000286 PARAMETER Experiment Name: At_Open_Flower_P Parameter: Plant Line Value: WS
  misc_feature: MA Experiment 20000286 PARAMETER Experiment Name: At_Open_Flower_P Parameter: Tissue Value: Half Open vs. Whole Plant
  misc_feature: MA Experiment ID: 20000438 Result: Up-regulated in Transcription
  misc_feature: MA Experiment 20000438 PARAMETER Experiment Name: At_Shoots__P Parameter: Age (day) Value: 14
  misc_feature: MA Experiment 20000438 PARAMETER Experiment Name: At_Shoots__P Parameter: Tissue Value: Shoots vs. Whole Plant
  misc_feature: MA Experiment ID: 20000443 Result: Down-regulated in Transcription
  misc_feature: MA Experiment 20000443 PARAMETER Experiment Name: At_1uM_BR-BRZ__P Parameter: Tissue Value: Shoot Apices
  misc_feature: MA Experiment 20000443 PARAMETER Experiment Name: At_1uM_BR-BRZ__P Parameter: Treatment Value: 1uM BRZ vs. No Treatment
  misc_feature: MA Experiment ID: 20000460 Result: Up-regulated in Transcription
  misc_feature: MA Experiment 20000460 PARAMETER Experiment Name: At_10percent_PEG_P Parameter: Age (day) Value: 12
  misc_feature: MA Experiment 20000460 PARAMETER Experiment Name: At_10percent_PEG_P Parameter: Organism Value: A. thaliana
  misc_feature: MA Experiment 20000460 PARAMETER Experiment Name: At_10percent_PEG_P Parameter: Plant Line Value: WS
  misc_feature: MA Experiment 20000460 PARAMETER Experiment Name: At_10percent_PEG_P Parameter: Timepoint (day) Value: 12
  misc_feature: MA Experiment 20000460 PARAMETER Experiment Name: At_10percent_PEG_P Parameter: Tissue Value: Whole Plant
  misc_feature: MA Experiment 20000460 PARAMETER Experiment Name: At_10percent_PEG_P Parameter: Treatment Value: 10percent PEG vs. No Treatment
  misc_feature: MA Experiment ID: 20000527 Result: Up-regulated in Transcription
  misc_feature: MA Experiment 20000527 PARAMETER Experiment Name: At_10percent_PEG_P Parameter: Age (day) Value: 20
  misc_feature: MA Experiment 20000527 PARAMETER Experiment Name: At_10percent_PEG_P Parameter: Organism Value: A. thaliana
  misc_feature: MA Experiment 20000527 PARAMETER Experiment Name: At_10percent_PEG_P Parameter: Plant Line Value: WS
  misc_feature: MA Experiment 20000527 PARAMETER Experiment Name: At_10percent_PEG_P Parameter: Timepoint (day) Value: 20
  misc_feature: MA Experiment 20000527 PARAMETER Experiment Name: At_10percent_PEG_P Parameter: Tissue Value: Whole Plant
  misc_feature: MA Experiment 20000527 PARAMETER Experiment Name: At_10percent_PEG_P Parameter: Treatment Value: 10percent PEG vs. No Treatment
  misc_feature: MA Experiment ID: 20000573 Result: Down-regulated in Transcription
  misc_feature: MA Experiment 20000573 PARAMETER Experiment Name: At_100uM_ABA_Mutants__P Parameter: Organism Value: A. thaliana
  misc_feature: MA Experiment 20000573 PARAMETER Experiment Name: At_100uM_ABA_Mutants__P Parameter: Plant Line Value: CS22 vs. Ler wt
  misc_feature: MA Experiment 20000573 PARAMETER Experiment Name: At_100uM_ABA_Mutants__P Parameter: Timepoint (hr) Value: N/A
  misc_feature: MA Experiment 20000573 PARAMETER Experiment Name: At_100uM_ABA_Mutants__P Parameter: Tissue Value: Whole Plant
  misc_feature: MA Experiment 20000573 PARAMETER Experiment Name: At_100uM_ABA_Mutants__P Parameter: Treatment Value: None
  misc_feature: MA Experiment ID: 20000574 Result: Down-regulated in Transcription
  misc_feature: MA Experiment 20000574 PARAMETER Experiment Name: At_100uM_ABA_Mutants__P Parameter: Organism Value: A. thaliana
  misc_feature: MA Experiment 20000574 PARAMETER Experiment Name: At_100uM_ABA_Mutants__P Parameter: Plant Line Value: CS23 vs. Ler wt
  misc_feature: MA Experiment 20000574 PARAMETER Experiment Name: At_100uM_ABA_Mutants__P Parameter: Timepoint (hr) Value: N/A
  misc_feature: MA Experiment 20000574 PARAMETER Experiment Name: At_100uM_ABA_Mutants__P Parameter: Tissue Value: Whole Plant
  misc_feature: MA Experiment 20000574 PARAMETER Experiment Name: At_100uM_ABA_Mutants__P Parameter: Treatment Value: None
  misc_feature: MA Experiment ID: 20000794 Result: Up-regulated in Transcription
  misc_feature: MA Experiment 20000794 PARAMETER Experiment Name: At_Petals_P Parameter: Age (day) Value: 23-25 days
  misc_feature: MA Experiment 20000794 PARAMETER Experiment Name: At_Petals_P Parameter: Plant Line Value: WS
  misc_feature: MA Experiment 20000794 PARAMETER Experiment Name: At_Petals_P Parameter: Tissue Value: Petals vs. Whole plant
  misc_feature: MA Experiment ID: 20001450 Result: Up-regulated in Transcription
  misc_feature: MA Experiment 20001450 PARAMETER Experiment Name: At_Far-red-induction_P Parameter: Age (day) Value: 7
  misc_feature: MA Experiment 20001450 PARAMETER Experiment Name: At_Far-red-induction_P Parameter: Light Value: Far-red vs. White
  misc_feature: MA Experiment 20001450 PARAMETER Experiment Name: At_Far-red-induction_P Parameter: Organism Value: A. thaliana
  misc_feature: MA Experiment 20001450 PARAMETER Experiment Name: At_Far-red-induction_P Parameter: Plant Line Value: Columbia
  misc_feature: MA Experiment 20001450 PARAMETER Experiment Name: At_Far-red-induction_P Parameter: Timepoint (hr) Value: 8
  misc_feature: MA Experiment 20001450 PARAMETER Experiment Name: At_Far-red-induction_P Parameter: Tissue Value: Whole Plant
  misc_feature: MA Experiment ID: 20001557 Result: Down-regulated in Transcription
  misc_feature: MA Experiment 20001557 PARAMETER Experiment Name: At_Drought_Soil_Dry_P Parameter: Age (day) Value: 27
  misc_feature: MA Experiment 20001557 PARAMETER Experiment Name: At_Drought_Soil_Dry_P Parameter: Organism Value: A. thaliana
  misc_feature: MA Experiment 20001557 PARAMETER Experiment Name: At_Drought_Soil_Dry_P Parameter: Plant Line Value: WS
  misc_feature: MA Experiment 20001557 PARAMETER Experiment Name: At_Drought_Soil_Dry_P Parameter: Post Timepoint (hr) Value: 3
  misc_feature: MA Experiment 20001557 PARAMETER Experiment Name: At_Drought_Soil_Dry_P Parameter: Post-Treatment Value: Re-Water vs. No Drought
  misc_feature: MA Experiment 20001557 PARAMETER Experiment Name: At_Drought_Soil_Dry_P Parameter: Timepoint (day) Value: 13
  misc_feature: MA Experiment 20001557 PARAMETER Experiment Name: At_Drought_Soil_Dry_P Parameter: Treatment Value: Drought vs. No Drought

SEQ ID NO: 32163 - protein, 210 aa, Arabidopsis thaliana; identical to SEQ ID NO: 28573
  peptide (1)..(210): Ceres Seq. ID no. 13622028
  misc_feature (118)..(195): Pfam Name: Pollen allergen Pfam Description: Pollen allergen
  misc_feature (1)..(210): Homolog of NCBI NO: 21536750 NR Description: Alpha-expansin 11 precursor (At-EXP11) (AtEx11)
  misc_feature (1)..(210): Homolog of NCBI NO: 15223799 NR Description: expansin, putative (EXP11) [Arabidopsis thaliana]

SEQ ID NO: 32164 - protein, 193 aa, Arabidopsis thaliana; identical to SEQ ID NO: 28574
  peptide (1)..(193): Ceres Seq. ID no. 13622029
  misc_feature (101)..(178): Pfam Name: Pollen allergen Pfam Description: Pollen allergen
  misc_feature (1)..(193): Homolog of NCBI NO: 21536750 NR Description: Alpha-expansin 11 precursor (At-EXP11) (AtEx11)
  misc_feature (1)..(193): Homolog of NCBI NO: 15223799 NR Description: expansin, putative (EXP11) [Arabidopsis thaliana]

SEQ ID NO: 32165 - protein, 124 aa, Arabidopsis thaliana; identical to SEQ ID NO: 28575
  peptide (1)..(124): Ceres Seq. ID no. 13622030
  misc_feature (32)..(109): Pfam Name: Pollen allergen Pfam Description: Pollen allergen
  misc_feature (1)..(124): Homolog of NCBI NO: 21536750 NR Description: Alpha-expansin 11 precursor (At-EXP11) (AtEx11)
  misc_feature (1)..(124): Homolog of NCBI NO: 15223799 NR Description: expansin, putative (EXP11) [Arabidopsis thaliana]

SEQ ID NO: 32166 - DNA, 1748 bp, Arabidopsis thaliana; identical to SEQ ID NO: 28576
  misc_feature (1)..(1748): Ceres Seq. ID no. 13580541
  misc_feature: MA Experiment ID: 108462 Result: Up-regulated in Transcription
  misc_feature: MA Experiment 108462 PARAMETER Experiment Name: At_Germinating_Seeds_cDNA_P Parameter: Age (day) Value: 2 vs. 0
  misc_feature: MA Experiment 108462 PARAMETER Experiment Name: At_Germinating_Seeds_cDNA_P Parameter: Tissue Value: Germinating Seeds
  misc_feature: MA Experiment ID: 108463 Result: Up-regulated in Transcription
  misc_feature: MA Experiment 108463 PARAMETER Experiment Name: At_Germinating_Seeds_cDNA_P Parameter: Age (day) Value: 3 vs. 0
  misc_feature: MA Experiment 108463 PARAMETER Experiment Name: At_Germinating_Seeds_cDNA_P Parameter: Tissue Value: Germinating Seeds
  misc_feature: MA Experiment ID: 108464 Result: Up-regulated in Transcription
  misc_feature: MA Experiment 108464 PARAMETER Experiment Name: At_Germinating_Seeds_cDNA_P Parameter: Age (day) Value: 4 vs. 0
  misc_feature: MA Experiment 108464 PARAMETER Experiment Name: At_Germinating_Seeds_cDNA_P Parameter: Tissue Value: Germinating Seeds
  misc_feature: MA Experiment ID: 108561 Result: Up-regulated in Transcription
  misc_feature: MA Experiment 108561 PARAMETER Experiment Name: At_100uM_ABA_cDNA_P Parameter: Timepoint (hr) Value: 6
  misc_feature: MA Experiment 108561 PARAMETER Experiment Name: At_100uM_ABA_cDNA_P Parameter: Tissue Value: Aerial
  misc_feature: MA Experiment 108561 PARAMETER Experiment Name: At_100uM_ABA_cDNA_P Parameter: Treatment Value: 100uM ABA vs. No Treatment
  misc_feature: MA Experiment ID: 108572 Result: Up-regulated in Transcription
  misc_feature: MA Experiment 108572 PARAMETER Experiment Name: At_Drought_cDNA_P Parameter: Timepoint (hr) Value: 1
  misc_feature: MA Experiment 108572 PARAMETER Experiment Name: At_Drought_cDNA_P Parameter: Tissue Value: Aerial
  misc_feature: MA Experiment 108572 PARAMETER Experiment Name: At_Drought_cDNA_P Parameter: Treatment Value: Drought vs. No Drought
  misc_feature: MA Experiment ID: 108573 Result: Up-regulated in Transcription
  misc_feature: MA Experiment 108573 PARAMETER Experiment Name: At_Drought_cDNA_P Parameter: Timepoint (hr) Value: 6
  misc_feature: MA Experiment 108573 PARAMETER Experiment Name: At_Drought_cDNA_P Parameter: Tissue Value: Aerial
  misc_feature: MA Experiment 108573 PARAMETER Experiment Name: At_Drought_cDNA_P Parameter: Treatment Value: Drought vs. No Drought
  misc_feature: MA Experiment ID: 108595 Result: Down-regulated in Transcription
  misc_feature: MA Experiment 108595 PARAMETER Experiment Name: At_Ler-pi_Ovule_cDNA_P Parameter: Plant Line Value: null
  misc_feature: MA Experiment ID: 108605 Result: Up-regulated in Transcription
  misc_feature: MA Experiment 108605 PARAMETER Experiment Name: At_100uM_ABA_cDNA_P Parameter: Timepoint (hr) Value: 6
  misc_feature: MA Experiment 108605 PARAMETER Experiment Name: At_100uM_ABA_cDNA_P Parameter: Tissue Value: Aerial
  misc_feature: MA Experiment 108605 PARAMETER Experiment Name: At_100uM_ABA_cDNA_P Parameter: Treatment Value: 100uM ABA vs. No Treatment
  misc_feature: MA Experiment ID: 108607 Result: Up-regulated in Transcription
  misc_feature: MA Experiment 108607 PARAMETER Experiment Name: At_100uM_ABA_cDNA_P Parameter: Timepoint (hr) Value: 4
  misc_feature: MA Experiment 108607 PARAMETER Experiment Name: At_100uM_ABA_cDNA_P Parameter: Tissue Value: Aerial
  misc_feature: MA Experiment 108607 PARAMETER Experiment Name: At_100uM_ABA_cDNA_P Parameter: Treatment Value: 100uM ABA vs. No Treatment
  misc_feature: MA Experiment ID: 108609 Result: Up-regulated in Transcription
  misc_feature: MA Experiment 108609 PARAMETER Experiment Name: At_100uM_ABA_cDNA_P Parameter: Timepoint (hr) Value: 24
  misc_feature: MA Experiment 108609 PARAMETER Experiment Name: At_100uM_ABA_cDNA_P Parameter: Tissue Value: Aerial
  misc_feature: MA Experiment 108609 PARAMETER Experiment Name: At_100uM_ABA_cDNA_P Parameter: Treatment Value: 100uM ABA vs. No Treatment
  misc_feature: MA Experiment ID: 20000069 Result: Up-regulated in Transcription
  misc_feature: MA Experiment 20000069 PARAMETER Experiment Name: At_100uM_ABA_Mutants_cDNA_P Parameter: Plant Line Value: CS23
  misc_feature: MA Experiment 20000069 PARAMETER Experiment Name: At_100uM_ABA_Mutants_cDNA_P Parameter: Timepoint (hr) Value: 6
  misc_feature: MA Experiment 20000069 PARAMETER Experiment Name: At_100uM_ABA_Mutants_cDNA_P Parameter: Tissue Value: Aerial
  misc_feature: MA Experiment 20000069 PARAMETER Experiment Name: At_100uM_ABA_Mutants_cDNA_P Parameter: Treatment Value: 100uM ABA vs. No Treatment
  misc_feature: MA Experiment ID: 20000070 Result: Up-regulated in Transcription
  misc_feature: MA Experiment 20000070 PARAMETER Experiment Name: At_100uM_ABA_Mutants_cDNA_P Parameter: Plant Line Value: CS24
  misc_feature: MA Experiment 20000070 PARAMETER Experiment Name: At_100uM_ABA_Mutants_cDNA_P Parameter: Timepoint (hr) Value: 6
  misc_feature: MA Experiment 20000070 PARAMETER Experiment Name: At_100uM_ABA_Mutants_cDNA_P Parameter: Tissue Value: Aerial
  misc_feature: MA Experiment 20000070 PARAMETER Experiment Name: At_100uM_ABA_Mutants_cDNA_P Parameter: Treatment Value: 100uM ABA vs. No Treatment
  misc_feature: MA Experiment ID: 20000071 Result: Up-regulated in Transcription
  misc_feature: MA Experiment 20000071 PARAMETER Experiment Name: At_100uM_ABA_Mutants_cDNA_P Parameter: Plant Line Value: CS8104
  misc_feature: MA Experiment 20000071 PARAMETER Experiment Name: At_100uM_ABA_Mutants_cDNA_P Parameter: Timepoint (hr) Value: 6
  misc_feature: MA Experiment 20000071 PARAMETER Experiment Name: At_100uM_ABA_Mutants_cDNA_P Parameter: Tissue Value: Aerial
  misc_feature: MA Experiment 20000071 PARAMETER Experiment Name: At_100uM_ABA_Mutants_cDNA_P Parameter: Treatment Value: 100uM ABA vs. No Treatment
  misc_feature: MA Experiment ID: 20000072 Result: Up-regulated in Transcription
  misc_feature: MA Experiment 20000072 PARAMETER Experiment Name: At_100uM_ABA_Mutants_cDNA_P Parameter: Plant Line Value: CS8105
  misc_feature: MA Experiment 20000072 PARAMETER Experiment Name: At_100uM_ABA_Mutants_cDNA_P Parameter: Timepoint (hr) Value: 6
  misc_feature: MA Experiment 20000072 PARAMETER Experiment Name: At_100uM_ABA_Mutants_cDNA_P Parameter: Tissue Value: Aerial
  misc_feature: MA Experiment 20000072 PARAMETER Experiment Name: At_100uM_ABA_Mutants_cDNA_P Parameter: Treatment Value: 100uM ABA vs. No Treatment
  misc_feature: MA Experiment ID: 20000086 Result: Up-regulated in Transcription
  misc_feature: MA Experiment 20000086 PARAMETER Experiment Name: At_100uM_ABA_Mutants_cDNA_P Parameter: Plant Line Value: CS22
  misc_feature: MA Experiment 20000086 PARAMETER Experiment Name: At_100uM_ABA_Mutants_cDNA_P Parameter: Timepoint (hr) Value: 6
  misc_feature: MA Experiment 20000086 PARAMETER Experiment Name: At_100uM_ABA_Mutants_cDNA_P Parameter: Tissue Value: Aerial
  misc_feature: MA Experiment 20000086 PARAMETER Experiment Name: At_100uM_ABA_Mutants_cDNA_P Parameter: Treatment Value: 100uM ABA vs. No Treatment
  misc_feature: MA Experiment ID: 20000087 Result: Up-regulated in Transcription
  misc_feature: MA Experiment 20000087 PARAMETER Experiment Name: At_100uM_ABA_Mutants_cDNA_P Parameter: Plant Line Value: WS
  misc_feature: MA Experiment 20000087 PARAMETER Experiment Name: At_100uM_ABA_Mutants_cDNA_P Parameter: Timepoint (hr) Value: 6
  misc_feature: MA Experiment 20000087 PARAMETER Experiment Name: At_100uM_ABA_Mutants_cDNA_P Parameter: Tissue Value: Aerial
  misc_feature: MA Experiment 20000087 PARAMETER Experiment Name: At_100uM_ABA_Mutants_cDNA_P Parameter: Treatment Value: 100uM ABA vs. No Treatment
  misc_feature: MA Experiment ID: 20000088 Result: Up-regulated in Transcription
  misc_feature: MA Experiment 20000088 PARAMETER Experiment Name: At_100uM_ABA_Mutants_cDNA_P Parameter: Plant Line Value: Landsberg
  misc_feature: MA Experiment 20000088 PARAMETER Experiment Name: At_100uM_ABA_Mutants_cDNA_P Parameter: Timepoint (hr) Value: 6
  misc_feature: MA Experiment 20000088 PARAMETER Experiment Name: At_100uM_ABA_Mutants_cDNA_P Parameter: Tissue Value: Aerial
  misc_feature: MA Experiment 20000088 PARAMETER Experiment Name: At_100uM_ABA_Mutants_cDNA_P Parameter: Treatment Value: 100uM ABA vs. No Treatment
  misc_feature: MA Experiment ID: 20000113 Result: Down-regulated in Transcription
  misc_feature: MA Experiment 20000113 PARAMETER Experiment Name: At_42deg_Heat_cDNA_P Parameter: Temperature (deg C) Value: 42 vs. 22
  misc_feature: MA Experiment 20000113 PARAMETER Experiment Name: At_42deg_Heat_cDNA_P Parameter: Timepoint (hr) Value: 8
  misc_feature: MA Experiment 20000113 PARAMETER Experiment Name: At_42deg_Heat_cDNA_P Parameter: Tissue Value: Aerial
  misc_feature: MA Experiment ID: 20000117 Result: Up-regulated in Transcription
  misc_feature: MA Experiment 20000117 PARAMETER Experiment Name: At_100uM_ABA_Mutants_cDNA_P Parameter: Plant Line Value: Columbia
  misc_feature: MA Experiment 20000117 PARAMETER Experiment Name: At_100uM_ABA_Mutants_cDNA_P Parameter: Timepoint (hr) Value: 6
  misc_feature: MA Experiment 20000117 PARAMETER Experiment Name: At_100uM_ABA_Mutants_cDNA_P Parameter: Tissue Value: Aerial
  misc_feature: MA Experiment 20000117 PARAMETER Experiment Name: At_100uM_ABA_Mutants_cDNA_P Parameter: Treatment Value: 100uM ABA vs. No Treatment
  misc_feature: MA Experiment ID: 20000169 Result: Up-regulated in Transcription
  misc_feature: MA Experiment 20000169 PARAMETER Experiment Name: At_100uM_ABA_P Parameter: Age (day) Value: 14
  misc_feature: MA Experiment 20000169 PARAMETER Experiment Name: At_100uM_ABA_P Parameter: Organism Value: A. thaliana
  misc_feature: MA Experiment 20000169 PARAMETER Experiment Name: At_100uM_ABA_P Parameter: Plant Line Value: WS
  misc_feature: MA Experiment 20000169 PARAMETER Experiment Name: At_100uM_ABA_P Parameter: Timepoint (hr) Value: 6
  misc_feature: MA Experiment 20000169 PARAMETER Experiment Name: At_100uM_ABA_P Parameter: Tissue Value: Aerial
  misc_feature: MA Experiment 20000169 PARAMETER Experiment Name: At_100uM_ABA_P Parameter: Treatment Value: 100uM ABA vs. No Treatment
  misc_feature: MA Experiment ID: 20000180 Result: Up-regulated in Transcription
  misc_feature: MA Experiment 20000180 PARAMETER Experiment Name: At_Germinating_Seeds_P Parameter: Age (hr) Value: 24 vs. 0
  misc_feature: MA Experiment 20000180 PARAMETER Experiment Name: At_Germinating_Seeds_P Parameter: Tissue Value: Germinating Seeds
  misc_feature: MA Experiment ID: 20000184 Result: Down-regulated in Transcription
  misc_feature: MA Experiment 20000184 PARAMETER Experiment Name: At_Shoots__P Parameter: Age (day) Value: 7
  misc_feature: MA Experiment 20000184 PARAMETER Experiment Name: At_Shoots__P Parameter: Tissue Value: Shoots vs. Whole Plant
  misc_feature: MA Experiment ID: 20000224 Result: Up-regulated in Transcription
  misc_feature: MA Experiment ID: 20000234 Result: Down-regulated in Transcription
  misc_feature: MA Experiment 20000234 PARAMETER Experiment Name: At_Siliques_P Parameter: Age (day) Value: 21
  misc_feature: MA Experiment 20000234 PARAMETER Experiment Name: At_Siliques_P Parameter: Organism Value: A. thaliana
  misc_feature: MA Experiment 20000234 PARAMETER Experiment Name: At_Siliques_P Parameter: Plant Line Value: WS
  misc_feature: MA Experiment 20000234 PARAMETER Experiment Name: At_Siliques_P Parameter: Tissue Value: Less Than 5mm Siliques vs. Whole Plant
  misc_feature: MA Experiment ID: 20000267 Result: Up-regulated in Transcription
  misc_feature: MA Experiment 20000267 PARAMETER Experiment Name: At_Drought_P Parameter: Age (day) Value: 7
  misc_feature: MA Experiment 20000267 PARAMETER Experiment Name: At_Drought_P Parameter: Organism Value: A. thaliana
  misc_feature: MA Experiment 20000267 PARAMETER Experiment Name: At_Drought_P Parameter: Plant Line Value: WS
  misc_feature: MA Experiment 20000267 PARAMETER Experiment Name: At_Drought_P Parameter: Timepoint (hr) Value: 6
  misc_feature: MA Experiment 20000267 PARAMETER Experiment Name: At_Drought_P Parameter: Tissue Value: Whole Plant
  misc_feature: MA Experiment 20000267 PARAMETER Experiment Name: At_Drought_P Parameter: Treatment Value: Drought vs. No Drought
  misc_feature: MA Experiment ID: 20000268 Result: Up-regulated in Transcription
  misc_feature: MA Experiment 20000268 PARAMETER Experiment Name: At_100mM_NaCl__P Parameter: Age (day) Value: 14
  misc_feature: MA Experiment 20000268 PARAMETER Experiment Name: At_100mM_NaCl__P Parameter: Organism Value: A. thaliana
  misc_feature: MA Experiment 20000268 PARAMETER Experiment Name: At_100mM_NaCl__P Parameter: Plant Line Value: WS
  misc_feature: MA Experiment 20000268 PARAMETER Experiment Name: At_100mM_NaCl__P Parameter: Timepoint (hr) Value: 6
  misc_feature: MA Experiment 20000268 PARAMETER Experiment Name: At_100mM_NaCl__P Parameter: Tissue Value: Whole Plant
  misc_feature: MA Experiment 20000268 PARAMETER Experiment Name: At_100mM_NaCl__P Parameter: Treatment Value: 100mM NaCl vs. No Treatment
  misc_feature: MA Experiment ID: 20000436 Result: Up-regulated in Transcription
  misc_feature: MA Experiment 20000436 PARAMETER Experiment Name: At_Drought_P Parameter: Age (day) Value: 7
  misc_feature: MA Experiment 20000436 PARAMETER Experiment Name: At_Drought_P Parameter: Organism Value: A. thaliana
  misc_feature: MA Experiment 20000436 PARAMETER Experiment Name: At_Drought_P Parameter: Plant Line Value: WS
  misc_feature: MA Experiment 20000436 PARAMETER Experiment Name: At_Drought_P Parameter: Timepoint (hr) Value: 12
  misc_feature: MA Experiment 20000436 PARAMETER Experiment Name: At_Drought_P Parameter: Tissue Value: Whole Plant
  misc_feature: MA Experiment 20000436 PARAMETER Experiment Name: At_Drought_P Parameter: Treatment Value: Drought vs. No Drought
  misc_feature: MA Experiment ID: 20000437 Result: Up-regulated in Transcription
  misc_feature: MA Experiment 20000437 PARAMETER Experiment Name: At_Drought_P Parameter: Age (day) Value: 8
  misc_feature: MA Experiment 20000437 PARAMETER Experiment Name: At_Drought_P Parameter: Organism Value: A. thaliana
  misc_feature: MA Experiment 20000437 PARAMETER Experiment Name: At_Drought_P Parameter: Plant Line Value: WS
  misc_feature: MA Experiment 20000437 PARAMETER Experiment Name: At_Drought_P Parameter: Timepoint (hr) Value: 24
  misc_feature: MA Experiment 20000437 PARAMETER Experiment Name: At_Drought_P Parameter: Tissue Value: Whole Plant
  misc_feature: MA Experiment 20000437 PARAMETER Experiment Name: At_Drought_P Parameter: Treatment Value: Drought vs. No Drought
  misc_feature: MA Experiment ID: 20000439 Result: Down-regulated in Transcription
  misc_feature: MA Experiment 20000439 PARAMETER Experiment Name: At_Roots__P Parameter: Age (day) Value: 14 vs. 21
  misc_feature: MA Experiment 20000439 PARAMETER Experiment Name: At_Roots__P Parameter: Organism Value: A. thaliana
  misc_feature: MA Experiment 20000439 PARAMETER Experiment Name: At_Roots__P Parameter: Tissue Value: Roots vs. Whole Plant
  misc_feature: MA Experiment ID: 20000453 Result: Up-regulated in Transcription
  misc_feature: MA Experiment 20000453 PARAMETER Experiment Name: At_100uM_ABA_P Parameter: Age (day) Value: 15
  misc_feature: MA Experiment 20000453 PARAMETER Experiment Name: At_100uM_ABA_P Parameter: Organism Value: A. thaliana
  misc_feature: MA Experiment 20000453 PARAMETER Experiment Name: At_100uM_ABA_P Parameter: Plant Line Value: WS
  misc_feature: MA Experiment 20000453 PARAMETER Experiment Name: At_100uM_ABA_P Parameter: Timepoint (hr) Value: 24
  misc_feature: MA Experiment 20000453 PARAMETER Experiment Name: At_100uM_ABA_P Parameter: Tissue Value: Aerial
  misc_feature: MA Experiment 20000453 PARAMETER Experiment Name: At_100uM_ABA_P Parameter: Treatment Value: 100uM ABA vs. No Treatment
  misc_feature: MA Experiment ID: 20000495 Result: Down-regulated in Transcription
  misc_feature: MA Experiment 20000495 PARAMETER Experiment Name: At_Guard_Cells_P Parameter: Harvest Date Value: 8/2/2002
  misc_feature: MA Experiment 20000495 PARAMETER Experiment Name: At_Guard_Cells_P Parameter: Organism Value: A. thaliana
  misc_feature: MA Experiment 20000495 PARAMETER Experiment Name: At_Guard_Cells_P Parameter: Tissue Value: Guard Cells vs. Leaves
  misc_feature: MA Experiment ID: 20001451 Result: Down-regulated in Transcription
  misc_feature: MA Experiment 20001451 PARAMETER Experiment Name: At_Far-red-induction_P Parameter: Age (day) Value: 7
  misc_feature: MA Experiment 20001451 PARAMETER Experiment Name: At_Far-red-induction_P Parameter: Light Value: Far-red vs. White
  misc_feature: MA Experiment 20001451 PARAMETER Experiment Name: At_Far-red-induction_P Parameter: Organism Value: A. thaliana
  misc_feature: MA Experiment 20001451 PARAMETER Experiment Name: At_Far-red-induction_P Parameter: Plant Line Value: Columbia
  misc_feature: MA Experiment 20001451 PARAMETER Experiment Name: At_Far-red-induction_P Parameter: Timepoint (hr) Value: 24
  misc_feature: MA Experiment 20001451 PARAMETER Experiment Name: At_Far-red-induction_P Parameter: Tissue Value: Whole Plant
  misc_feature: MA Experiment ID: 20001554 Result: Up-regulated in Transcription
  misc_feature: MA Experiment 20001554 PARAMETER Experiment Name: At_Drought_Soil_Dry_P Parameter: Age (day) Value: 21
  misc_feature: MA Experiment 20001554 PARAMETER Experiment Name: At_Drought_Soil_Dry_P Parameter: Organism Value: A. thaliana
  misc_feature: MA Experiment 20001554 PARAMETER Experiment Name: At_Drought_Soil_Dry_P Parameter: Plant Line Value: WS
  misc_feature: MA Experiment 20001554 PARAMETER Experiment Name: At_Drought_Soil_Dry_P Parameter: Post Timepoint (hr) Value: None
  misc_feature: MA Experiment 20001554 PARAMETER Experiment Name: At_Drought_Soil_Dry_P Parameter: Post-Treatment Value: None
  misc_feature: MA Experiment 20001554 PARAMETER Experiment Name: At_Drought_Soil_Dry_P Parameter: Timepoint (day) Value: 7
  misc_feature: MA Experiment 20001554 PARAMETER Experiment Name: At_Drought_Soil_Dry_P Parameter: Treatment Value: Drought vs. No Drought
  misc_feature: MA Experiment ID: 20001555 Result: Up-regulated in Transcription
  misc_feature: MA Experiment 20001555 PARAMETER Experiment Name: At_Drought_Soil_Dry_P Parameter: Age (day) Value: 24
  misc_feature: MA Experiment 20001555 PARAMETER Experiment Name: At_Drought_Soil_Dry_P Parameter: Organism Value: A. thaliana
  misc_feature: MA Experiment 20001555 PARAMETER Experiment Name: At_Drought_Soil_Dry_P Parameter: Plant Line Value: WS
  misc_feature: MA Experiment 20001555 PARAMETER Experiment Name: At_Drought_Soil_Dry_P Parameter: Post Timepoint (hr) Value: None
  misc_feature: MA Experiment 20001555 PARAMETER Experiment Name: At_Drought_Soil_Dry_P Parameter: Post-Treatment Value: None
  misc_feature: MA Experiment 20001555 PARAMETER Experiment Name: At_Drought_Soil_Dry_P Parameter: Timepoint (day) Value: 10
  misc_feature: MA Experiment 20001555 PARAMETER Experiment Name: At_Drought_Soil_Dry_P Parameter: Treatment Value: Drought vs. No Drought
  misc_feature: MA Experiment ID: 20001558 Result: Down-regulated in Transcription
  misc_feature: MA Experiment 20001558 PARAMETER Experiment Name: At_Drought_Soil_Dry_P Parameter: Age (day) Value: 27
  misc_feature: MA Experiment 20001558 PARAMETER Experiment Name: At_Drought_Soil_Dry_P Parameter: Organism Value: A. thaliana
  misc_feature: MA Experiment 20001558 PARAMETER Experiment Name: At_Drought_Soil_Dry_P Parameter: Plant Line Value: WS
  misc_feature: MA Experiment 20001558 PARAMETER Experiment Name: At_Drought_Soil_Dry_P Parameter: Post Timepoint (hr) Value: 6
  misc_feature: MA Experiment 20001558 PARAMETER Experiment Name: At_Drought_Soil_Dry_P Parameter: Post-Treatment Value: Re-Water vs. No Drought
  misc_feature: MA Experiment 20001558 PARAMETER Experiment Name: At_Drought_Soil_Dry_P Parameter: Timepoint (day) Value: 13
  misc_feature: MA Experiment 20001558 PARAMETER Experiment Name: At_Drought_Soil_Dry_P Parameter: Treatment Value: Drought vs. No Drought
  misc_feature: MA Experiment ID: 20001559 Result: Up-regulated in Transcription
  misc_feature: MA Experiment 20001559 PARAMETER Experiment Name: At_Drought_Soil_Dry_P Parameter: Age (day) Value: 28
  misc_feature: MA Experiment 20001559 PARAMETER Experiment Name: At_Drought_Soil_Dry_P Parameter: Organism Value: A. thaliana
  misc_feature: MA Experiment 20001559 PARAMETER Experiment Name: At_Drought_Soil_Dry_P Parameter: Plant Line Value: WS
  misc_feature: MA Experiment 20001559 PARAMETER Experiment Name: At_Drought_Soil_Dry_P Parameter: Post Timepoint (hr) Value: 29
  misc_feature: MA Experiment 20001559 PARAMETER Experiment Name: At_Drought_Soil_Dry_P Parameter: Post-Treatment Value: Re-Water vs. No Drought
  misc_feature: MA Experiment 20001559 PARAMETER Experiment Name: At_Drought_Soil_Dry_P Parameter: Timepoint (day) Value: 14
  misc_feature: MA Experiment 20001559 PARAMETER Experiment Name: At_Drought_Soil_Dry_P Parameter: Treatment Value: Drought vs. No Drought
  misc_feature: MA Experiment ID: 20001904 Result: Up-regulated in Transcription
  misc_feature: MA Experiment 20001904 PARAMETER Experiment Name: At_Drought_Reproduction_P Parameter: Age (day) Value: 37
  misc_feature: MA Experiment 20001904 PARAMETER Experiment Name: At_Drought_Reproduction_P Parameter: Organism Value: A. thaliana
  misc_feature: MA Experiment 20001904 PARAMETER Experiment Name: At_Drought_Reproduction_P Parameter: Plant Line Value: WS
  misc_feature: MA Experiment 20001904 PARAMETER Experiment Name: At_Drought_Reproduction_P Parameter: Timepoint (day) Value: 7
  misc_feature: MA Experiment 20001904 PARAMETER Experiment Name: At_Drought_Reproduction_P Parameter: Tissue Value: Rosettes
  misc_feature: MA Experiment 20001904 PARAMETER Experiment Name: At_Drought_Reproduction_P Parameter: Treatment Value: Drought vs. No Drought
  misc_feature: MA Experiment ID: 20001905 Result: Up-regulated in Transcription
  misc_feature: MA Experiment 20001905 PARAMETER Experiment Name: At_Drought_Reproduction_P Parameter: Age (day) Value: 40
  misc_feature: MA Experiment 20001905 PARAMETER Experiment Name: At_Drought_Reproduction_P Parameter: Organism Value: A. thaliana
  misc_feature: MA Experiment 20001905 PARAMETER Experiment Name: At_Drought_Reproduction_P Parameter: Plant Line Value: WS
  misc_feature: MA Experiment 20001905 PARAMETER Experiment Name: At_Drought_Reproduction_P Parameter: Timepoint (day) Value: 10
  misc_feature: MA Experiment 20001905 PARAMETER Experiment Name: At_Drought_Reproduction_P Parameter: Tissue Value: Rosettes
  misc_feature: MA Experiment 20001905 PARAMETER Experiment Name: At_Drought_Reproduction_P Parameter: Treatment Value: Drought vs. No Drought

SEQ ID NO: 32167 - protein, 553 aa, Arabidopsis thaliana; identical to SEQ ID NO: 28577
  peptide (1)..(553): Ceres Seq. ID no. 13580542
  misc_feature (103)..(212): Pfam Name: Rieske [2Fe-2S] domain Pfam Description: Rieske [2Fe-2S] domain
  misc_feature (40)..(550): Homolog of NCBI NO: 30102998 NR Description: putative cell death suppressor protein
  misc_feature (37)..(537): Homolog of NCBI NO: 1935912 NR Description: lethal leaf-spot 1 [Zea mays]
  misc_feature (64)..(553): Homolog of NCBI NO: 15451611 NR Description: Putative cell death suppressor protein [Oryza
  misc_feature (93)..(553): Homolog of NCBI NO: 1935909 NR Description: lethal leaf-spot 1 [Zea mays]
  misc_feature (37)..(553): Homolog of NCBI NO: 7489721 NR Description: cell death suppressor protein lls1 - maize
  misc_feature (18)..(553): Homolog of NCBI NO: 30088964 NR Description: lethal leaf spot 1-like protein [Vigna
  misc_feature (18)..(553): Homolog of NCBI NO: 16973465 NR Description: lethal leaf spot 1-like protein [Lycopersicon
  misc_feature (45)..(553): Homolog of NCBI NO: 1935914 NR Description: lethal leaf-spot 1 homolog [Arabidopsis thaliana]
  misc_feature (17)..(553): Homolog of NCBI NO: 37962886 NR Description: accelerated cell death 1 [Arabidopsis thaliana]
  misc_feature (17)..(553): Homolog of NCBI NO: 15230543 NR Description: Rieske [2Fe-2S] domain-containing protein

SEQ ID NO: 32168 - protein, 537 aa, Arabidopsis thaliana; identical to SEQ ID NO: 28578
  peptide (1)..(537): Ceres Seq. ID no. 13580543
  misc_feature (87)..(196): Pfam Name: Rieske [2Fe-2S] domain Pfam Description: Rieske [2Fe-2S] domain
  misc_feature (24)..(534): Homolog of NCBI NO: 30102998 NR Description: putative cell death suppressor protein
  misc_feature (21)..(521): Homolog of NCBI NO: 1935912 NR Description: lethal leaf-spot 1 [Zea mays]
  misc_feature (48)..(537): Homolog of NCBI NO: 15451611 NR Description: Putative cell death suppressor protein [Oryza
  misc_feature (77)..(537): Homolog of NCBI NO: 1935909 NR Description: lethal leaf-spot 1 [Zea mays]
  misc_feature (21)..(537): Homolog of NCBI NO: 7489721 NR Description: cell death suppressor protein lls1 - maize
  misc_feature (2)..(537): Homolog of NCBI NO: 30088964 NR Description: lethal leaf spot 1-like protein [Vigna
  misc_feature (2)..(537): Homolog of NCBI NO: 16973465 NR Description: lethal leaf spot 1-like protein [Lycopersicon
  misc_feature (29)..(537): Homolog of NCBI NO: 1935914 NR Description: lethal leaf-spot 1 homolog [Arabidopsis thaliana]
  misc_feature (1)..(537): Homolog of NCBI NO: 37962886 NR Description: accelerated cell death 1 [Arabidopsis thaliana]
  misc_feature (1)..(537): Homolog of NCBI NO: 15230543 NR Description: Rieske [2Fe-2S] domain-containing protein

SEQ ID NO: 32169 - protein, 346 aa, Arabidopsis thaliana; identical to SEQ ID NO: 28579
  peptide (1)..(346): Ceres Seq. ID no. 13580544
  misc_feature (1)..(343): Homolog of NCBI NO: 30102998 NR Description: putative cell death suppressor protein
  misc_feature (1)..(330): Homolog of NCBI NO: 1935912 NR Description: lethal leaf-spot 1 [Zea mays]
  misc_feature (1)..(346): Homolog of NCBI NO: 15451611 NR Description: Putative cell death suppressor protein [Oryza
  misc_feature (1)..(346): Homolog of NCBI NO: 1935909 NR Description: lethal leaf-spot 1 [Zea mays]
  misc_feature (1)..(346): Homolog of NCBI NO: 7489721 NR Description: cell death suppressor protein lls1 - maize
  misc_feature (1)..(346): Homolog of NCBI NO: 30088964 NR Description: lethal leaf spot 1-like protein [Vigna
  misc_feature (1)..(346): Homolog of NCBI NO: 16973465 NR Description: lethal leaf spot 1-like protein [Lycopersicon
  misc_feature (1)..(346): Homolog of NCBI NO: 1935914 NR Description: lethal leaf-spot 1 homolog [Arabidopsis thaliana]
  misc_feature (1)..(346): Homolog of NCBI NO: 37962886 NR Description: accelerated cell death 1 [Arabidopsis thaliana]
  misc_feature (1)..(346): Homolog of NCBI NO: 15230543 NR Description: Rieske [2Fe-2S] domain-containing protein

SEQ ID NO: 32170 - DNA, 895 bp, Arabidopsis thaliana; identical to SEQ ID NO: 28580
  misc_feature (1)..(895): Ceres Seq. ID no. 12482479
  misc_feature: MA Experiment ID: 20000180 Result: Up-regulated in Transcription
  misc_feature: MA Experiment 20000180 PARAMETER Experiment Name: At_Germinating_Seeds_P Parameter: Age (hr) Value: 24 vs. 0
  misc_feature: MA Experiment 20000180 PARAMETER Experiment Name: At_Germinating_Seeds_P Parameter: Tissue Value: Germinating Seeds
  misc_feature: MA Experiment ID: 20000264 Result: Up-regulated in Transcription
  misc_feature: MA Experiment 20000264 PARAMETER Experiment Name: At_Open_Flower_P Parameter: Age (day) Value: 21
  misc_feature: MA Experiment 20000264 PARAMETER Experiment Name: At_Open_Flower_P Parameter: Plant Line Value: WS
  misc_feature: MA Experiment 20000264 PARAMETER Experiment Name: At_Open_Flower_P Parameter: Tissue Value: Open Flower vs. Whole Plant
  misc_feature: MA Experiment ID: 20000265 Result: Up-regulated in Transcription
  misc_feature: MA Experiment 20000265 PARAMETER Experiment Name: At_Open_Flower_P Parameter: Age (day) Value: 21
  misc_feature: MA Experiment 20000265 PARAMETER Experiment Name: At_Open_Flower_P Parameter: Plant Line Value: WS
  misc_feature: MA Experiment 20000265 PARAMETER Experiment Name: At_Open_Flower_P Parameter: Tissue Value: Closed Flower vs. Whole Plant
  misc_feature: MA Experiment ID: 20000286 Result: Up-regulated in Transcription
  misc_feature: MA Experiment 20000286 PARAMETER Experiment Name: At_Open_Flower_P Parameter: Age (day) Value: 21
  misc_feature: MA Experiment 20000286 PARAMETER Experiment Name: At_Open_Flower_P Parameter: Plant Line Value: WS
  misc_feature: MA Experiment 20000286 PARAMETER Experiment Name: At_Open_Flower_P Parameter: Tissue Value: Half Open vs. Whole Plant
  misc_feature: MA Experiment ID: 20001555 Result: Up-regulated in Transcription
  misc_feature: MA Experiment 20001555 PARAMETER Experiment Name: At_Drought_Soil_Dry_P Parameter: Age (day) Value: 24
  misc_feature: MA Experiment 20001555 PARAMETER Experiment Name: At_Drought_Soil_Dry_P Parameter: Organism Value: A. thaliana
  misc_feature: MA Experiment 20001555 PARAMETER Experiment Name: At_Drought_Soil_Dry_P Parameter: Plant Line Value: WS
  misc_feature: MA Experiment 20001555 PARAMETER Experiment Name: At_Drought_Soil_Dry_P Parameter: Post Timepoint (hr) Value: None
  misc_feature: MA Experiment 20001555 PARAMETER Experiment Name: At_Drought_Soil_Dry_P Parameter: Post-Treatment Value: None
  misc_feature: MA Experiment 20001555 PARAMETER Experiment Name: At_Drought_Soil_Dry_P Parameter: Timepoint (day) Value: 10
  misc_feature: MA Experiment 20001555 PARAMETER Experiment Name: At_Drought_Soil_Dry_P Parameter: Treatment Value: Drought vs. No Drought
  misc_feature: MA Experiment ID: 20001560 Result: Up-regulated in Transcription
  misc_feature: MA Experiment 20001560 PARAMETER Experiment Name: At_Drought_Soil_Dry_P Parameter: Age (day) Value: 28
  misc_feature: MA Experiment 20001560 PARAMETER Experiment Name: At_Drought_Soil_Dry_P Parameter: Organism Value: A. thaliana
  misc_feature: MA Experiment 20001560 PARAMETER Experiment Name: At_Drought_Soil_Dry_P Parameter: Plant Line Value: WS
  misc_feature: MA Experiment 20001560 PARAMETER Experiment Name: At_Drought_Soil_Dry_P Parameter: Post Timepoint (hr) Value: None
  misc_feature: MA Experiment 20001560 PARAMETER Experiment Name: At_Drought_Soil_Dry_P Parameter: Post-Treatment Value: None
  misc_feature: MA Experiment 20001560 PARAMETER Experiment Name: At_Drought_Soil_Dry_P Parameter: Timepoint (day) Value: 14
  misc_feature: MA Experiment 20001560 PARAMETER Experiment Name: At_Drought_Soil_Dry_P Parameter: Treatment Value: Drought vs. No Drought

SEQ ID NO: 32171 - protein, 217 aa, Arabidopsis thaliana; identical to SEQ ID NO: 28581
  peptide (1)..(217): Ceres Seq. ID no. 12482480
  misc_feature (14)..(175): Pfam Name: Ras family Pfam Description: Ras family
  misc_feature (1)..(216): Homolog of NCBI NO: 7438428 NR Description: GTP-binding protein - garden pea
  misc_feature (1)..(217): Homolog of NCBI NO: 15231462 NR Description: GTP-binding protein, putative

SEQ ID NO: 32172 - DNA, 597 bp, Arabidopsis thaliana; identical to SEQ ID NO: 28582
  misc_feature (1)..(597): Ceres Seq. ID no. 12579462
  misc_feature: MA Experiment ID: 108569 Result: Down-regulated in Transcription
  misc_feature: MA Experiment 108569 PARAMETER Experiment Name: At_0.001%_MeJA__cDNA_P Parameter: Timepoint (hr) Value: 6
  misc_feature: MA Experiment 108569 PARAMETER Experiment Name: At_0.001%_MeJA__cDNA_P Parameter: Tissue Value: Aerial
  misc_feature: MA Experiment 108569 PARAMETER Experiment Name: At_0.001%_MeJA__cDNA_P Parameter: Treatment Value: 0.001% MeJA vs. No Treatment
  misc_feature: MA Experiment ID: 20000173 Result: Down-regulated in Transcription
  misc_feature: MA Experiment 20000173 PARAMETER Experiment Name: At_42deg_Heat_P Parameter: Age (day) Value: 14
  misc_feature: MA Experiment 20000173 PARAMETER Experiment Name: At_42deg_Heat_P Parameter: Organism Value: A. thaliana
  misc_feature: MA Experiment 20000173 PARAMETER Experiment Name: At_42deg_Heat_P Parameter: Plant Line Value: WS
  misc_feature: MA Experiment 20000173 PARAMETER Experiment Name: At_42deg_Heat_P Parameter: Temperature (deg C) Value: 42 vs. 22
  misc_feature: MA Experiment 20000173 PARAMETER Experiment Name: At_42deg_Heat_P Parameter: Timepoint (hr) Value: 6
  misc_feature: MA Experiment 20000173 PARAMETER Experiment Name: At_42deg_Heat_P Parameter: Tissue Value: Aerial
  misc_feature: MA Experiment ID: 20001560 Result: Up-regulated in Transcription
  misc_feature: MA Experiment 20001560 PARAMETER Experiment Name: At_Drought_Soil_Dry_P Parameter: Age (day) Value: 28
  misc_feature: MA Experiment 20001560 PARAMETER Experiment Name: At_Drought_Soil_Dry_P Parameter: Organism Value: A. thaliana
  misc_feature: MA Experiment 20001560 PARAMETER Experiment Name: At_Drought_Soil_Dry_P Parameter: Plant Line Value: WS
  misc_feature: MA Experiment 20001560 PARAMETER Experiment Name: At_Drought_Soil_Dry_P Parameter: Post Timepoint (hr) Value: None
  misc_feature: MA Experiment 20001560 PARAMETER Experiment Name: At_Drought_Soil_Dry_P Parameter: Post-Treatment Value: None
  misc_feature: MA Experiment 20001560 PARAMETER Experiment Name: At_Drought_Soil_Dry_P Parameter: Timepoint (day) Value: 14
  misc_feature: MA Experiment 20001560 PARAMETER Experiment Name: At_Drought_Soil_Dry_P Parameter: Treatment Value: Drought vs. No Drought
  misc_feature: MA Experiment ID: 20001911 Result: Down-regulated in Transcription
  misc_feature: MA Experiment 20001911 PARAMETER Experiment Name: At_Drought_Reproduction_P Parameter: Age (day) Value: 40
  misc_feature: MA Experiment 20001911 PARAMETER Experiment Name: At_Drought_Reproduction_P Parameter: Organism Value: A. thaliana
  misc_feature: MA Experiment 20001911 PARAMETER Experiment Name: At_Drought_Reproduction_P Parameter: Plant Line Value: WS
  misc_feature: MA Experiment 20001911 PARAMETER Experiment Name: At_Drought_Reproduction_P Parameter: Timepoint (day) Value: 10
  misc_feature: MA Experiment 20001911 PARAMETER Experiment Name: At_Drought_Reproduction_P Parameter: Tissue Value: Flowers
  misc_feature: MA Experiment 20001911 PARAMETER Experiment Name: At_Drought_Reproduction_P Parameter: Treatment Value: Drought vs. No Drought

SEQ ID NO: 32173 - protein, 99 aa, Arabidopsis thaliana; identical to SEQ ID NO: 24405
  peptide (1)..(99): Ceres Seq. ID no. 12579463
  misc_feature (1)..(73): Pfam Name: Domain of unknown function (DUF543) Pfam Description: Domain of unknown function (DUF543)
  misc_feature (1)..(73): Pfam Name: Domain of unknown function (DUF543) Pfam Description: Domain of unknown function (DUF543)
  misc_feature (2)..(95): Homolog of NCBI NO: 25406151 NR Description: unknown protein T9N14.2 [imported] - Arabidopsis
  misc_feature (2)..(99): Homolog of NCBI NO: 21553491 NR Description: unknown [Arabidopsis thaliana]
  misc_feature (2)..(95): Homolog of NCBI NO: 25406151 NR Description: unknown protein T9N14.2 [imported] - Arabidopsis
  misc_feature (2)..(99): Homolog of NCBI NO: 18410008 NR Description: unknown protein
  misc_feature (1)..(99): Homolog of NCBI NO: 18395129 NR Description: expressed protein
  misc_feature (2)..(99): Homolog of NCBI NO: 21553491 NR Description: unknown [Arabidopsis thaliana]
  misc_feature (2)..(99): Homolog of NCBI NO: 18410008 NR Description: unknown protein
  misc_feature (1)..(99): Homolog of NCBI NO: 18395129 NR Description: expressed protein

SEQ ID NO: 32174 - protein, 71 aa, Arabidopsis thaliana; identical to SEQ ID NO: 24406
  peptide (1)..(71): Ceres Seq. ID no. 12579464

SEQ ID NO: 32175 - protein, 56 aa, Arabidopsis thaliana; identical to SEQ ID NO: 24407
  peptide (1)..(56): Ceres Seq. ID no. 12579465

SEQ ID NO: 32176 - DNA, 826 bp, Arabidopsis thaliana; identical to SEQ ID NO: 28586
  misc_feature (1)..(826): Ceres Seq. ID no. 12393708
  misc_feature: MA Experiment ID: 108434 Result: Down-regulated in Transcription
  misc_feature: MA Experiment 108434 PARAMETER Experiment Name: At_Root_Tips_cDNA_P Parameter: Tissue Value: Root Tips
  misc_feature: MA Experiment ID: 108435 Result: Down-regulated in Transcription
  misc_feature: MA Experiment 108435 PARAMETER Experiment Name: At_stm_Mutants_cDNA_P Parameter: Plant Line Value: wt Landsburg vs stm
  misc_feature: MA Experiment 108435 PARAMETER Experiment Name: At_stm_Mutants_cDNA_P Parameter: Tissue Value: Shoot Apical Meristem Region
  misc_feature: MA Experiment ID: 108461 Result: Up-regulated in Transcription
  misc_feature: MA Experiment 108461 PARAMETER Experiment Name: At_Germinating_Seeds_cDNA_P Parameter: Age (day) Value: 1 vs. 0
  misc_feature: MA Experiment 108461 PARAMETER Experiment Name: At_Germinating_Seeds_cDNA_P Parameter: Tissue Value: Germinating Seeds
  misc_feature: MA Experiment ID: 108462 Result: Up-regulated in Transcription
  misc_feature: MA Experiment 108462 PARAMETER Experiment Name: At_Germinating_Seeds_cDNA_P Parameter: Age (day) Value: 2 vs. 0
  misc_feature: MA Experiment 108462 PARAMETER Experiment Name: At_Germinating_Seeds_cDNA_P Parameter: Tissue Value: Germinating Seeds
  misc_feature: MA Experiment ID: 108464 Result: Up-regulated in Transcription
  misc_feature: MA Experiment 108464 PARAMETER Experiment Name: At_Germinating_Seeds_cDNA_P Parameter: Age (day) Value: 4 vs. 0
  misc_feature: MA Experiment 108464 PARAMETER Experiment Name: At_Germinating_Seeds_cDNA_P Parameter: Tissue Value: Germinating Seeds
  misc_feature: MA Experiment ID: 108488 Result: Up-regulated in Transcription
  misc_feature: MA Experiment ID: 108489 Result: Down-regulated in Transcription
  misc_feature: MA Experiment ID: 108501 Result: Up-regulated in Transcription
  misc_feature: MA Experiment 108501 PARAMETER Experiment Name: At_ap2_floral_buds_cDNA_P Parameter: Plant Line Value: ap2 (Ler.)
  misc_feature: MA Experiment 108501 PARAMETER Experiment Name: At_ap2_floral_buds_cDNA_P Parameter: Tissue Value: Closed Flower
  misc_feature: MA Experiment ID: 108594 Result: Down-regulated in Transcription
  misc_feature: MA Experiment 108594 PARAMETER Experiment Name: At_Ler-rhl_Root_cDNA_P Parameter: Plant Line Value: null
  misc_feature: MA Experiment ID: 108595 Result: Down-regulated in Transcription
  misc_feature: MA Experiment 108595 PARAMETER Experiment Name: At_Ler-pi_Ovule_cDNA_P Parameter: Plant Line Value: null
  misc_feature: MA Experiment ID: 108605 Result: Up-regulated in Transcription
  misc_feature: MA Experiment 108605 PARAMETER Experiment Name: At_100uM_ABA_cDNA_P Parameter: Timepoint (hr) Value: 6
  misc_feature: MA Experiment 108605 PARAMETER Experiment Name: At_100uM_ABA_cDNA_P Parameter: Tissue Value: Aerial
  misc_feature: MA Experiment 108605 PARAMETER Experiment Name: At_100uM_ABA_cDNA_P Parameter: Treatment Value: 100uM ABA vs. No Treatment
  misc_feature: MA Experiment ID: 20000090 Result: Down-regulated in Transcription
  misc_feature: MA Experiment ID: 20000111 Result: Down-regulated in Transcription
  misc_feature: MA Experiment 20000111 PARAMETER Experiment Name: At_42deg_Heat_cDNA_P Parameter: Temperature (deg C) Value: 42 vs. 22
  misc_feature: MA Experiment 20000111 PARAMETER Experiment Name: At_42deg_Heat_cDNA_P Parameter: Timepoint (hr) Value: 6
  misc_feature: MA Experiment 20000111 PARAMETER Experiment Name: At_42deg_Heat_cDNA_P Parameter: Tissue Value: Aerial
  misc_feature: MA Experiment ID: 20000113 Result: Down-regulated in Transcription
  misc_feature: MA Experiment 20000113 PARAMETER Experiment Name: At_42deg_Heat_cDNA_P Parameter: Temperature (deg C) Value: 42 vs. 22
  misc_feature: MA Experiment 20000113 PARAMETER Experiment Name: At_42deg_Heat_cDNA_P Parameter: Timepoint (hr) Value: 8
  misc_feature: MA Experiment 20000113 PARAMETER Experiment Name: At_42deg_Heat_cDNA_P Parameter: Tissue Value: Aerial
  misc_feature: MA Experiment ID: 20000169 Result: Up-regulated in Transcription
  misc_feature: MA Experiment 20000169 PARAMETER Experiment Name: At_100uM_ABA_P Parameter: Age (day) Value: 14
  misc_feature: MA Experiment 20000169 PARAMETER Experiment Name: At_100uM_ABA_P Parameter: Organism Value: A. thaliana
  misc_feature: MA Experiment 20000169 PARAMETER Experiment Name: At_100uM_ABA_P Parameter: Plant Line Value: WS
  misc_feature: MA Experiment 20000169 PARAMETER Experiment Name: At_100uM_ABA_P Parameter: Timepoint (hr) Value: 6
  misc_feature: MA Experiment 20000169 PARAMETER Experiment Name: At_100uM_ABA_P Parameter: Tissue Value: Aerial
  misc_feature: MA Experiment 20000169 PARAMETER Experiment Name: At_100uM_ABA_P Parameter: Treatment Value: 100uM ABA vs. No Treatment
  misc_feature: MA Experiment ID: 20000180 Result: Up-regulated in Transcription
  misc_feature: MA Experiment 20000180 PARAMETER Experiment Name: At_Germinating_Seeds_P Parameter: Age (hr) Value: 24 vs. 0
  misc_feature: MA Experiment 20000180 PARAMETER Experiment Name: At_Germinating_Seeds_P Parameter: Tissue Value: Germinating Seeds
  misc_feature: MA Experiment ID: 20000185 Result: Down-regulated in Transcription
  misc_feature: MA Experiment 20000185 PARAMETER Experiment Name: At_Roots__P Parameter: Age (day) Value: 7 vs. 21
  misc_feature: MA Experiment 20000185 PARAMETER Experiment Name: At_Roots__P Parameter: Organism Value: A. thaliana
  misc_feature: MA Experiment 20000185 PARAMETER Experiment Name: At_Roots__P Parameter: Tissue Value: Roots vs. Whole Plant
  misc_feature: MA Experiment ID: 20000224 Result: Up-regulated in Transcription
  misc_feature: MA Experiment ID: 20000439 Result: Down-regulated in Transcription
  misc_feature: MA Experiment 20000439 PARAMETER Experiment Name: At_Roots__P Parameter: Age (day) Value: 14 vs. 21
  misc_feature: MA Experiment 20000439 PARAMETER Experiment Name: At_Roots__P Parameter: Organism Value: A. thaliana
  misc_feature: MA Experiment 20000439 PARAMETER Experiment Name: At_Roots__P Parameter: Tissue Value: Roots vs. Whole Plant
  misc_feature: MA Experiment ID: 20000451 Result: Up-regulated in Transcription
  misc_feature: MA Experiment 20000451 PARAMETER Experiment Name: At_CS6879_Shoots-Roots_P Parameter: Age (day) Value: 14
  misc_feature: MA Experiment 20000451 PARAMETER Experiment Name: At_CS6879_Shoots-Roots_P Parameter: Organism Value: A. thaliana
  misc_feature: MA Experiment 20000451 PARAMETER Experiment Name: At_CS6879_Shoots-Roots_P Parameter: Plant Line Value: CS6879 vs. WS
  misc_feature: MA Experiment 20000451 PARAMETER Experiment Name: At_CS6879_Shoots-Roots_P Parameter: Tissue Value: Roots
  misc_feature: MA Experiment ID: 20000496 Result: Down-regulated in Transcription
  misc_feature: MA Experiment 20000496 PARAMETER Experiment Name: At_Guard_Cells_P Parameter: Harvest Date Value: 7/19/2002
  misc_feature: MA Experiment 20000496 PARAMETER Experiment Name: At_Guard_Cells_P Parameter: Organism Value: Canola
  misc_feature: MA Experiment 20000496 PARAMETER Experiment Name: At_Guard_Cells_P Parameter: Tissue Value: Guard Cells vs. Leaves
  misc_feature: MA Experiment ID: 20000573 Result: Down-regulated in Transcription
  misc_feature: MA Experiment 20000573 PARAMETER Experiment Name: At_100uM_ABA_Mutants__P Parameter: Organism Value: A. thaliana
  misc_feature: MA Experiment 20000573 PARAMETER Experiment Name: At_100uM_ABA_Mutants__P Parameter: Plant Line Value: CS22 vs. Ler wt
  misc_feature: MA Experiment 20000573 PARAMETER Experiment Name: At_100uM_ABA_Mutants__P Parameter: Timepoint (hr) Value: N/A
  misc_feature: MA Experiment 20000573 PARAMETER Experiment Name: At_100uM_ABA_Mutants__P Parameter: Tissue Value: Whole Plant
  misc_feature: MA Experiment 20000573 PARAMETER Experiment Name: At_100uM_ABA_Mutants__P Parameter: Treatment Value: None
  misc_feature: MA Experiment ID: 20000576 Result: Up-regulated in Transcription
  misc_feature: MA Experiment 20000576 PARAMETER Experiment Name: At_100uM_ABA_Mutants__P Parameter: Organism Value: A. thaliana
  misc_feature: MA Experiment 20000576 PARAMETER Experiment Name: At_100uM_ABA_Mutants__P Parameter: Plant Line Value: CS23
  misc_feature: MA Experiment 20000576 PARAMETER Experiment Name: At_100uM_ABA_Mutants__P Parameter: Timepoint (hr) Value: 6
  misc_feature: MA Experiment 20000576 PARAMETER Experiment Name: At_100uM_ABA_Mutants__P Parameter: Tissue Value: Whole Plant
  misc_feature: MA Experiment 20000576 PARAMETER Experiment Name: At_100uM_ABA_Mutants__P Parameter: Treatment Value: 1uM ABA vs. No Treatment
  misc_feature: MA Experiment ID: 20000794 Result: Down-regulated in Transcription
  misc_feature: MA Experiment 20000794 PARAMETER Experiment Name: At_Petals_P Parameter: Age (day) Value: 23-25 days
  misc_feature: MA Experiment 20000794 PARAMETER Experiment Name: At_Petals_P Parameter: Plant Line Value: WS
  misc_feature: MA Experiment 20000794 PARAMETER Experiment Name: At_Petals_P Parameter: Tissue Value: Petals vs. Whole plant
  misc_feature: MA Experiment ID: 20001248 Result: Down-regulated in Transcription
  misc_feature: MA Experiment 20001248 PARAMETER Experiment Name: At_Far-red-induction_P Parameter: Age (day) Value: 7
  misc_feature: MA Experiment 20001248 PARAMETER Experiment Name: At_Far-red-induction_P Parameter: Light Value: Far-red vs. White
  misc_feature: MA Experiment 20001248 PARAMETER Experiment Name: At_Far-red-induction_P Parameter: Organism Value: A. thaliana
  misc_feature: MA Experiment 20001248 PARAMETER Experiment Name: At_Far-red-induction_P Parameter: Plant Line Value: Columbia
  misc_feature: MA Experiment 20001248 PARAMETER Experiment Name: At_Far-red-induction_P Parameter: Timepoint (hr) Value: 4
  misc_feature: MA Experiment 20001248 PARAMETER Experiment Name: At_Far-red-induction_P Parameter: Tissue Value: Whole Plant
  misc_feature: MA Experiment ID: 20001451 Result: Down-regulated in Transcription
  misc_feature: MA Experiment 20001451 PARAMETER Experiment Name: At_Far-red-induction_P Parameter: Age (day) Value: 7
  misc_feature: MA Experiment 20001451 PARAMETER Experiment Name: At_Far-red-induction_P Parameter: Light Value: Far-red vs. White
  misc_feature: MA Experiment 20001451 PARAMETER Experiment Name: At_Far-red-induction_P Parameter: Organism Value: A. thaliana
  misc_feature: MA Experiment 20001451 PARAMETER Experiment Name: At_Far-red-induction_P Parameter: Plant Line Value: Columbia
  misc_feature: MA Experiment 20001451 PARAMETER Experiment Name: At_Far-red-induction_P Parameter: Timepoint (hr) Value: 24
  misc_feature: MA Experiment 20001451 PARAMETER Experiment Name: At_Far-red-induction_P Parameter: Tissue Value: Whole Plant

SEQ ID NO: 32177 - protein, 197 aa, Arabidopsis thaliana; identical to SEQ ID NO: 28587
  peptide (1)..(197): Ceres Seq. ID no. 12393709
  misc_feature (21)..(166): Pfam Name: Protein of unknown function, DUF538 Pfam Description: Protein of unknown function, DUF538
  misc_feature (24)..(159): Homolog of NCBI NO: 34915378 NR Description: hypothetical protein~similar to Oryza sativa
  misc_feature (24)..(158): Homolog of NCBI NO: 34915376 NR Description: hypothetical protein~similar to Oryza sativa
  misc_feature (24)..(154): Homolog of NCBI NO: 34915418 NR Description: hypothetical protein~similar to Arabidopsis
  misc_feature (24)..(158): Homolog of NCBI NO: 33146557 NR Description: unknown protein [Oryza sativa (japonica
  misc_feature (24)..(158): Homolog of NCBI NO: 34915422 NR Description: hypothetical protein~similar to Arabidopsis
  misc_feature (24)..(158): Homolog of NCBI NO: 34915426 NR Description: hypothetical protein~similar to Arabidopsis
  misc_feature (24)..(176): Homolog of NCBI NO: 34903866 NR Description: unnamed protein product [Oryza sativa (japonica
  misc_feature (24)..(158): Homolog of NCBI NO: 34915410 NR Description: hypothetical protein~similar to Arabidopsis
  misc_feature (19)..(190): Homolog of NCBI NO: 18405887 NR Description: expressed protein
  misc_feature (19)..(197): Homolog of NCBI NO: 18391006 NR Description: expressed protein

SEQ ID NO: 32178 - protein, 179 aa, Arabidopsis thaliana; identical to SEQ ID NO: 28588
  peptide (1)..(179): Ceres Seq. ID no. 12393710
  misc_feature (3)..(148): Pfam Name: Protein of unknown function, DUF538 Pfam Description: Protein of unknown function, DUF538
  misc_feature (6)..(141): Homolog of NCBI NO: 34915378 NR Description: hypothetical protein~similar to Oryza sativa
  misc_feature (6)..(140): Homolog of NCBI NO: 34915376 NR Description: hypothetical protein~similar to Oryza sativa
  misc_feature (6)..(136): Homolog of NCBI NO: 34915418 NR Description: hypothetical protein~similar to Arabidopsis
  misc_feature (6)..(140): Homolog of NCBI NO: 33146557 NR Description: unknown protein [Oryza sativa (japonica
  misc_feature (6)..(140): Homolog of NCBI NO: 34915422 NR Description: hypothetical protein~similar to Arabidopsis
  misc_feature (6)..(140): Homolog of NCBI NO: 34915426 NR Description: hypothetical protein~similar to Arabidopsis
  misc_feature (6)..(158): Homolog of NCBI NO: 34903866 NR Description: unnamed protein product [Oryza sativa (japonica
  misc_feature (6)..(140): Homolog of NCBI NO: 34915410 NR Description: hypothetical protein~similar to Arabidopsis
  misc_feature (1)..(172): Homolog of NCBI NO: 18405887 NR Description: expressed protein
  misc_feature (1)..(179): Homolog of NCBI NO: 18391006 NR Description: expressed protein

SEQ ID NO: 32179 - protein, 166 aa, Arabidopsis thaliana; identical to SEQ ID NO: 28589
  peptide (1)..(166): Ceres Seq. ID no. 12393711
  misc_feature (1)..(135): Pfam Name: Protein of unknown function, DUF538 Pfam Description: Protein of unknown function, DUF538
  misc_feature (1)..(128): Homolog of NCBI NO: 34915378 NR Description: hypothetical protein~similar to Oryza sativa
  misc_feature (1)..(127): Homolog of NCBI NO: 34915376 NR Description: hypothetical protein~similar to Oryza sativa
  misc_feature (1)..(123): Homolog of NCBI NO: 34915418 NR Description: hypothetical protein~similar to Arabidopsis
  misc_feature (1)..(127): Homolog of NCBI NO: 33146557 NR Description: unknown protein [Oryza sativa (japonica
  misc_feature (1)..(127): Homolog of NCBI NO: 34915422 NR Description: hypothetical protein~similar to Arabidopsis
  misc_feature (1)..(127): Homolog of NCBI NO: 34915426 NR Description: hypothetical protein~similar to Arabidopsis
  misc_feature (1)..(145): Homolog of NCBI NO: 34903866 NR Description: unnamed protein product [Oryza sativa (japonica
  misc_feature (1)..(127): Homolog of NCBI NO: 34915410 NR Description: hypothetical protein~similar to Arabidopsis
  misc_feature (1)..(159): Homolog of NCBI NO: 18405887 NR Description: expressed protein
  misc_feature (1)..(166): Homolog of NCBI NO: 18391006 NR Description: expressed protein

SEQ ID NO: 32180 - DNA, 1044 bp, Arabidopsis thaliana; identical to SEQ ID NO: 28590
  misc_feature (1)..(1044): Ceres Seq. ID no. 13491459
  misc_feature: MA Experiment ID: 108434 Result: Up-regulated in Transcription
  misc_feature: MA Experiment 108434 PARAMETER Experiment Name: At_Root_Tips_cDNA_P Parameter: Tissue Value: Root Tips
  misc_feature: MA Experiment ID: 108461 Result: Up-regulated in Transcription
  misc_feature: MA Experiment 108461 PARAMETER Experiment Name: At_Germinating_Seeds_cDNA_P Parameter: Age (day) Value: 1 vs. 0
  misc_feature: MA Experiment 108461 PARAMETER Experiment Name: At_Germinating_Seeds_cDNA_P Parameter: Tissue Value: Germinating Seeds
  misc_feature: MA Experiment ID: 108462 Result: Up-regulated in Transcription
  misc_feature: MA Experiment 108462 PARAMETER Experiment Name: At_Germinating_Seeds_cDNA_P Parameter: Age (day) Value: 2 vs. 0
  misc_feature: MA Experiment 108462 PARAMETER Experiment Name: At_Germinating_Seeds_cDNA_P Parameter: Tissue Value: Germinating Seeds
  misc_feature: MA Experiment ID: 108463 Result: Up-regulated in Transcription
  misc_feature: MA Experiment 108463 PARAMETER Experiment Name: At_Germinating_Seeds_cDNA_P Parameter: Age (day) Value: 3 vs. 0
  misc_feature: MA Experiment 108463 PARAMETER Experiment Name: At_Germinating_Seeds_cDNA_P Parameter: Tissue Value: Germinating Seeds
  misc_feature: MA Experiment ID: 108464 Result: Up-regulated in Transcription
  misc_feature: MA Experiment 108464 PARAMETER Experiment Name: At_Germinating_Seeds_cDNA_P Parameter: Age (day) Value: 4 vs. 0
  misc_feature: MA Experiment 108464 PARAMETER Experiment Name: At_Germinating_Seeds_cDNA_P Parameter: Tissue Value: Germinating Seeds
  misc_feature: MA Experiment ID: 20000071 Result: Down-regulated in Transcription
  misc_feature: MA Experiment 20000071 PARAMETER Experiment Name: At_100uM_ABA_Mutants_cDNA_P Parameter: Plant Line Value: CS8104
  misc_feature: MA Experiment 20000071 PARAMETER Experiment Name: At_100uM_ABA_Mutants_cDNA_P Parameter: Timepoint (hr) Value: 6
  misc_feature: MA Experiment 20000071 PARAMETER Experiment Name: At_100uM_ABA_Mutants_cDNA_P Parameter: Tissue Value: Aerial
  misc_feature: MA Experiment 20000071 PARAMETER Experiment Name: At_100uM_ABA_Mutants_cDNA_P Parameter: Treatment Value: 100uM ABA vs. No Treatment
  misc_feature: MA Experiment ID: 20000072 Result: Down-regulated in Transcription
  misc_feature: MA Experiment 20000072 PARAMETER Experiment Name: At_100uM_ABA_Mutants_cDNA_P Parameter: Plant Line Value: CS8105
  misc_feature: MA Experiment 20000072 PARAMETER Experiment Name: At_100uM_ABA_Mutants_cDNA_P Parameter: Timepoint (hr) Value: 6
  misc_feature: MA Experiment 20000072 PARAMETER Experiment Name: At_100uM_ABA_Mutants_cDNA_P Parameter: Tissue Value: Aerial
  misc_feature: MA Experiment 20000072 PARAMETER Experiment Name: At_100uM_ABA_Mutants_cDNA_P Parameter: Treatment Value: 100uM ABA vs. No Treatment
  misc_feature: MA Experiment ID: 20000093 Result: Down-regulated in Transcription
  misc_feature: MA Experiment 20000093 PARAMETER Experiment Name: At_42deg_Heat_cDNA_P Parameter: Temperature (deg C) Value: 42 vs. 22
  misc_feature: MA Experiment 20000093 PARAMETER Experiment Name: At_42deg_Heat_cDNA_P Parameter: Timepoint (hr) Value: 0.5
  misc_feature: MA Experiment 20000093 PARAMETER Experiment Name: At_42deg_Heat_cDNA_P Parameter: Tissue Value: Aerial
  misc_feature: MA Experiment ID: 20000111 Result: Down-regulated in Transcription
  misc_feature: MA Experiment 20000111 PARAMETER Experiment Name: At_42deg_Heat_cDNA_P Parameter: Temperature (deg C) Value: 42 vs. 22
  misc_feature: MA Experiment 20000111 PARAMETER Experiment Name: At_42deg_Heat_cDNA_P Parameter: Timepoint (hr) Value: 6
  misc_feature: MA Experiment 20000111 PARAMETER Experiment Name: At_42deg_Heat_cDNA_P Parameter: Tissue Value: Aerial
  misc_feature: MA Experiment ID: 20000112 Result: Down-regulated in Transcription
  misc_feature: MA Experiment 20000112 PARAMETER Experiment Name: At_42deg_Heat_cDNA_P Parameter: Temperature (deg C) Value: 42 vs. 22
  misc_feature: MA Experiment 20000112 PARAMETER Experiment Name: At_42deg_Heat_cDNA_P Parameter: Timepoint (hr) Value: 2
  misc_feature: MA Experiment 20000112 PARAMETER Experiment Name: At_42deg_Heat_cDNA_P Parameter: Tissue Value: Aerial
  misc_feature: MA Experiment ID: 20000117 Result: Down-regulated in Transcription
  misc_feature: MA Experiment 20000117 PARAMETER Experiment Name: At_100uM_ABA_Mutants_cDNA_P Parameter: Plant Line Value: Columbia
  misc_feature: MA Experiment 20000117 PARAMETER Experiment Name: At_100uM_ABA_Mutants_cDNA_P Parameter: Timepoint (hr) Value: 6
  misc_feature: MA Experiment 20000117 PARAMETER Experiment Name: At_100uM_ABA_Mutants_cDNA_P Parameter: Tissue Value: Aerial
  misc_feature: MA Experiment 20000117 PARAMETER Experiment Name: At_100uM_ABA_Mutants_cDNA_P Parameter: Treatment Value: 100uM ABA vs. No Treatment
  misc_feature: MA Experiment ID: 20000144 Result: Down-regulated in Transcription
  misc_feature: MA Experiment 20000144 PARAMETER Experiment Name: At_42deg_Heat_cDNA_P Parameter: Temperature (deg C) Value: 42 vs. 22
  misc_feature: MA Experiment 20000144 PARAMETER Experiment Name: At_42deg_Heat_cDNA_P Parameter: Timepoint (hr) Value: 1
  misc_feature: MA Experiment 20000144 PARAMETER Experiment Name: At_42deg_Heat_cDNA_P Parameter: Tissue Value: Aerial
  misc_feature: MA Experiment ID: 20000171 Result: Down-regulated in Transcription
  misc_feature: MA Experiment 20000171 PARAMETER Experiment Name: At_42deg_Heat_P Parameter: Age (day) Value: 14
  misc_feature: MA Experiment 20000171 PARAMETER Experiment Name: At_42deg_Heat_P Parameter: Organism Value: A. thaliana
  misc_feature: MA Experiment 20000171 PARAMETER Experiment Name: At_42deg_Heat_P Parameter: Plant Line Value: WS
  misc_feature: MA Experiment 20000171 PARAMETER Experiment Name: At_42deg_Heat_P Parameter: Temperature (deg C) Value: 42 vs. 22
  misc_feature: MA Experiment 20000171 PARAMETER Experiment Name: At_42deg_Heat_P Parameter: Timepoint (hr) Value: 1
  misc_feature: MA Experiment 20000171 PARAMETER Experiment Name: At_42deg_Heat_P Parameter: Tissue Value: Aerial
  misc_feature: MA Experiment ID: 20000173 Result: Down-regulated in Transcription
  misc_feature: MA Experiment 20000173 PARAMETER Experiment Name: At_42deg_Heat_P Parameter: Age (day) Value: 14
  misc_feature: MA Experiment 20000173 PARAMETER Experiment Name: At_42deg_Heat_P Parameter: Organism Value: A. thaliana
  misc_feature: MA Experiment 20000173 PARAMETER Experiment Name: At_42deg_Heat_P Parameter: Plant Line Value: WS
  misc_feature: MA Experiment 20000173 PARAMETER Experiment Name: At_42deg_Heat_P Parameter: Temperature (deg C) Value: 42 vs. 22
  misc_feature: MA Experiment 20000173 PARAMETER Experiment Name: At_42deg_Heat_P Parameter: Timepoint (hr) Value: 6
  misc_feature: MA Experiment 20000173 PARAMETER Experiment Name: At_42deg_Heat_P Parameter: Tissue Value: Aerial
  misc_feature: MA Experiment ID: 20000180 Result: Up-regulated in Transcription
  misc_feature: MA Experiment 20000180 PARAMETER Experiment Name: At_Germinating_Seeds_P Parameter: Age (hr) Value: 24 vs. 0
  misc_feature: MA Experiment 20000180 PARAMETER Experiment Name: At_Germinating_Seeds_P Parameter: Tissue Value: Germinating Seeds
  misc_feature: MA Experiment ID: 20000227 Result: Down-regulated in Transcription
  misc_feature: MA Experiment 20000227 PARAMETER Experiment Name: At_Root-Tips-vs-Tops_P Parameter: Tissue Value: Root Tips vs. Root Tops
  misc_feature: MA Experiment ID: 20000436 Result: Down-regulated in Transcription
  misc_feature: MA Experiment 20000436 PARAMETER Experiment Name: At_Drought_P Parameter: Age (day) Value: 7
  misc_feature: MA Experiment 20000436 PARAMETER Experiment Name: At_Drought_P Parameter: Organism Value: A. thaliana
  misc_feature: MA Experiment 20000436 PARAMETER Experiment Name: At_Drought_P Parameter: Plant Line Value: WS
  misc_feature: MA Experiment 20000436 PARAMETER Experiment Name: At_Drought_P Parameter: Timepoint (hr) Value: 12
  misc_feature: MA Experiment 20000436 PARAMETER Experiment Name: At_Drought_P Parameter: Tissue Value: Whole Plant
  misc_feature: MA Experiment 20000436 PARAMETER Experiment Name: At_Drought_P Parameter: Treatment Value: Drought vs. No Drought
  misc_feature: MA Experiment ID: 20000437 Result: Down-regulated in Transcription
  misc_feature: MA Experiment 20000437 PARAMETER Experiment Name: At_Drought_P Parameter: Age (day) Value: 8
  misc_feature: MA Experiment 20000437 PARAMETER Experiment Name: At_Drought_P Parameter: Organism Value: A. thaliana
  misc_feature: MA Experiment 20000437 PARAMETER Experiment Name: At_Drought_P Parameter: Plant Line Value: WS
  misc_feature: MA Experiment 20000437 PARAMETER Experiment Name: At_Drought_P Parameter: Timepoint (hr) Value: 24
  misc_feature: MA Experiment 20000437 PARAMETER Experiment Name: At_Drought_P Parameter: Tissue Value: Whole Plant
  misc_feature: MA Experiment 20000437 PARAMETER Experiment Name: At_Drought_P Parameter: Treatment Value: Drought vs. No Drought
  misc_feature: MA Experiment ID: 20000444 Result: Up-regulated in Transcription
  misc_feature: MA Experiment 20000444 PARAMETER Experiment Name: At_100uM_NAA__P Parameter: Age (day) Value: 14
  misc_feature: MA Experiment 20000444 PARAMETER Experiment Name: At_100uM_NAA__P Parameter: Organism Value: A. thaliana
  misc_feature: MA Experiment 20000444 PARAMETER Experiment Name: At_100uM_NAA__P Parameter: Plant Line Value: WS
  misc_feature: MA Experiment 20000444 PARAMETER Experiment Name: At_100uM_NAA__P Parameter: Timepoint (hr) Value: 1
  misc_feature: MA Experiment 20000444 PARAMETER Experiment Name: At_100uM_NAA__P Parameter: Tissue Value: Aerial
  misc_feature: MA Experiment 20000444 PARAMETER Experiment Name: At_100uM_NAA__P Parameter: Treatment Value: 100uM NAA vs. No Treatment
  misc_feature: MA Experiment ID: 20001247 Result: Up-regulated in Transcription
  misc_feature: MA Experiment 20001247 PARAMETER Experiment Name: At_Far-red-induction_P Parameter: Age (day) Value: 7
  misc_feature: MA Experiment 20001247 PARAMETER Experiment Name: At_Far-red-induction_P Parameter: Light Value: Far-red vs. White
  misc_feature: MA Experiment 20001247 PARAMETER Experiment Name: At_Far-red-induction_P Parameter: Organism Value: A. thaliana
  misc_feature: MA Experiment 20001247 PARAMETER Experiment Name: At_Far-red-induction_P Parameter: Plant Line Value: Columbia
  misc_feature: MA Experiment 20001247 PARAMETER Experiment Name: At_Far-red-induction_P Parameter: Timepoint (hr) Value: 1
  misc_feature: MA Experiment 20001247 PARAMETER Experiment Name: At_Far-red-induction_P Parameter: Tissue Value: Whole Plant
  misc_feature: MA Experiment ID: 20001248 Result: Up-regulated in Transcription
  misc_feature: MA Experiment 20001248 PARAMETER Experiment Name: At_Far-red-induction_P Parameter: Age (day) Value: 7
  misc_feature: MA Experiment 20001248 PARAMETER Experiment Name: At_Far-red-induction_P Parameter: Light Value: Far-red vs. White
  misc_feature: MA Experiment 20001248 PARAMETER Experiment Name: At_Far-red-induction_P Parameter: Organism Value: A. thaliana
  misc_feature: MA Experiment 20001248 PARAMETER Experiment Name: At_Far-red-induction_P Parameter: Plant Line Value: Columbia
  misc_feature: MA Experiment 20001248 PARAMETER Experiment Name: At_Far-red-induction_P Parameter: Timepoint (hr) Value: 4
  misc_feature: MA Experiment 20001248 PARAMETER Experiment Name: At_Far-red-induction_P Parameter: Tissue Value: Whole Plant
  misc_feature: MA Experiment ID: 20001450 Result: Up-regulated in Transcription
  misc_feature: MA Experiment 20001450 PARAMETER Experiment Name: At_Far-red-induction_P Parameter: Age (day) Value: 7
  misc_feature: MA Experiment 20001450 PARAMETER Experiment Name: At_Far-red-induction_P Parameter: Light Value: Far-red vs. White
  misc_feature: MA Experiment 20001450 PARAMETER Experiment Name: At_Far-red-induction_P Parameter: Organism Value: A. thaliana
  misc_feature: MA Experiment 20001450 PARAMETER Experiment Name: At_Far-red-induction_P Parameter: Plant Line Value: Columbia
  misc_feature: MA Experiment 20001450 PARAMETER Experiment Name: At_Far-red-induction_P Parameter: Timepoint (hr) Value: 8
  misc_feature: MA Experiment 20001450 PARAMETER Experiment Name: At_Far-red-induction_P Parameter: Tissue Value: Whole Plant
  misc_feature: MA Experiment ID: 20001451 Result: Up-regulated in Transcription
  misc_feature: MA Experiment 20001451 PARAMETER Experiment Name: At_Far-red-induction_P Parameter: Age (day) Value: 7
  misc_feature: MA Experiment 20001451 PARAMETER Experiment Name: At_Far-red-induction_P Parameter: Light Value: Far-red vs. White
  misc_feature: MA Experiment 20001451 PARAMETER Experiment Name: At_Far-red-induction_P Parameter: Organism Value: A. thaliana
  misc_feature: MA Experiment 20001451 PARAMETER Experiment Name: At_Far-red-induction_P Parameter: Plant Line Value: Columbia
  misc_feature: MA Experiment 20001451 PARAMETER Experiment Name: At_Far-red-induction_P Parameter: Timepoint (hr) Value: 24
  misc_feature: MA Experiment 20001451 PARAMETER Experiment Name: At_Far-red-induction_P Parameter: Tissue Value: Whole Plant
  misc_feature: MA Experiment ID: 20001555 Result: Down-regulated in Transcription
  misc_feature: MA Experiment 20001555 PARAMETER Experiment Name: At_Drought_Soil_Dry_P Parameter: Age (day) Value: 24
  misc_feature: MA Experiment 20001555 PARAMETER Experiment Name: At_Drought_Soil_Dry_P Parameter: Organism Value: A. thaliana
  misc_feature: MA Experiment 20001555 PARAMETER Experiment Name: At_Drought_Soil_Dry_P Parameter: Plant Line Value: WS
  misc_feature: MA Experiment 20001555 PARAMETER Experiment Name: At_Drought_Soil_Dry_P Parameter: Post Timepoint (hr) Value: None
  misc_feature: MA Experiment 20001555 PARAMETER Experiment Name: At_Drought_Soil_Dry_P Parameter: Post-Treatment Value: None
  misc_feature: MA Experiment 20001555 PARAMETER Experiment Name: At_Drought_Soil_Dry_P Parameter: Timepoint (day) Value: 10
  misc_feature: MA Experiment 20001555 PARAMETER Experiment Name: At_Drought_Soil_Dry_P Parameter: Treatment Value: Drought vs. No Drought
  misc_feature: MA Experiment ID: 20001757 Result: Up-regulated in Transcription
  misc_feature: MA Experiment 20001757 PARAMETER Experiment Name: At_50mM_NH4NO3_L-to-H_P Parameter: Timepoint (hr) Value: 6
  misc_feature: MA Experiment 20001757 PARAMETER Experiment Name: At_50mM_NH4NO3_L-to-H_P Parameter: Tissue Value: Leaf
  misc_feature: MA Experiment 20001757 PARAMETER Experiment Name: At_50mM_NH4NO3_L-to-H_P Parameter: Treatment Value: 50mM NH4NO3 vs 100mM Mannitol
  misc_feature: MA Experiment ID: 20001904 Result: Down-regulated in Transcription
  misc_feature: MA Experiment 20001904 PARAMETER Experiment Name: At_Drought_Reproduction_P Parameter: Age (day) Value: 37
  misc_feature: MA Experiment 20001904 PARAMETER Experiment Name: At_Drought_Reproduction_P Parameter: Organism Value: A. thaliana
  misc_feature: MA Experiment 20001904 PARAMETER Experiment Name: At_Drought_Reproduction_P Parameter: Plant Line Value: WS
  misc_feature: MA Experiment 20001904 PARAMETER Experiment Name: At_Drought_Reproduction_P Parameter: Timepoint (day) Value: 7
  misc_feature: MA Experiment 20001904 PARAMETER Experiment Name: At_Drought_Reproduction_P Parameter: Tissue Value: Rosettes
  misc_feature: MA Experiment 20001904 PARAMETER Experiment Name: At_Drought_Reproduction_P Parameter: Treatment Value: Drought vs. No Drought
  misc_feature: MA Experiment ID: 20001905 Result: Down-regulated in Transcription
  misc_feature: MA Experiment 20001905 PARAMETER Experiment Name: At_Drought_Reproduction_P Parameter: Age (day) Value: 40
  misc_feature: MA Experiment 20001905 PARAMETER Experiment Name: At_Drought_Reproduction_P Parameter: Organism Value: A. thaliana
  misc_feature: MA Experiment 20001905 PARAMETER Experiment Name: At_Drought_Reproduction_P Parameter: Plant Line Value: WS
  misc_feature: MA Experiment 20001905 PARAMETER Experiment Name: At_Drought_Reproduction_P Parameter: Timepoint (day) Value: 10
  misc_feature: MA Experiment 20001905 PARAMETER Experiment Name: At_Drought_Reproduction_P Parameter: Tissue Value: Rosettes
  misc_feature: MA Experiment 20001905 PARAMETER Experiment Name: At_Drought_Reproduction_P Parameter: Treatment Value: Drought vs. No Drought
  misc_feature: MA Experiment ID: 20001906 Result: Down-regulated in Transcription
  misc_feature: MA Experiment 20001906 PARAMETER Experiment Name: At_Drought_Reproduction_P Parameter: Age (day) Value: 35
  misc_feature: MA Experiment 20001906 PARAMETER Experiment Name: At_Drought_Reproduction_P Parameter: Organism Value: A. thaliana
  misc_feature: MA Experiment 20001906 PARAMETER Experiment Name: At_Drought_Reproduction_P Parameter: Plant Line Value: WS
  misc_feature: MA Experiment 20001906 PARAMETER Experiment Name: At_Drought_Reproduction_P Parameter: Timepoint (day) Value: 5
  misc_feature: MA Experiment 20001906 PARAMETER Experiment Name: At_Drought_Reproduction_P Parameter: Tissue Value: Siliques
  misc_feature: MA Experiment 20001906 PARAMETER Experiment Name: At_Drought_Reproduction_P Parameter: Treatment Value: Drought vs. No Drought
  misc_feature: MA Experiment ID: 20001908 Result: Down-regulated in Transcription
  misc_feature: MA Experiment 20001908 PARAMETER Experiment Name: At_Drought_Reproduction_P Parameter: Age (day) Value: 40
  misc_feature: MA Experiment 20001908 PARAMETER Experiment Name: At_Drought_Reproduction_P Parameter: Organism Value: A. thaliana
  misc_feature: MA Experiment 20001908 PARAMETER Experiment Name: At_Drought_Reproduction_P Parameter: Plant Line Value: WS
  misc_feature: MA Experiment 20001908 PARAMETER Experiment Name: At_Drought_Reproduction_P Parameter: Timepoint (day) Value: 10
  misc_feature: MA Experiment 20001908 PARAMETER Experiment Name: At_Drought_Reproduction_P Parameter: Tissue Value: Siliques
  misc_feature: MA Experiment 20001908 PARAMETER Experiment Name: At_Drought_Reproduction_P Parameter: Treatment Value: Drought vs. No Drought
  misc_feature: MA Experiment ID: 20001911 Result: Down-regulated in Transcription
  misc_feature: MA Experiment 20001911 PARAMETER Experiment Name: At_Drought_Reproduction_P Parameter: Age (day) Value: 40
  misc_feature: MA Experiment 20001911 PARAMETER Experiment Name: At_Drought_Reproduction_P Parameter: Organism Value: A. thaliana
  misc_feature: MA Experiment 20001911 PARAMETER Experiment Name: At_Drought_Reproduction_P Parameter: Plant Line Value: WS
  misc_feature: MA Experiment 20001911 PARAMETER Experiment Name: At_Drought_Reproduction_P Parameter: Timepoint (day) Value: 10
  misc_feature: MA Experiment 20001911 PARAMETER Experiment Name: At_Drought_Reproduction_P Parameter: Tissue Value: Flowers
  misc_feature: MA Experiment 20001911 PARAMETER Experiment Name: At_Drought_Reproduction_P Parameter: Treatment Value: Drought vs. No Drought

SEQ ID NO: 32181 - protein, 186 aa, Arabidopsis thaliana; identical to SEQ ID NO: 28591
  peptide (1)..(186): Ceres Seq. ID no. 13491460
  misc_feature (11)..(185): Pfam Name: AUX/IAA family Pfam Description: AUX/IAA family
  misc_feature (11)..(184): Homolog of NCBI NO: 4887014 NR Description: Nt-iaa2.5 deduced protein [Nicotiana tabacum]
  misc_feature (1)..(181): Homolog of NCBI NO: 4887016 NR Description: Nt-iaa4.3 deduced protein [Nicotiana tabacum]
  misc_feature (1)..(181): Homolog of NCBI NO: 4887018 NR Description: Nt-iaa4.5 deduced protein [Nicotiana tabacum]
  misc_feature (1)..(183): Homolog of NCBI NO: 416641 NR Description: Auxin-induced protein 22B (Indole-3-acetic acid
  misc_feature (1)..(184): Homolog of NCBI NO: 4887012 NR Description: Nt-iaa2.3 deduced protein [Nicotiana tabacum]
  misc_feature (7)..(183): Homolog of NCBI NO: 11131103 NR Description: Auxin-induced protein 22D (Indole-3-acetic acid
  misc_feature (7)..(184): Homolog of NCBI NO: 34550779 NR Description: Gbiaa-Re [Gossypium barbadense]
  misc_feature (8)..(184): Homolog of NCBI NO: 15219692 NR Description: auxin-responsive protein IAA3 (Indoleacetic
  misc_feature (1)..(186): Homolog of NCBI NO: 99663 NR Description: auxin-induced protein AUX2-11 - Arabidopsis
  misc_feature (1)..(186): Homolog of NCBI NO: 15239950 NR Description: auxin-responsive protein IAA4 (Indoleacetic

SEQ ID NO: 32182 - DNA, 1398 bp, Arabidopsis thaliana; identical to SEQ ID NO: 28592
  misc_feature (1)..(1398): Ceres Seq. ID no. 13576792
  misc_feature: MA Experiment ID: 108434 Result: Down-regulated in Transcription
  misc_feature: MA Experiment 108434 PARAMETER Experiment Name: At_Root_Tips_cDNA_P Parameter: Tissue Value: Root Tips
  misc_feature: MA Experiment ID: 108462 Result: Up-regulated in Transcription
  misc_feature: MA Experiment 108462 PARAMETER Experiment Name: At_Germinating_Seeds_cDNA_P Parameter: Age (day) Value: 2 vs. 0
  misc_feature: MA Experiment 108462 PARAMETER Experiment Name: At_Germinating_Seeds_cDNA_P Parameter: Tissue Value: Germinating Seeds
  misc_feature: MA Experiment ID: 108501 Result: Up-regulated in Transcription
  misc_feature: MA Experiment 108501 PARAMETER Experiment Name: At_ap2_floral_buds_cDNA_P Parameter: Plant Line Value: ap2 (Ler.)
  misc_feature: MA Experiment 108501 PARAMETER Experiment Name: At_ap2_floral_buds_cDNA_P Parameter: Tissue Value: Closed Flower
  misc_feature: MA Experiment ID: 20000180 Result: Up-regulated in Transcription
  misc_feature: MA Experiment 20000180 PARAMETER Experiment Name: At_Germinating_Seeds_P Parameter: Age (hr) Value: 24 vs. 0
  misc_feature: MA Experiment 20000180 PARAMETER Experiment Name: At_Germinating_Seeds_P Parameter: Tissue Value: Germinating Seeds
  misc_feature: MA Experiment ID: 20000573 Result: Down-regulated in Transcription
  misc_feature: MA Experiment 20000573 PARAMETER Experiment Name: At_100uM_ABA_Mutants__P Parameter: Organism Value: A. thaliana
  misc_feature: MA Experiment 20000573 PARAMETER Experiment Name: At_100uM_ABA_Mutants__P Parameter: Plant Line Value: CS22 vs. Ler wt
  misc_feature: MA Experiment 20000573 PARAMETER Experiment Name: At_100uM_ABA_Mutants__P Parameter: Timepoint (hr) Value: N/A
  misc_feature: MA Experiment 20000573 PARAMETER Experiment Name: At_100uM_ABA_Mutants__P Parameter: Tissue Value: Whole Plant
  misc_feature: MA Experiment 20000573 PARAMETER Experiment Name: At_100uM_ABA_Mutants__P Parameter: Treatment Value: None
  misc_feature: MA Experiment ID: 20001555 Result: Up-regulated in Transcription
  misc_feature: MA Experiment 20001555 PARAMETER Experiment Name: At_Drought_Soil_Dry_P Parameter: Age (day) Value: 24
  misc_feature: MA Experiment 20001555 PARAMETER Experiment Name: At_Drought_Soil_Dry_P Parameter: Organism Value: A. thaliana
  misc_feature: MA Experiment 20001555 PARAMETER Experiment Name: At_Drought_Soil_Dry_P Parameter: Plant Line Value: WS
  misc_feature: MA Experiment 20001555 PARAMETER Experiment Name: At_Drought_Soil_Dry_P Parameter: Post Timepoint (hr) Value: None
  misc_feature: MA Experiment 20001555 PARAMETER Experiment Name: At_Drought_Soil_Dry_P Parameter: Post-Treatment Value: None
  misc_feature: MA Experiment 20001555 PARAMETER Experiment Name: At_Drought_Soil_Dry_P Parameter: Timepoint (day) Value: 10
  misc_feature: MA Experiment 20001555 PARAMETER Experiment Name: At_Drought_Soil_Dry_P Parameter: Treatment Value: Drought vs. No Drought
  misc_feature: MA Experiment ID: 20001556 Result: Up-regulated in Transcription
  misc_feature: MA Experiment 20001556 PARAMETER Experiment Name: At_Drought_Soil_Dry_P Parameter: Age (day) Value: 26
  misc_feature: MA Experiment 20001556 PARAMETER Experiment Name: At_Drought_Soil_Dry_P Parameter: Organism Value: A. thaliana
  misc_feature: MA Experiment 20001556 PARAMETER Experiment Name: At_Drought_Soil_Dry_P Parameter: Plant Line Value: WS
  misc_feature: MA Experiment 20001556 PARAMETER Experiment Name: At_Drought_Soil_Dry_P Parameter: Post Timepoint (hr) Value: None
  misc_feature: MA Experiment 20001556 PARAMETER Experiment Name: At_Drought_Soil_Dry_P Parameter: Post-Treatment Value: None
  misc_feature: MA Experiment 20001556 PARAMETER Experiment Name: At_Drought_Soil_Dry_P Parameter: Timepoint (day) Value: 12
  misc_feature: MA Experiment 20001556 PARAMETER Experiment Name: At_Drought_Soil_Dry_P Parameter: Treatment Value: Drought vs. No Drought

SEQ ID NO: 32183 - protein, 345 aa, Arabidopsis thaliana; identical to SEQ ID NO: 28593
  peptide (1)..(345): Ceres Seq. ID no. 13576793
  misc_feature (285)..(345): Homolog of NCBI NO: 25316328 NR Description: hypothetical protein F8A5.23 [imported] -
  misc_feature (10)..(246): Homolog of NCBI NO: 25316328 NR Description: hypothetical protein F8A5.23 [imported] -
  misc_feature (10)..(344): Homolog of NCBI NO: 25316214 NR Description: hypothetical protein F8A5.20 [imported] -
  misc_feature (1)..(344): Homolog of NCBI NO: 30696451 NR Description: aldo/keto reductase family [Arabidopsis thaliana]
  misc_feature (1)..(344): Homolog of NCBI NO: 30102704 NR Description: At1g60680 [Arabidopsis thaliana]
  misc_feature (1)..(345): Homolog of NCBI NO: 25316216 NR Description: hypothetical protein F8A5.24 [imported] -
  misc_feature (1)..(344): Homolog of NCBI NO: 15219786 NR Description: aldo/keto reductase family [Arabidopsis thaliana]
  misc_feature (1)..(345): Homolog of NCBI NO: 30696459 NR Description: aldo/keto reductase family [Arabidopsis thaliana]
  misc_feature (1)..(345): Homolog of NCBI NO: 6562980 NR Description: auxin-induced atb2 [Arabidopsis thaliana]
  misc_feature (1)..(345): Homolog of NCBI NO: 18406861 NR Description: aldo/keto reductase family [Arabidopsis thaliana]

SEQ ID NO: 32184 - protein, 336 aa, Arabidopsis thaliana; identical to SEQ ID NO: 28594
  peptide (1)..(336): Ceres Seq. ID no. 13576794
  misc_feature (276)..(336): Homolog of NCBI NO: 25316328 NR Description: hypothetical protein F8A5.23 [imported] -
  misc_feature (1)..(237): Homolog of NCBI NO: 25316328 NR Description: hypothetical protein F8A5.23 [imported] -
  misc_feature (1)..(335): Homolog of NCBI NO: 25316214 NR Description: hypothetical protein F8A5.20 [imported] -
  misc_feature (1)..(335): Homolog of NCBI NO: 30696451 NR Description: aldo/keto reductase family [Arabidopsis thaliana]
  misc_feature (1)..(335): Homolog of NCBI NO: 30102704 NR Description: At1g60680 [Arabidopsis thaliana]
  misc_feature (1)..(336): Homolog of NCBI NO: 25316216 NR Description: hypothetical protein F8A5.24 [imported] -
  misc_feature (1)..(335): Homolog of NCBI NO: 15219786 NR Description: aldo/keto reductase family [Arabidopsis thaliana]
  misc_feature (1)..(336): Homolog of NCBI NO: 30696459 NR Description: aldo/keto reductase family [Arabidopsis thaliana]
  misc_feature (1)..(336): Homolog of NCBI NO: 6562980 NR Description: auxin-induced atb2 [Arabidopsis thaliana]
  misc_feature (1)..(336): Homolog of NCBI NO: 18406861 NR Description: aldo/keto reductase family [Arabidopsis thaliana]

SEQ ID NO: 32185 - protein, 319 aa, Arabidopsis thaliana; identical to SEQ ID NO: 28595
  peptide (1)..(319): Ceres Seq. ID no. 13576795
  misc_feature (259)..(319): Homolog of NCBI NO: 25316328 NR Description: hypothetical protein F8A5.23 [imported] -
  misc_feature (1)..(220): Homolog of NCBI NO: 25316328 NR Description: hypothetical protein F8A5.23 [imported] -
  misc_feature (1)..(318): Homolog of NCBI NO: 25316214 NR Description: hypothetical protein F8A5.20 [imported] -
  misc_feature (1)..(318): Homolog of NCBI NO: 30696451 NR Description: aldo/keto reductase family [Arabidopsis thaliana]
  misc_feature (1)..(318): Homolog of NCBI NO: 30102704 NR Description: At1g60680 [Arabidopsis thaliana]
  misc_feature (1)..(319): Homolog of NCBI NO: 25316216 NR Description: hypothetical protein F8A5.24 [imported] -
  misc_feature (1)..(318): Homolog of NCBI NO: 15219786 NR Description: aldo/keto reductase family [Arabidopsis thaliana]
  misc_feature (1)..(319): Homolog of NCBI NO: 30696459 NR Description: aldo/keto reductase family [Arabidopsis thaliana]
  misc_feature (1)..(319): Homolog of NCBI NO: 6562980 NR Description: auxin-induced atb2 [Arabidopsis thaliana]
  misc_feature (1)..(319): Homolog of NCBI NO: 18406861 NR Description: aldo/keto reductase family [Arabidopsis thaliana]

SEQ ID NO: 32186 - DNA, 2940 bp, Arabidopsis thaliana; identical to SEQ ID NO: 28596
  misc_feature (1)..(2940): Ceres Seq. ID no. 13490223
  misc_feature: MA Experiment ID: 108595 Result: Down-regulated in Transcription
  misc_feature: MA Experiment 108595 PARAMETER Experiment Name: At_Ler-pi_Ovule_cDNA_P Parameter: Plant Line Value: null
  misc_feature: MA Experiment ID: 20001904 Result: Up-regulated in Transcription
  misc_feature: MA Experiment 20001904 PARAMETER Experiment Name: At_Drought_Reproduction_P Parameter: Age (day) Value: 37
  misc_feature: MA Experiment 20001904 PARAMETER Experiment Name: At_Drought_Reproduction_P Parameter: Organism Value: A. thaliana
  misc_feature: MA Experiment 20001904 PARAMETER Experiment Name: At_Drought_Reproduction_P Parameter: Plant Line Value: WS
  misc_feature: MA Experiment 20001904 PARAMETER Experiment Name: At_Drought_Reproduction_P Parameter: Timepoint (day) Value: 7
  misc_feature: MA Experiment 20001904 PARAMETER Experiment Name: At_Drought_Reproduction_P Parameter: Tissue Value: Rosettes
  misc_feature: MA Experiment 20001904 PARAMETER Experiment Name: At_Drought_Reproduction_P Parameter: Treatment Value: Drought vs. No Drought

SEQ ID NO: 32187 - protein, 392 aa, Arabidopsis thaliana; identical to SEQ ID NO: 28597
  peptide (1)..(392): Ceres Seq. ID no. 13490224
  misc_feature (88)..(349): Pfam Name: Protein phosphatase 2C Pfam Description: Protein phosphatase 2C
  misc_feature (76)..(389): Homolog of NCBI NO: 30684431 NR Description: protein phosphatase 2C (PP2C) -related
  misc_feature (83)..(388): Homolog of NCBI NO: 34894410 NR Description: putative protein phosphatase
  misc_feature (49)..(390): Homolog of NCBI NO: 15230495 NR Description: protein phosphatase 2C (PP2C), putative
  misc_feature (27)..(389): Homolog of NCBI NO: 15226152 NR Description: protein phosphatase 2C (PP2C) [Arabidopsis
  misc_feature (78)..(387): Homolog of NCBI NO: 24413992 NR Description: putative DNA-binding protein phosphatase 2C
  misc_feature (84)..(388): Homolog of NCBI NO: 37536524 NR Description: putative protein phosphatase-2C
  misc_feature (57)..(388): Homolog of NCBI NO: 10140768 NR Description: putative protein phosphatase-2C [Oryza sativa]
  misc_feature (54)..(389): Homolog of NCBI NO: 21693562 NR Description: DNA-binding protein phosphatase 2C [Nicotiana
  misc_feature (11)..(390): Homolog of NCBI NO: 20146108 NR Description: protein phosphatase 2C [Mesembryanthemum
  misc_feature (1)..(392): Homolog of NCBI NO: 15224766 NR Description: protein phosphatase 2C (PP2C), putative

SEQ ID NO: 32188 - protein, 328 aa, Arabidopsis thaliana; identical to SEQ ID NO: 28598
  peptide (1)..(328): Ceres Seq. ID no. 13490225
  misc_feature (24)..(285): Pfam Name: Protein phosphatase 2C Pfam Description: Protein phosphatase 2C
  misc_feature (12)..(325): Homolog of NCBI NO: 30684431 NR Description: protein phosphatase 2C (PP2C) -related
  misc_feature (19)..(324): Homolog of NCBI NO: 34894410 NR Description: putative protein phosphatase
  misc_feature (1)..(326): Homolog of NCBI NO: 15230495 NR Description: protein phosphatase 2C (PP2C), putative
  misc_feature (1)..(325): Homolog of NCBI NO: 15226152 NR Description: protein phosphatase 2C (PP2C) [Arabidopsis
  misc_feature (14)..(323): Homolog of NCBI NO: 24413992 NR Description: putative DNA-binding protein phosphatase 2C
  misc_feature (20)..(324): Homolog of NCBI NO: 37536524 NR Description: putative protein phosphatase-2C
  misc_feature (1)..(324): Homolog of NCBI NO: 10140768 NR Description: putative protein phosphatase-2C [Oryza sativa]
  misc_feature (1)..(325): Homolog of NCBI NO: 21693562 NR Description: DNA-binding protein phosphatase 2C [Nicotiana
  misc_feature (1)..(326): Homolog of NCBI NO: 20146108 NR Description: protein phosphatase 2C [Mesembryanthemum
  misc_feature (1)..(328): Homolog of NCBI NO: 15224766 NR Description: protein phosphatase 2C (PP2C), putative

SEQ ID NO: 32189 - protein, 291 aa, Arabidopsis thaliana; identical to SEQ ID NO: 28599
  peptide (1)..(291): Ceres Seq. ID no. 13490226
  misc_feature (1)..(248): Pfam Name: Protein phosphatase 2C Pfam Description: Protein phosphatase 2C
  misc_feature (1)..(288): Homolog of NCBI NO: 30684431 NR Description: protein phosphatase 2C (PP2C) -related
  misc_feature (1)..(287): Homolog of NCBI NO: 34894410 NR Description: putative protein phosphatase
  misc_feature (1)..(289): Homolog of NCBI NO: 15230495 NR Description: protein phosphatase 2C (PP2C), putative
  misc_feature (1)..(288): Homolog of NCBI NO: 15226152 NR Description: protein phosphatase 2C (PP2C) [Arabidopsis
  misc_feature (1)..(286): Homolog of NCBI NO: 24413992 NR Description: putative DNA-binding protein phosphatase 2C
  misc_feature (1)..(287): Homolog of NCBI NO: 37536524 NR Description: putative protein phosphatase-2C
  misc_feature (1)..(287): Homolog of NCBI NO: 10140768 NR Description: putative protein phosphatase-2C [Oryza sativa]
  misc_feature (1)..(288): Homolog of NCBI NO: 21693562 NR Description: DNA-binding protein phosphatase 2C [Nicotiana
  misc_feature (1)..(289): Homolog of NCBI NO: 20146108 NR Description: protein phosphatase 2C [Mesembryanthemum
  misc_feature (1)..(291): Homolog of NCBI NO: 15224766 NR Description: protein phosphatase 2C (PP2C), putative

SEQ ID NO: 32190 - DNA, 703 bp, Arabidopsis thaliana; identical to SEQ ID NO: 28600
  misc_feature (1)..(703): Ceres Seq. ID no. 12330136
  misc_feature: MA Experiment ID: 108434 Result: Down-regulated in Transcription
  misc_feature: MA Experiment 108434 PARAMETER Experiment Name: At_Root_Tips_cDNA_P Parameter: Tissue Value: Root Tips
  misc_feature: MA Experiment ID: 108461 Result: Down-regulated in Transcription
  misc_feature: MA Experiment 108461 PARAMETER Experiment Name: At_Germinating_Seeds_cDNA_P Parameter: Age (day) Value: 1 vs. 0
  misc_feature: MA Experiment 108461 PARAMETER Experiment Name: At_Germinating_Seeds_cDNA_P Parameter: Tissue Value: Germinating Seeds
  misc_feature: MA Experiment ID: 108462 Result: Down-regulated in Transcription
  misc_feature: MA Experiment 108462 PARAMETER Experiment Name: At_Germinating_Seeds_cDNA_P Parameter: Age (day) Value: 2 vs. 0
  misc_feature: MA Experiment 108462 PARAMETER Experiment Name: At_Germinating_Seeds_cDNA_P Parameter: Tissue Value: Germinating Seeds
  misc_feature: MA Experiment ID: 108463 Result: Down-regulated in Transcription
  misc_feature: MA Experiment 108463 PARAMETER Experiment Name: At_Germinating_Seeds_cDNA_P Parameter: Age (day) Value: 3 vs. 0
  misc_feature: MA Experiment 108463 PARAMETER Experiment Name: At_Germinating_Seeds_cDNA_P Parameter: Tissue Value: Germinating Seeds
  misc_feature: MA Experiment ID: 108464 Result: Down-regulated in Transcription
  misc_feature: MA Experiment 108464 PARAMETER Experiment Name: At_Germinating_Seeds_cDNA_P Parameter: Age (day) Value: 4 vs. 0
  misc_feature: MA Experiment 108464 PARAMETER Experiment Name: At_Germinating_Seeds_cDNA_P Parameter: Tissue Value: Germinating Seeds
  misc_feature: MA Experiment ID: 108469 Result: Up-regulated in Transcription
  misc_feature: MA Experiment ID: 108488 Result: Down-regulated in Transcription
  misc_feature: MA Experiment ID: 108489 Result: Up-regulated in Transcription
  misc_feature: MA Experiment ID: 108561 Result: Up-regulated in Transcription
  misc_feature: MA Experiment 108561 PARAMETER Experiment Name: At_100uM_ABA_cDNA_P Parameter: Timepoint (hr) Value: 6
  misc_feature: MA Experiment 108561 PARAMETER Experiment Name: At_100uM_ABA_cDNA_P Parameter: Tissue Value: Aerial
  misc_feature: MA Experiment 108561 PARAMETER Experiment Name: At_100uM_ABA_cDNA_P Parameter: Treatment Value: 100uM ABA vs. No Treatment
  misc_feature: MA Experiment ID: 108573 Result: Up-regulated in Transcription
  misc_feature: MA Experiment 108573 PARAMETER Experiment Name: At_Drought_cDNA_P Parameter: Timepoint (hr) Value: 6
  misc_feature: MA Experiment 108573 PARAMETER Experiment Name: At_Drought_cDNA_P Parameter: Tissue Value: Aerial
  misc_feature: MA Experiment 108573 PARAMETER Experiment Name: At_Drought_cDNA_P Parameter: Treatment Value: Drought vs. No Drought
  misc_feature: MA Experiment ID: 108574 Result: Up-regulated in Transcription
  misc_feature: MA Experiment 108574 PARAMETER Experiment Name: At_Wounding__cDNA_P Parameter: Timepoint (hr) Value: 1
  misc_feature: MA Experiment 108574 PARAMETER Experiment Name: At_Wounding__cDNA_P Parameter: Tissue Value: Aerial
  misc_feature: MA Experiment 108574 PARAMETER Experiment Name: At_Wounding__cDNA_P Parameter: Treatment Value: Wounding vs. No Wounding
  misc_feature: MA Experiment ID: 108576 Result: Up-regulated in Transcription
  misc_feature: MA Experiment 108576 PARAMETER Experiment Name: At_42deg_Heat_cDNA_P Parameter: Temperature (deg C) Value: 42 vs. 22
  misc_feature: MA Experiment 108576 PARAMETER Experiment Name: At_42deg_Heat_cDNA_P Parameter: Timepoint (hr) Value: 1
  misc_feature: MA Experiment 108576 PARAMETER Experiment Name: At_42deg_Heat_cDNA_P Parameter: Tissue Value: Aerial
  misc_feature: MA Experiment ID: 108577 Result: Up-regulated in Transcription
  misc_feature: MA Experiment 108577 PARAMETER Experiment Name: At_42deg_Heat_cDNA_P Parameter: Temperature (deg C) Value: 42 vs. 22
  misc_feature: MA Experiment 108577 PARAMETER Experiment Name: At_42deg_Heat_cDNA_P Parameter: Timepoint (hr) Value: 6
  misc_feature: MA Experiment 108577 PARAMETER Experiment Name: At_42deg_Heat_cDNA_P Parameter: Tissue Value: Aerial
  misc_feature: MA Experiment ID: 108585 Result: Up-regulated in Transcription
  misc_feature: MA Experiment 108585 PARAMETER Experiment Name: At_5mM_NaNP_cDNA_P Parameter: Timepoint (hr) Value: 6
  misc_feature: MA Experiment 108585 PARAMETER Experiment Name: At_5mM_NaNP_cDNA_P Parameter: Tissue Value: Aerial
  misc_feature: MA Experiment 108585 PARAMETER Experiment Name: At_5mM_NaNP_cDNA_P Parameter: Treatment Value: null
  misc_feature: MA Experiment ID: 108595 Result: Up-regulated in Transcription
  misc_feature: MA Experiment 108595 PARAMETER Experiment Name: At_Ler-pi_Ovule_cDNA_P Parameter: Plant Line Value: null
  misc_feature: MA Experiment ID: 108607 Result: Up-regulated in Transcription
  misc_feature: MA Experiment 108607 PARAMETER Experiment Name: At_100uM_ABA_cDNA_P Parameter: Timepoint (hr) Value: 4
  misc_feature: MA Experiment 108607 PARAMETER Experiment Name: At_100uM_ABA_cDNA_P Parameter: Tissue Value: Aerial
  misc_feature: MA Experiment 108607 PARAMETER Experiment Name: At_100uM_ABA_cDNA_P Parameter: Treatment Value: 100uM ABA vs. No Treatment
  misc_feature: MA Experiment ID: 108608 Result: Up-regulated in Transcription
  misc_feature: MA Experiment 108608 PARAMETER Experiment Name: At_100uM_ABA_cDNA_P Parameter: Timepoint (hr) Value: 1
  misc_feature: MA Experiment 108608 PARAMETER Experiment Name: At_100uM_ABA_cDNA_P Parameter: Tissue Value: Aerial
  misc_feature: MA Experiment 108608 PARAMETER Experiment Name: At_100uM_ABA_cDNA_P Parameter: Treatment Value: 100uM ABA vs. No Treatment
  misc_feature: MA Experiment ID: 108667 Result: Up-regulated in Transcription
  misc_feature: MA Experiment 108667 PARAMETER Experiment Name: At_2mM_SA_cDNA_P Parameter: Plant Line Value: WS
  misc_feature: MA Experiment 108667 PARAMETER Experiment Name: At_2mM_SA_cDNA_P Parameter: Timepoint (hr) Value: 1
  misc_feature: MA Experiment 108667 PARAMETER Experiment Name: At_2mM_SA_cDNA_P Parameter: Treatment Value: 2mM SA vs. No Treatment
  misc_feature: MA Experiment ID: 108668 Result: Up-regulated in Transcription
  misc_feature: MA Experiment 108668 PARAMETER Experiment Name: At_2mM_SA_cDNA_P Parameter: Plant Line Value: WS
  misc_feature: MA Experiment 108668 PARAMETER Experiment Name: At_2mM_SA_cDNA_P Parameter: Timepoint (hr) Value: 6
  misc_feature: MA Experiment 108668 PARAMETER Experiment Name: At_2mM_SA_cDNA_P Parameter: Treatment Value: 2mM SA vs. No Treatment
  misc_feature: MA Experiment ID: 20000069 Result: Up-regulated in Transcription
  misc_feature: MA Experiment 20000069 PARAMETER Experiment Name: At_100uM_ABA_Mutants_cDNA_P Parameter: Plant Line Value: CS23
  misc_feature: MA Experiment 20000069 PARAMETER Experiment Name: At_100uM_ABA_Mutants_cDNA_P Parameter: Timepoint (hr) Value: 6
  misc_feature: MA Experiment 20000069 PARAMETER Experiment Name: At_100uM_ABA_Mutants_cDNA_P Parameter: Tissue Value: Aerial
  misc_feature: MA Experiment 20000069 PARAMETER Experiment Name: At_100uM_ABA_Mutants_cDNA_P Parameter: Treatment Value: 100uM ABA vs. No Treatment
  misc_feature: MA Experiment ID: 20000070 Result: Up-regulated in Transcription
  misc_feature: MA Experiment 20000070 PARAMETER Experiment Name: At_100uM_ABA_Mutants_cDNA_P Parameter: Plant Line Value: CS24
  misc_feature: MA Experiment 20000070 PARAMETER Experiment Name: At_100uM_ABA_Mutants_cDNA_P Parameter: Timepoint (hr) Value: 6
  misc_feature: MA Experiment 20000070 PARAMETER Experiment Name: At_100uM_ABA_Mutants_cDNA_P Parameter: Tissue Value: Aerial
  misc_feature: MA Experiment 20000070 PARAMETER Experiment Name: At_100uM_ABA_Mutants_cDNA_P Parameter: Treatment Value: 100uM ABA vs. No Treatment
  misc_feature: MA Experiment ID: 20000071 Result: Up-regulated in Transcription
  misc_feature: MA Experiment 20000071 PARAMETER Experiment Name: At_100uM_ABA_Mutants_cDNA_P Parameter: Plant Line Value: CS8104
  misc_feature: MA Experiment 20000071 PARAMETER Experiment Name: At_100uM_ABA_Mutants_cDNA_P Parameter: Timepoint (hr) Value: 6
  misc_feature: MA Experiment 20000071 PARAMETER Experiment Name: At_100uM_ABA_Mutants_cDNA_P Parameter: Tissue Value: Aerial
  misc_feature: MA Experiment 20000071 PARAMETER Experiment Name: At_100uM_ABA_Mutants_cDNA_P Parameter: Treatment Value: 100uM ABA vs. No Treatment
  misc_feature: MA Experiment ID: 20000072 Result: Up-regulated in Transcription
  misc_feature: MA Experiment 20000072 PARAMETER Experiment Name: At_100uM_ABA_Mutants_cDNA_P Parameter: Plant Line Value: CS8105
  misc_feature: MA Experiment 20000072 PARAMETER Experiment Name: At_100uM_ABA_Mutants_cDNA_P Parameter: Timepoint (hr) Value: 6
  misc_feature: MA Experiment 20000072 PARAMETER Experiment Name: At_100uM_ABA_Mutants_cDNA_P Parameter: Tissue Value: Aerial
  misc_feature: MA Experiment 20000072 PARAMETER Experiment Name: At_100uM_ABA_Mutants_cDNA_P Parameter: Treatment Value: 100uM ABA vs. No Treatment
  misc_feature: MA Experiment ID: 20000086 Result: Up-regulated in Transcription
  misc_feature: MA Experiment 20000086 PARAMETER Experiment Name: At_100uM_ABA_Mutants_cDNA_P Parameter: Plant Line Value: CS22
  misc_feature: MA Experiment 20000086 PARAMETER Experiment Name: At_100uM_ABA_Mutants_cDNA_P Parameter: Timepoint (hr) Value: 6
  misc_feature: MA Experiment 20000086 PARAMETER Experiment Name: At_100uM_ABA_Mutants_cDNA_P Parameter: Tissue Value: Aerial
  misc_feature: MA Experiment 20000086 PARAMETER Experiment Name: At_100uM_ABA_Mutants_cDNA_P Parameter: Treatment Value: 100uM ABA vs. No Treatment
  misc_feature: MA Experiment ID: 20000087 Result: Up-regulated in Transcription
  misc_feature: MA Experiment 20000087 PARAMETER Experiment Name: At_100uM_ABA_Mutants_cDNA_P Parameter: Plant Line Value: WS
  misc_feature: MA Experiment 20000087 PARAMETER Experiment Name: At_100uM_ABA_Mutants_cDNA_P Parameter: Timepoint (hr) Value: 6
  misc_feature: MA Experiment 20000087 PARAMETER Experiment Name: At_100uM_ABA_Mutants_cDNA_P Parameter: Tissue Value: Aerial
  misc_feature: MA Experiment 20000087 PARAMETER Experiment Name: At_100uM_ABA_Mutants_cDNA_P Parameter: Treatment Value: 100uM ABA vs. No Treatment
  misc_feature: MA Experiment ID: 20000112 Result: Up-regulated in Transcription
  misc_feature: MA Experiment 20000112 PARAMETER Experiment Name: At_42deg_Heat_cDNA_P Parameter: Temperature (deg C) Value: 42 vs. 22
  misc_feature: MA Experiment 20000112 PARAMETER Experiment Name: At_42deg_Heat_cDNA_P Parameter: Timepoint (hr) Value: 2
  misc_feature: MA Experiment 20000112 PARAMETER Experiment Name: At_42deg_Heat_cDNA_P Parameter: Tissue Value: Aerial
  misc_feature: MA Experiment ID: 20000113 Result: Up-regulated in Transcription
  misc_feature: MA Experiment 20000113 PARAMETER Experiment Name: At_42deg_Heat_cDNA_P Parameter: Temperature (deg C) Value: 42 vs. 22
  misc_feature: MA Experiment 20000113 PARAMETER Experiment Name: At_42deg_Heat_cDNA_P Parameter: Timepoint (hr) Value: 8
  misc_feature: MA Experiment 20000113 PARAMETER Experiment Name: At_42deg_Heat_cDNA_P Parameter: Tissue Value: Aerial
  misc_feature: MA Experiment ID: 20000117 Result: Up-regulated in Transcription
  misc_feature: MA Experiment 20000117 PARAMETER Experiment Name: At_100uM_ABA_Mutants_cDNA_P Parameter: Plant Line Value: Columbia
  misc_feature: MA Experiment 20000117 PARAMETER Experiment Name: At_100uM_ABA_Mutants_cDNA_P Parameter: Timepoint (hr) Value: 6
  misc_feature: MA Experiment 20000117 PARAMETER Experiment Name: At_100uM_ABA_Mutants_cDNA_P Parameter: Tissue Value: Aerial
  misc_feature: MA Experiment 20000117 PARAMETER Experiment Name: At_100uM_ABA_Mutants_cDNA_P Parameter: Treatment Value: 100uM ABA vs. No Treatment
  misc_feature: MA Experiment ID: 20000144 Result: Up-regulated in Transcription
  misc_feature: MA Experiment 20000144 PARAMETER Experiment Name: At_42deg_Heat_cDNA_P Parameter: Temperature (deg C) Value: 42 vs. 22
  misc_feature: MA Experiment 20000144 PARAMETER Experiment Name: At_42deg_Heat_cDNA_P Parameter: Timepoint (hr) Value: 1
  misc_feature: MA Experiment 20000144 PARAMETER Experiment Name: At_42deg_Heat_cDNA_P Parameter: Tissue Value: Aerial
  misc_feature: MA Experiment ID: 20000166 Result: Up-regulated in Transcription
  misc_feature: MA Experiment 20000166 PARAMETER Experiment Name: At_100uM_ABA_P Parameter: Age (day) Value: 14
  misc_feature: MA Experiment 20000166 PARAMETER Experiment Name: At_100uM_ABA_P Parameter: Organism Value: A. thaliana
  misc_feature: MA Experiment 20000166 PARAMETER Experiment Name: At_100uM_ABA_P Parameter: Plant Line Value: WS
  misc_feature: MA Experiment 20000166 PARAMETER Experiment Name: At_100uM_ABA_P Parameter: Timepoint (hr) Value: 1
  misc_feature: MA Experiment 20000166 PARAMETER Experiment Name: At_100uM_ABA_P Parameter: Tissue Value: Aerial
  misc_feature: MA Experiment 20000166 PARAMETER Experiment Name: At_100uM_ABA_P Parameter: Treatment Value: 100uM ABA vs. No Treatment
  misc_feature: MA Experiment ID: 20000171 Result: Up-regulated in Transcription
  misc_feature: MA Experiment 20000171 PARAMETER Experiment Name: At_42deg_Heat_P Parameter: Age (day) Value: 14
  misc_feature: MA Experiment 20000171 PARAMETER Experiment Name: At_42deg_Heat_P Parameter: Organism Value: A. thaliana
  misc_feature: MA Experiment 20000171 PARAMETER Experiment Name: At_42deg_Heat_P Parameter: Plant Line Value: WS
  misc_feature: MA Experiment 20000171 PARAMETER Experiment Name: At_42deg_Heat_P Parameter: Temperature (deg C) Value: 42 vs. 22
  misc_feature: MA Experiment 20000171 PARAMETER Experiment Name: At_42deg_Heat_P Parameter: Timepoint (hr) Value: 1
  misc_feature: MA Experiment 20000171 PARAMETER Experiment Name: At_42deg_Heat_P Parameter: Tissue Value: Aerial
  misc_feature: MA Experiment ID: 20000173 Result: Up-regulated in Transcription
  misc_feature: MA Experiment 20000173 PARAMETER Experiment Name: At_42deg_Heat_P Parameter: Age (day) Value: 14
  misc_feature: MA Experiment 20000173 PARAMETER Experiment Name: At_42deg_Heat_P Parameter: Organism Value: A. thaliana
  misc_feature: MA Experiment 20000173 PARAMETER Experiment Name: At_42deg_Heat_P Parameter: Plant Line Value: WS
  misc_feature: MA Experiment 20000173 PARAMETER Experiment Name: At_42deg_Heat_P Parameter: Temperature (deg C) Value: 42 vs. 22
  misc_feature: MA Experiment 20000173 PARAMETER Experiment Name: At_42deg_Heat_P Parameter: Timepoint (hr) Value: 6
  misc_feature: MA Experiment 20000173 PARAMETER Experiment Name: At_42deg_Heat_P Parameter: Tissue Value: Aerial
  misc_feature: MA Experiment ID: 20000179 Result: Down-regulated in Transcription
  misc_feature: MA Experiment 20000179 PARAMETER Experiment Name: At_Germinating_Seeds_P Parameter: Age (hr) Value: 6 vs. 0
  misc_feature: MA Experiment 20000179 PARAMETER Experiment Name: At_Germinating_Seeds_P Parameter: Tissue Value: Germinating Seeds
  misc_feature: MA Experiment ID: 20000180 Result: Down-regulated in Transcription
  misc_feature: MA Experiment 20000180 PARAMETER Experiment Name: At_Germinating_Seeds_P Parameter: Age (hr) Value: 24 vs. 0
  misc_feature: MA Experiment 20000180 PARAMETER Experiment Name: At_Germinating_Seeds_P Parameter: Tissue Value: Germinating Seeds
  misc_feature: MA Experiment ID: 20000182 Result: Up-regulated in Transcription
  misc_feature: MA Experiment 20000182 PARAMETER Experiment Name: At_2mM_SA_P Parameter: Age (day) Value: 14
  misc_feature: MA Experiment 20000182 PARAMETER Experiment Name: At_2mM_SA_P Parameter: Organism Value: A. thaliana
  misc_feature: MA Experiment 20000182 PARAMETER Experiment Name: At_2mM_SA_P Parameter: Plant Line Value: WS
  misc_feature: MA Experiment 20000182 PARAMETER Experiment Name: At_2mM_SA_P Parameter: Timepoint (hr) Value: 6
  misc_feature: MA Experiment 20000182 PARAMETER Experiment Name: At_2mM_SA_P Parameter: Tissue Value: Aerial
  misc_feature: MA Experiment 20000182 PARAMETER Experiment Name: At_2mM_SA_P Parameter: Treatment Value: 2mM SA vs. No Treatment
  misc_feature: MA Experiment ID: 20000184 Result: Down-regulated in Transcription
  misc_feature: MA Experiment 20000184 PARAMETER Experiment Name: At_Shoots__P Parameter: Age (day) Value: 7
  misc_feature: MA Experiment 20000184 PARAMETER Experiment Name: At_Shoots__P Parameter: Tissue Value: Shoots vs. Whole Plant
  misc_feature: MA Experiment ID: 20000234 Result: Down-regulated in Transcription
  misc_feature: MA Experiment 20000234 PARAMETER Experiment Name: At_Siliques_P Parameter: Age (day) Value: 21
  misc_feature: MA Experiment 20000234 PARAMETER Experiment Name: At_Siliques_P Parameter: Organism Value: A. thaliana
  misc_feature: MA Experiment 20000234 PARAMETER Experiment Name: At_Siliques_P Parameter: Plant Line Value: WS
  misc_feature: MA Experiment 20000234 PARAMETER Experiment Name: At_Siliques_P Parameter: Tissue Value: Less Than 5mm Siliques vs. Whole Plant
  misc_feature: MA Experiment ID: 20000235 Result: Down-regulated in Transcription
  misc_feature: MA Experiment 20000235 PARAMETER Experiment Name: At_Siliques_P Parameter: Age (day) Value: 21
  misc_feature: MA Experiment 20000235 PARAMETER Experiment Name: At_Siliques_P Parameter: Organism Value: A. thaliana
  misc_feature: MA Experiment 20000235 PARAMETER Experiment Name: At_Siliques_P Parameter: Plant Line Value: WS
  misc_feature: MA Experiment 20000235 PARAMETER Experiment Name: At_Siliques_P Parameter: Tissue Value: 5-10mm Siliques vs. Whole Plant
  misc_feature: MA Experiment ID: 20000264 Result: Down-regulated in Transcription
  misc_feature: MA Experiment 20000264 PARAMETER Experiment Name: At_Open_Flower_P Parameter: Age (day) Value: 21
  misc_feature: MA Experiment 20000264 PARAMETER Experiment Name: At_Open_Flower_P Parameter: Plant Line Value: WS
  misc_feature: MA Experiment 20000264 PARAMETER Experiment Name: At_Open_Flower_P Parameter: Tissue Value: Open Flower vs. Whole Plant
  misc_feature: MA Experiment ID: 20000265 Result: Down-regulated in Transcription
  misc_feature: MA Experiment 20000265 PARAMETER Experiment Name: At_Open_Flower_P Parameter: Age (day) Value: 21
  misc_feature: MA Experiment 20000265 PARAMETER Experiment Name: At_Open_Flower_P Parameter: Plant Line Value: WS
  misc_feature: MA Experiment 20000265 PARAMETER Experiment Name: At_Open_Flower_P Parameter: Tissue Value: Closed Flower vs. Whole Plant
  misc_feature: MA Experiment ID: 20000286 Result: Down-regulated in Transcription
  misc_feature: MA Experiment 20000286 PARAMETER Experiment Name: At_Open_Flower_P Parameter: Age (day) Value: 21
  misc_feature: MA Experiment 20000286 PARAMETER Experiment Name: At_Open_Flower_P Parameter: Plant Line Value: WS
  misc_feature: MA Experiment 20000286 PARAMETER Experiment Name: At_Open_Flower_P Parameter: Tissue Value: Half Open vs. Whole Plant
  misc_feature: MA Experiment ID: 20000437 Result: Up-regulated in Transcription
  misc_feature: MA Experiment 20000437 PARAMETER Experiment Name: At_Drought_P Parameter: Age (day) Value: 8
  misc_feature: MA Experiment 20000437 PARAMETER Experiment Name: At_Drought_P Parameter: Organism Value: A. thaliana
  misc_feature: MA Experiment 20000437 PARAMETER Experiment Name: At_Drought_P Parameter: Plant Line Value: WS
  misc_feature: MA Experiment 20000437 PARAMETER Experiment Name: At_Drought_P Parameter: Timepoint (hr) Value: 24
  misc_feature: MA Experiment 20000437 PARAMETER Experiment Name: At_Drought_P Parameter: Tissue Value: Whole Plant
  misc_feature: MA Experiment 20000437 PARAMETER Experiment Name: At_Drought_P Parameter: Treatment Value: Drought vs. No Drought
  misc_feature: MA Experiment ID: 20000438 Result: Down-regulated in Transcription
  misc_feature: MA Experiment 20000438 PARAMETER Experiment Name: At_Shoots__P Parameter: Age (day) Value: 14
  misc_feature: MA Experiment 20000438 PARAMETER Experiment Name: At_Shoots__P Parameter: Tissue Value: Shoots vs. Whole Plant
  misc_feature: MA Experiment ID: 20000453 Result: Up-regulated in Transcription
  misc_feature: MA Experiment 20000453 PARAMETER Experiment Name: At_100uM_ABA_P Parameter: Age (day) Value: 15
  misc_feature: MA Experiment 20000453 PARAMETER Experiment Name: At_100uM_ABA_P Parameter: Organism Value: A. thaliana
  misc_feature: MA Experiment 20000453 PARAMETER Experiment Name: At_100uM_ABA_P Parameter: Plant Line Value: WS
  misc_feature: MA Experiment 20000453 PARAMETER Experiment Name: At_100uM_ABA_P Parameter: Timepoint (hr) Value: 24
  misc_feature: MA Experiment 20000453 PARAMETER Experiment Name: At_100uM_ABA_P Parameter: Tissue Value: Aerial
  misc_feature: MA Experiment 20000453 PARAMETER Experiment Name: At_100uM_ABA_P Parameter: Treatment Value: 100uM ABA vs. No Treatment
  misc_feature: MA Experiment ID: 20000456 Result: Up-regulated in Transcription
  misc_feature: MA Experiment 20000456 PARAMETER Experiment Name: At_100uM_BA_P Parameter: Age (day) Value: 14
  misc_feature: MA Experiment 20000456 PARAMETER Experiment Name: At_100uM_BA_P Parameter: Organism Value: A. thaliana
  misc_feature: MA Experiment 20000456 PARAMETER Experiment Name: At_100uM_BA_P Parameter: Plant Line Value: WS
  misc_feature: MA Experiment 20000456 PARAMETER Experiment Name: At_100uM_BA_P Parameter: Timepoint (hr) Value: 6
  misc_feature: MA Experiment 20000456 PARAMETER Experiment Name: At_100uM_BA_P Parameter: Tissue Value: Aerial
  misc_feature: MA Experiment 20000456 PARAMETER Experiment Name: At_100uM_BA_P Parameter: Treatment Value: 100uM BA vs. No Treatment
  misc_feature: MA Experiment ID: 20000460 Result: Up-regulated in Transcription
  misc_feature: MA Experiment 20000460 PARAMETER Experiment Name: At_10percent_PEG_P Parameter: Age (day) Value: 12
  misc_feature: MA Experiment 20000460 PARAMETER Experiment Name: At_10percent_PEG_P Parameter: Organism Value: A. thaliana
  misc_feature: MA Experiment 20000460 PARAMETER Experiment Name: At_10percent_PEG_P Parameter: Plant Line Value: WS
  misc_feature: MA Experiment 20000460 PARAMETER Experiment Name: At_10percent_PEG_P Parameter: Timepoint (day) Value: 12
  misc_feature: MA Experiment 20000460 PARAMETER Experiment Name: At_10percent_PEG_P Parameter: Tissue Value: Whole Plant
  misc_feature: MA Experiment 20000460 PARAMETER Experiment Name: At_10percent_PEG_P Parameter: Treatment Value: 10percent PEG vs. No Treatment
  misc_feature: MA Experiment ID: 20000506 Result: Up-regulated in Transcription
  misc_feature: MA Experiment 20000506 PARAMETER Experiment Name: At_Wounding_P Parameter: Organism Value: A. thaliana
  misc_feature: MA Experiment 20000506 PARAMETER Experiment Name: At_Wounding_P Parameter: Plant Line Value: WS
  misc_feature: MA Experiment 20000506 PARAMETER Experiment Name: At_Wounding_P Parameter: Timepoint (hr) Value: 6
  misc_feature: MA Experiment 20000506 PARAMETER Experiment Name: At_Wounding_P Parameter: Tissue Value: Aerial
  misc_feature: MA Experiment 20000506 PARAMETER Experiment Name: At_Wounding_P Parameter: Treatment Value: Wounding vs. No Wounding
  misc_feature: MA Experiment ID: 20000527 Result: Down-regulated in Transcription
  misc_feature: MA Experiment 20000527 PARAMETER Experiment Name: At_10percent_PEG_P Parameter: Age (day) Value: 20
  misc_feature: MA Experiment 20000527 PARAMETER Experiment Name: At_10percent_PEG_P Parameter: Organism Value: A. thaliana
  misc_feature: MA Experiment 20000527 PARAMETER Experiment Name: At_10percent_PEG_P Parameter: Plant Line Value: WS
  misc_feature: MA Experiment 20000527 PARAMETER Experiment Name: At_10percent_PEG_P Parameter: Timepoint (day) Value: 20
  misc_feature: MA Experiment 20000527 PARAMETER Experiment Name: At_10percent_PEG_P Parameter: Tissue Value: Whole Plant
  misc_feature: MA Experiment 20000527 PARAMETER Experiment Name: At_10percent_PEG_P Parameter: Treatment Value: 10percent PEG vs. No Treatment
  misc_feature: MA Experiment ID: 20000574 Result: Up-regulated in Transcription
  misc_feature: MA Experiment 20000574 PARAMETER Experiment Name: At_100uM_ABA_Mutants__P Parameter: Organism Value: A. thaliana
  misc_feature: MA Experiment 20000574 PARAMETER Experiment Name: At_100uM_ABA_Mutants__P Parameter: Plant Line Value: CS23 vs. Ler wt
  misc_feature: MA Experiment 20000574 PARAMETER Experiment Name: At_100uM_ABA_Mutants__P Parameter: Timepoint (hr) Value: N/A
  misc_feature: MA Experiment 20000574 PARAMETER Experiment Name: At_100uM_ABA_Mutants__P Parameter: Tissue Value: Whole Plant
  misc_feature: MA Experiment 20000574 PARAMETER Experiment Name: At_100uM_ABA_Mutants__P Parameter: Treatment Value: None
  misc_feature: MA Experiment ID: 20000576 Result: Down-regulated in Transcription
  misc_feature: MA Experiment 20000576 PARAMETER Experiment Name: At_100uM_ABA_Mutants__P Parameter: Organism Value: A. thaliana
  misc_feature: MA Experiment 20000576 PARAMETER Experiment Name: At_100uM_ABA_Mutants__P Parameter: Plant Line Value: CS23
  misc_feature: MA Experiment 20000576 PARAMETER Experiment Name: At_100uM_ABA_Mutants__P Parameter: Timepoint (hr) Value: 6
  misc_feature: MA Experiment 20000576 PARAMETER Experiment Name: At_100uM_ABA_Mutants__P Parameter: Tissue Value: Whole Plant
  misc_feature: MA Experiment 20000576 PARAMETER Experiment Name: At_100uM_ABA_Mutants__P Parameter: Treatment Value: 1uM ABA vs. No Treatment
  misc_feature: MA Experiment ID: 20000709 Result: Up-regulated in Transcription
  misc_feature: MA Experiment 20000709 PARAMETER Experiment Name: At_15mM_NH4NO3_L-to-H_P Parameter: Age (hr) Value: 14
  misc_feature: MA Experiment 20000709 PARAMETER Experiment Name: At_15mM_NH4NO3_L-to-H_P Parameter: Organism Value: A. thaliana
  misc_feature: MA Experiment 20000709 PARAMETER Experiment Name: At_15mM_NH4NO3_L-to-H_P Parameter: Plant Line Value: WS
  misc_feature: MA Experiment 20000709 PARAMETER Experiment Name: At_15mM_NH4NO3_L-to-H_P Parameter: Timepoint (hr) Value: 4
  misc_feature: MA Experiment 20000709 PARAMETER Experiment Name: At_15mM_NH4NO3_L-to-H_P Parameter: Tissue Value: Aerial
  misc_feature: MA Experiment 20000709 PARAMETER Experiment Name: At_15mM_NH4NO3_L-to-H_P Parameter: Treatment Value: 15mM NH4NO3 vs. 30mM Mannitol
  misc_feature: MA Experiment ID: 20000794 Result: Down-regulated in Transcription
  misc_feature: MA Experiment 20000794 PARAMETER Experiment Name: At_Petals_P Parameter: Age (day) Value: 23-25 days
  misc_feature: MA Experiment 20000794 PARAMETER Experiment Name: At_Petals_P Parameter: Plant Line Value: WS
  misc_feature: MA Experiment 20000794 PARAMETER Experiment Name: At_Petals_P Parameter: Tissue Value: Petals vs. Whole plant
  misc_feature: MA Experiment ID: 20001247 Result: Up-regulated in Transcription
  misc_feature: MA Experiment 20001247 PARAMETER Experiment Name: At_Far-red-induction_P Parameter: Age (day) Value: 7
  misc_feature: MA Experiment 20001247 PARAMETER Experiment Name: At_Far-red-induction_P Parameter: Light Value: Far-red vs. White
  misc_feature: MA Experiment 20001247 PARAMETER Experiment Name: At_Far-red-induction_P Parameter: Organism Value: A. thaliana
  misc_feature: MA Experiment 20001247 PARAMETER Experiment Name: At_Far-red-induction_P Parameter: Plant Line Value: Columbia
  misc_feature: MA Experiment 20001247 PARAMETER Experiment Name: At_Far-red-induction_P Parameter: Timepoint (hr) Value: 1
  misc_feature: MA Experiment 20001247 PARAMETER Experiment Name: At_Far-red-induction_P Parameter: Tissue Value: Whole Plant
  misc_feature: MA Experiment ID: 20001557 Result: Up-regulated in Transcription
  misc_feature: MA Experiment 20001557 PARAMETER Experiment Name: At_Drought_Soil_Dry_P Parameter: Age (day) Value: 27
  misc_feature: MA Experiment 20001557 PARAMETER Experiment Name: At_Drought_Soil_Dry_P Parameter: Organism Value: A. thaliana
  misc_feature: MA Experiment 20001557 PARAMETER Experiment Name: At_Drought_Soil_Dry_P Parameter: Plant Line Value: WS
  misc_feature: MA Experiment 20001557 PARAMETER Experiment Name: At_Drought_Soil_Dry_P Parameter: Post Timepoint (hr) Value: 3
  misc_feature: MA Experiment 20001557 PARAMETER Experiment Name: At_Drought_Soil_Dry_P Parameter: Post-Treatment Value: Re-Water vs. No Drought
  misc_feature: MA Experiment 20001557 PARAMETER Experiment Name: At_Drought_Soil_Dry_P Parameter: Timepoint (day) Value: 13
  misc_feature: MA Experiment 20001557 PARAMETER Experiment Name: At_Drought_Soil_Dry_P Parameter: Treatment Value: Drought vs. No Drought
  misc_feature: MA Experiment ID: 20001558 Result: Up-regulated in Transcription
  misc_feature: MA Experiment 20001558 PARAMETER Experiment Name: At_Drought_Soil_Dry_P Parameter: Age (day) Value: 27
  misc_feature: MA Experiment 20001558 PARAMETER Experiment Name: At_Drought_Soil_Dry_P Parameter: Organism Value: A. thaliana
  misc_feature: MA Experiment 20001558 PARAMETER Experiment Name: At_Drought_Soil_Dry_P Parameter: Plant Line Value: WS
  misc_feature: MA Experiment 20001558 PARAMETER Experiment Name: At_Drought_Soil_Dry_P Parameter: Post Timepoint (hr) Value: 6
  misc_feature: MA Experiment 20001558 PARAMETER Experiment Name: At_Drought_Soil_Dry_P Parameter: Post-Treatment Value: Re-Water vs. No Drought
  misc_feature: MA Experiment 20001558 PARAMETER Experiment Name: At_Drought_Soil_Dry_P Parameter: Timepoint (day) Value: 13
  misc_feature: MA Experiment 20001558 PARAMETER Experiment Name: At_Drought_Soil_Dry_P Parameter: Treatment Value: Drought vs. No Drought
  misc_feature: MA Experiment ID: 20001560 Result: Up-regulated in Transcription
  misc_feature: MA Experiment 20001560 PARAMETER Experiment Name: At_Drought_Soil_Dry_P Parameter: Age (day) Value: 28
  misc_feature: MA Experiment 20001560 PARAMETER Experiment Name: At_Drought_Soil_Dry_P Parameter: Organism Value: A. thaliana
  misc_feature: MA Experiment 20001560 PARAMETER Experiment Name: At_Drought_Soil_Dry_P Parameter: Plant Line Value: WS
  misc_feature: MA Experiment 20001560 PARAMETER Experiment Name: At_Drought_Soil_Dry_P Parameter: Post Timepoint (hr) Value: None
  misc_feature: MA Experiment 20001560 PARAMETER Experiment Name: At_Drought_Soil_Dry_P Parameter: Post-Treatment Value: None
  misc_feature: MA Experiment 20001560 PARAMETER Experiment Name: At_Drought_Soil_Dry_P Parameter: Timepoint (day) Value: 14
  misc_feature: MA Experiment 20001560 PARAMETER Experiment Name: At_Drought_Soil_Dry_P Parameter: Treatment Value: Drought vs. No Drought
  misc_feature: MA Experiment ID: 20001772 Result: Down-regulated in Transcription
  misc_feature: MA Experiment 20001772 PARAMETER Experiment Name: At_Far-red-enriched-adult_P Parameter: Age (day) Value: 29
  misc_feature: MA Experiment 20001772 PARAMETER Experiment Name: At_Far-red-enriched-adult_P Parameter: Light Value: Far-red enriched vs. White
  misc_feature: MA Experiment 20001772 PARAMETER Experiment Name: At_Far-red-enriched-adult_P Parameter: Organism Value: A. thaliana
  misc_feature: MA Experiment 20001772 PARAMETER Experiment Name: At_Far-red-enriched-adult_P Parameter: Plant Line Value: Columbia
  misc_feature: MA Experiment 20001772 PARAMETER Experiment Name: At_Far-red-enriched-adult_P Parameter: Timepoint (hr) Value: 24
  misc_feature: MA Experiment 20001772 PARAMETER Experiment Name: At_Far-red-enriched-adult_P Parameter: Tissue Value: Aerial
  misc_feature: MA Experiment ID: 20001773 Result: Down-regulated in Transcription
  misc_feature: MA Experiment 20001773 PARAMETER Experiment Name: At_Far-red-enriched-adult_P Parameter: Age (day) Value: 30
  misc_feature: MA Experiment 20001773 PARAMETER Experiment Name: At_Far-red-enriched-adult_P Parameter: Light Value: Far-red enriched vs. White
  misc_feature: MA Experiment 20001773 PARAMETER Experiment Name: At_Far-red-enriched-adult_P Parameter: Organism Value: A. thaliana
  misc_feature: MA Experiment 20001773 PARAMETER Experiment Name: At_Far-red-enriched-adult_P Parameter: Plant Line Value: Columbia
  misc_feature: MA Experiment 20001773 PARAMETER Experiment Name: At_Far-red-enriched-adult_P Parameter: Timepoint (hr) Value: 48
  misc_feature: MA Experiment 20001773 PARAMETER Experiment Name: At_Far-red-enriched-adult_P Parameter: Tissue Value: Aerial
  misc_feature: MA Experiment ID: 20001904 Result: Up-regulated in Transcription
  misc_feature: MA Experiment 20001904 PARAMETER Experiment Name: At_Drought_Reproduction_P Parameter: Age (day) Value: 37
  misc_feature: MA Experiment 20001904 PARAMETER Experiment Name: At_Drought_Reproduction_P Parameter: Organism Value: A. thaliana
  misc_feature: MA Experiment 20001904 PARAMETER Experiment Name: At_Drought_Reproduction_P Parameter: Plant Line Value: WS
  misc_feature: MA Experiment 20001904 PARAMETER Experiment Name: At_Drought_Reproduction_P Parameter: Timepoint (day) Value: 7
  misc_feature: MA Experiment 20001904 PARAMETER Experiment Name: At_Drought_Reproduction_P Parameter: Tissue Value: Rosettes
  misc_feature: MA Experiment 20001904 PARAMETER Experiment Name: At_Drought_Reproduction_P Parameter: Treatment Value: Drought vs. No Drought
  misc_feature: MA Experiment ID: 20001911 Result: Up-regulated in Transcription
  misc_feature: MA Experiment 20001911 PARAMETER Experiment Name: At_Drought_Reproduction_P Parameter: Age (day) Value: 40
  misc_feature: MA Experiment 20001911 PARAMETER Experiment Name: At_Drought_Reproduction_P Parameter: Organism Value: A. thaliana
  misc_feature: MA Experiment 20001911 PARAMETER Experiment Name: At_Drought_Reproduction_P Parameter: Plant Line Value: WS
  misc_feature: MA Experiment 20001911 PARAMETER Experiment Name: At_Drought_Reproduction_P Parameter: Timepoint (day) Value: 10
  misc_feature: MA Experiment 20001911 PARAMETER Experiment Name: At_Drought_Reproduction_P Parameter: Tissue Value: Flowers
  misc_feature: MA Experiment 20001911 PARAMETER Experiment Name: At_Drought_Reproduction_P Parameter: Treatment Value: Drought vs. No Drought

SEQ ID NO: 32191 - protein, 204 aa, Arabidopsis thaliana; identical to SEQ ID NO: 28601
  peptide (1)..(204): Ceres Seq. ID no. 12330137
  misc_feature (121)..(166): Pfam Name: AN1-like Zinc finger Pfam Description: AN1-like Zinc finger
  misc_feature (27)..(157): Homolog of NCBI NO: 19111158 NR Description: arsenite inducible RNA associated protein [Mus
  misc_feature (27)..(158): Homolog of NCBI NO: 34876869 NR Description: similar to RIKEN cDNA 1110060O18 [Rattus
  misc_feature (27)..(158): Homolog of NCBI NO: 21312112 NR Description: RIKEN cDNA 1110060O18 [Mus musculus]
  misc_feature (27)..(158): Homolog of NCBI NO: 15079311 NR Description: RIKEN cDNA 1110060O18 gene [Mus musculus]
  misc_feature (27)..(169): Homolog of NCBI NO: 34871288 NR Description: similar to arsenite inducible RNA associated
  misc_feature (27)..(166): Homolog of NCBI NO: 33416395 NR Description: Unknown (protein for MGC:66295) [Danio rerio]
  misc_feature (23)..(157): Homolog of NCBI NO: 33146779 NR Description: putative arsenite inducible RNA associated
  misc_feature (23)..(201): Homolog of NCBI NO: 15230311 NR Description: putative protein; protein id: At3g57480.1
  misc_feature (23)..(197): Homolog of NCBI NO: 30688811 NR Description: zinc finger protein (PMZ) -related [Arabidopsis
  misc_feature (19)..(204): Homolog of NCBI NO: 15232930 NR Description: zinc finger protein (PMZ), putative

SEQ ID NO: 32192 - protein, 186 aa, Arabidopsis thaliana; identical to SEQ ID NO: 28602
  peptide (1)..(186): Ceres Seq. ID no. 12330138
  misc_feature (103)..(148): Pfam Name: AN1-like Zinc finger Pfam Description: AN1-like Zinc finger
  misc_feature (9)..(139): Homolog of NCBI NO: 19111158 NR Description: arsenite inducible RNA associated protein [Mus
  misc_feature (9)..(140): Homolog of NCBI NO: 34876869 NR Description: similar to RIKEN cDNA 1110060O18 [Rattus
  misc_feature (9)..(140): Homolog of NCBI NO: 21312112 NR Description: RIKEN cDNA 1110060O18 [Mus musculus]
  misc_feature (9)..(140): Homolog of NCBI NO: 15079311 NR Description: RIKEN cDNA 1110060O18 gene [Mus musculus]
  misc_feature (9)..(151): Homolog of NCBI NO: 34871288 NR Description: similar to arsenite inducible RNA associated
  misc_feature (9)..(148): Homolog of NCBI NO: 33416395 NR Description: Unknown (protein for MGC:66295) [Danio rerio]
  misc_feature (5)..(139): Homolog of NCBI NO: 33146779 NR Description: putative arsenite inducible RNA associated
  misc_feature (5)..(183): Homolog of NCBI NO: 15230311 NR Description: putative protein; protein id: At3g57480.1
  misc_feature (5)..(179): Homolog of NCBI NO: 30688811 NR Description: zinc finger protein (PMZ) -related [Arabidopsis
  misc_feature (1)..(186): Homolog of NCBI NO: 15232930 NR Description: zinc finger protein (PMZ), putative

SEQ ID NO: 32193 - DNA, 983 bp, Arabidopsis thaliana; identical to SEQ ID NO: 28603
  misc_feature (1)..(983): Ceres Seq. ID no. 12335989
  misc_feature: MA Experiment ID: 108576 Result: Down-regulated in Transcription
  misc_feature: MA Experiment 108576 PARAMETER Experiment Name: At_42deg_Heat_cDNA_P Parameter: Temperature (deg C) Value: 42 vs. 22
  misc_feature: MA Experiment 108576 PARAMETER Experiment Name: At_42deg_Heat_cDNA_P Parameter: Timepoint (hr) Value: 1
  misc_feature: MA Experiment 108576 PARAMETER Experiment Name: At_42deg_Heat_cDNA_P Parameter: Tissue Value: Aerial
  misc_feature: MA Experiment ID: 108577 Result: Down-regulated in Transcription
  misc_feature: MA Experiment 108577 PARAMETER Experiment Name: At_42deg_Heat_cDNA_P Parameter: Temperature (deg C) Value: 42 vs. 22
  misc_feature: MA Experiment 108577 PARAMETER Experiment Name: At_42deg_Heat_cDNA_P Parameter: Timepoint (hr) Value: 6
  misc_feature: MA Experiment 108577 PARAMETER Experiment Name: At_42deg_Heat_cDNA_P Parameter: Tissue Value: Aerial
  misc_feature: MA Experiment ID: 108585 Result: Up-regulated in Transcription
  misc_feature: MA Experiment 108585 PARAMETER Experiment Name: At_5mM_NaNP_cDNA_P Parameter: Timepoint (hr) Value: 6
  misc_feature: MA Experiment 108585 PARAMETER Experiment Name: At_5mM_NaNP_cDNA_P Parameter: Tissue Value: Aerial
  misc_feature: MA Experiment 108585 PARAMETER Experiment Name: At_5mM_NaNP_cDNA_P Parameter: Treatment Value: null
  misc_feature: MA Experiment ID: 20000184 Result: Up-regulated in Transcription
  misc_feature: MA Experiment 20000184 PARAMETER Experiment Name: At_Shoots__P Parameter: Age (day) Value: 7
  misc_feature: MA Experiment 20000184 PARAMETER Experiment Name: At_Shoots__P Parameter: Tissue Value: Shoots vs. Whole Plant
  misc_feature: MA Experiment ID: 20000224 Result: Down-regulated in Transcription

SEQ ID NO: 32194 - protein, 209 aa, Arabidopsis thaliana; identical to SEQ ID NO: 28604
  peptide (1)..(209): Ceres Seq. ID no. 12335990
  misc_feature (1)..(198): Homolog of NCBI NO: 40539036 NR Description: putative prenylated rab acceptor protein
  misc_feature (9)..(193): Homolog of NCBI NO: 18405248 NR Description: expressed protein
  misc_feature (1)..(204): Homolog of NCBI NO: 15240698 NR Description: putative protein
  misc_feature (4)..(203): Homolog of NCBI NO: 15241022 NR Description: putative protein; protein id: At5g01640.1
  misc_feature (1)..(209): Homolog of NCBI NO: 15224494 NR Description: unknown protein; protein id: At2g38360.1
  misc_feature (1)..(209): Homolog of NCBI NO: 18072825 NR Description: prenylated Rab receptor 2 [Arabidopsis thaliana]
  misc_feature (1)..(209): Homolog of NCBI NO: 15239101 NR Description: putative protein; protein id: At5g05380.1
  misc_feature (2)..(209): Homolog of NCBI NO: 15226664 NR Description: unknown protein; protein id: At2g40380.1
  misc_feature (1)..(209): Homolog of NCBI NO: 15450978 NR Description: putative protein [Arabidopsis thaliana]
  misc_feature (1)..(209): Homolog of NCBI NO: 15228824 NR Description: putative protein

SEQ ID NO: 32195 - protein, 154 aa, Arabidopsis thaliana; identical to SEQ ID NO: 28605
  peptide (1)..(154): Ceres Seq. ID no. 12335991
  misc_feature (1)..(143): Homolog of NCBI NO: 40539036 NR Description: putative prenylated rab acceptor protein
  misc_feature (1)..(138): Homolog of NCBI NO: 18405248 NR Description: expressed protein
  misc_feature (1)..(149): Homolog of NCBI NO: 15240698 NR Description: putative protein
  misc_feature (1)..(148): Homolog of NCBI NO: 15241022 NR Description: putative protein; protein id: At5g01640.1
  misc_feature (1)..(154): Homolog of NCBI NO: 15224494 NR Description: unknown protein; protein id: At2g38360.1
  misc_feature (1)..(154): Homolog of NCBI NO: 18072825 NR Description: prenylated Rab receptor 2 [Arabidopsis thaliana]
  misc_feature (1)..(154): Homolog of NCBI NO: 15239101 NR Description: putative protein; protein id: At5g05380.1
  misc_feature (1)..(154): Homolog of NCBI NO: 15226664 NR Description: unknown protein; protein id: At2g40380.1
  misc_feature (1)..(154): Homolog of NCBI NO: 15450978 NR Description: putative protein [Arabidopsis thaliana]
  misc_feature (1)..(154): Homolog of NCBI NO: 15228824 NR Description: putative protein

SEQ ID NO: 32196 - DNA, 1601 bp, Arabidopsis thaliana; identical to SEQ ID NO: 28606
  misc_feature (1)..(1601): Ceres Seq. ID no. 13491911
  misc_feature: MA Experiment ID: 20000179 Result: Up-regulated in Transcription
  misc_feature: MA Experiment 20000179 PARAMETER Experiment Name: At_Germinating_Seeds_P Parameter: Age (hr) Value: 6 vs. 0
  misc_feature: MA Experiment 20000179 PARAMETER Experiment Name: At_Germinating_Seeds_P Parameter: Tissue Value: Germinating Seeds
  misc_feature: MA Experiment ID: 20000180 Result: Up-regulated in Transcription
  misc_feature: MA Experiment 20000180 PARAMETER Experiment Name: At_Germinating_Seeds_P Parameter: Age (hr) Value: 24 vs. 0
  misc_feature: MA Experiment 20000180 PARAMETER Experiment Name: At_Germinating_Seeds_P Parameter: Tissue Value: Germinating Seeds
  misc_feature: MA Experiment ID: 20000184 Result: Up-regulated in Transcription
  misc_feature: MA Experiment 20000184 PARAMETER Experiment Name: At_Shoots__P Parameter: Age (day) Value: 7
  misc_feature: MA Experiment 20000184 PARAMETER Experiment Name: At_Shoots__P Parameter: Tissue Value: Shoots vs. Whole Plant
  misc_feature: MA Experiment ID: 20000265 Result: Up-regulated in Transcription
  misc_feature: MA Experiment 20000265 PARAMETER Experiment Name: At_Open_Flower_P Parameter: Age (day) Value: 21
  misc_feature: MA Experiment 20000265 PARAMETER Experiment Name: At_Open_Flower_P Parameter: Plant Line Value: WS
  misc_feature: MA Experiment 20000265 PARAMETER Experiment Name: At_Open_Flower_P Parameter: Tissue Value: Closed Flower vs. Whole Plant
  misc_feature: MA Experiment ID: 20000437 Result: Down-regulated in Transcription
  misc_feature: MA Experiment 20000437 PARAMETER Experiment Name: At_Drought_P Parameter: Age (day) Value: 8
  misc_feature: MA Experiment 20000437 PARAMETER Experiment Name: At_Drought_P Parameter: Organism Value: A. thaliana
  misc_feature: MA Experiment 20000437 PARAMETER Experiment Name: At_Drought_P Parameter: Plant Line Value: WS
  misc_feature: MA Experiment 20000437 PARAMETER Experiment Name: At_Drought_P Parameter: Timepoint (hr) Value: 24
  misc_feature: MA Experiment 20000437 PARAMETER Experiment Name: At_Drought_P Parameter: Tissue Value: Whole Plant
  misc_feature: MA Experiment 20000437 PARAMETER Experiment Name: At_Drought_P Parameter: Treatment Value: Drought vs. No Drought
  misc_feature: MA Experiment ID: 20000438 Result: Up-regulated in Transcription
  misc_feature: MA Experiment 20000438 PARAMETER Experiment Name: At_Shoots__P Parameter: Age (day) Value: 14
  misc_feature: MA Experiment 20000438 PARAMETER Experiment Name: At_Shoots__P Parameter: Tissue Value: Shoots vs. Whole Plant
  misc_feature: MA Experiment ID: 20000794 Result: Down-regulated in Transcription
  misc_feature: MA Experiment 20000794 PARAMETER Experiment Name: At_Petals_P Parameter: Age (day) Value: 23-25 days
  misc_feature: MA Experiment 20000794 PARAMETER Experiment Name: At_Petals_P Parameter: Plant Line Value: WS
  misc_feature: MA Experiment 20000794 PARAMETER Experiment Name: At_Petals_P Parameter: Tissue Value: Petals vs. Whole plant
  misc_feature: MA Experiment ID: 20001558 Result: Up-regulated in Transcription
  misc_feature: MA Experiment 20001558 PARAMETER Experiment Name: At_Drought_Soil_Dry_P Parameter: Age (day) Value: 27
  misc_feature: MA Experiment 20001558 PARAMETER Experiment Name: At_Drought_Soil_Dry_P Parameter: Organism Value: A. thaliana
  misc_feature: MA Experiment 20001558 PARAMETER Experiment Name: At_Drought_Soil_Dry_P Parameter: Plant Line Value: WS
  misc_feature: MA Experiment 20001558 PARAMETER Experiment Name: At_Drought_Soil_Dry_P Parameter: Post Timepoint (hr) Value: 6
  misc_feature: MA Experiment 20001558 PARAMETER Experiment Name: At_Drought_Soil_Dry_P Parameter: Post-Treatment Value: Re-Water vs. No Drought
  misc_feature: MA Experiment 20001558 PARAMETER Experiment Name: At_Drought_Soil_Dry_P Parameter: Timepoint (day) Value: 13
  misc_feature: MA Experiment 20001558 PARAMETER Experiment Name: At_Drought_Soil_Dry_P Parameter: Treatment Value: Drought vs. No Drought
  misc_feature: MA Experiment ID: 20001560 Result: Up-regulated in Transcription
  misc_feature: MA Experiment 20001560 PARAMETER Experiment Name: At_Drought_Soil_Dry_P Parameter: Age (day) Value: 28
  misc_feature: MA Experiment 20001560 PARAMETER Experiment Name: At_Drought_Soil_Dry_P Parameter: Organism Value: A. thaliana
  misc_feature: MA Experiment 20001560 PARAMETER Experiment Name: At_Drought_Soil_Dry_P Parameter: Plant Line Value: WS
  misc_feature: MA Experiment 20001560 PARAMETER Experiment Name: At_Drought_Soil_Dry_P Parameter: Post Timepoint (hr) Value: None
  misc_feature: MA Experiment 20001560 PARAMETER Experiment Name: At_Drought_Soil_Dry_P Parameter: Post-Treatment Value: None
  misc_feature: MA Experiment 20001560 PARAMETER Experiment Name: At_Drought_Soil_Dry_P Parameter: Timepoint (day) Value: 14
  misc_feature: MA Experiment 20001560 PARAMETER Experiment Name: At_Drought_Soil_Dry_P Parameter: Treatment Value: Drought vs. No Drought
  misc_feature: MA Experiment ID: 20001757 Result: Up-regulated in Transcription
  misc_feature: MA Experiment 20001757 PARAMETER Experiment Name: At_50mM_NH4NO3_L-to-H_P Parameter: Timepoint (hr) Value: 6
  misc_feature: MA Experiment 20001757 PARAMETER Experiment Name: At_50mM_NH4NO3_L-to-H_P Parameter: Tissue Value: Leaf
  misc_feature: MA Experiment 20001757 PARAMETER Experiment Name: At_50mM_NH4NO3_L-to-H_P Parameter: Treatment Value: 50mM NH4NO3 vs 100mM Mannitol
  misc_feature: MA Experiment ID: 20001911 Result: Down-regulated in Transcription
  misc_feature: MA Experiment 20001911 PARAMETER Experiment Name: At_Drought_Reproduction_P Parameter: Age (day) Value: 40
  misc_feature: MA Experiment 20001911 PARAMETER Experiment Name: At_Drought_Reproduction_P Parameter: Organism Value: A. thaliana
  misc_feature: MA Experiment 20001911 PARAMETER Experiment Name: At_Drought_Reproduction_P Parameter: Plant Line Value: WS
  misc_feature: MA Experiment 20001911 PARAMETER Experiment Name: At_Drought_Reproduction_P Parameter: Timepoint (day) Value: 10
  misc_feature: MA Experiment 20001911 PARAMETER Experiment Name: At_Drought_Reproduction_P Parameter: Tissue Value: Flowers
  misc_feature: MA Experiment 20001911 PARAMETER Experiment Name: At_Drought_Reproduction_P Parameter: Treatment Value: Drought vs. No Drought
  misc_feature: Phenotype: ROSETTE LEAVES Curled-Curled 3
  misc_feature: Phenotype: ROSETTE LEAVES Other
  misc_feature: Phenotype: INFLORESCENCE Height-Short
  misc_feature: Phenotype: ROSETTE LEAVES Disorganized Rosette-Disorganized Rosette
  misc_feature: Phenotype: WHOLE PLANT Size-Small
  misc_feature: Phenotype: ROSETTE LEAVES Disorganized Rosette-Disorganized Rosette
  misc_feature: Phenotype: ROSETTE LEAVES Fused-Leaf to Inflorescence
  misc_feature: Phenotype: INFLORESCENCE Height-Short
  misc_feature: Phenotype: INFLORESCENCE Other

SEQ ID NO: 32197 - protein, 386 aa, Arabidopsis thaliana; identical to SEQ ID NO: 28607
  peptide (1)..(386): Ceres Seq. ID no. 13491912
  misc_feature (279)..(371): Pfam Name: short chain dehydrogenase Pfam Description: short chain dehydrogenase
  misc_feature (1)..(381): Homolog of NCBI NO: 99805 NR Description: enoyl-
  misc_feature (1)..(381): Homolog of NCBI NO: 461461 NR Description: Enoyl-
  misc_feature (1)..(381): Homolog of NCBI NO: 14422259 NR Description: enoyl-[acyl-carrier protein] reductase [Brassica
  misc_feature (1)..(381): Homolog of NCBI NO: 14422261 NR Description: enoyl-[acyl carrier-protein] reductase [Brassica
  misc_feature (1)..(381): Homolog of NCBI NO: 7488486 NR Description: probable enoyl-
  misc_feature (1)..(381): Homolog of NCBI NO: 14422257 NR Description: enoyl-[acyl-carrier protein] reductase [Brassica
  misc_feature (1)..(381): Homolog of NCBI NO: 14422255 NR Description: enoyl-[acyl-carrier protein] reductase [Brassica
  misc_feature (1)..(381): Homolog of NCBI NO: 2204087 NR Description: enoyl-ACP reductase [Arabidopsis thaliana]
  misc_feature (1)..(381): Homolog of NCBI NO: 18396215 NR Description: enoyl-
  misc_feature (1)..(381): Homolog of NCBI NO: 7141083 NR Description: enoyl-ACP reductase [Arabidopsis thaliana]

SEQ ID NO: 32198 - protein, 369 aa, Arabidopsis thaliana; identical to SEQ ID NO: 28608
  peptide (1)..(369): Ceres Seq. ID no. 13491913
  misc_feature (262)..(354): Pfam Name: short chain dehydrogenase Pfam Description: short chain dehydrogenase
  misc_feature (1)..(364): Homolog of NCBI NO: 99805 NR Description: enoyl-
  misc_feature (1)..(364): Homolog of NCBI NO: 461461 NR Description: Enoyl-
  misc_feature (1)..(364): Homolog of NCBI NO: 14422259 NR Description: enoyl-[acyl-carrier protein] reductase [Brassica
  misc_feature (1)..(364): Homolog of NCBI NO: 14422261 NR Description: enoyl-[acyl carrier-protein] reductase [Brassica
  misc_feature (1)..(364): Homolog of NCBI NO: 7488486 NR Description: probable enoyl-
  misc_feature (1)..(364): Homolog of NCBI NO: 14422257 NR Description: enoyl-[acyl-carrier protein] reductase [Brassica
  misc_feature (1)..(364): Homolog of NCBI NO: 14422255 NR Description: enoyl-[acyl-carrier protein] reductase [Brassica
  misc_feature (1)..(364): Homolog of NCBI NO: 2204087 NR Description: enoyl-ACP reductase [Arabidopsis thaliana]
  misc_feature (1)..(364): Homolog of NCBI NO: 18396215 NR Description: enoyl-
  misc_feature (1)..(364): Homolog of NCBI NO: 7141083 NR Description: enoyl-ACP reductase [Arabidopsis thaliana]

SEQ ID NO: 32199 - protein, 311 aa, Arabidopsis thaliana; identical to SEQ ID NO: 28609
  peptide (1)..(311): Ceres Seq. ID no. 13491914
  misc_feature (204)..(296): Pfam Name: short chain dehydrogenase Pfam Description: short chain dehydrogenase
  misc_feature (1)..(306): Homolog of NCBI NO: 99805 NR Description: enoyl-
  misc_feature (1)..(306): Homolog of NCBI NO: 461461 NR Description: Enoyl-
  misc_feature (1)..(306): Homolog of NCBI NO: 14422259 NR Description: enoyl-[acyl-carrier protein] reductase [Brassica
  misc_feature (1)..(306): Homolog of NCBI NO: 14422261 NR Description: enoyl-[acyl carrier-protein] reductase [Brassica
  misc_feature (1)..(306): Homolog of NCBI NO: 7488486 NR Description: probable enoyl-
  misc_feature (1)..(306): Homolog of NCBI NO: 14422257 NR Description: enoyl-[acyl-carrier protein] reductase [Brassica
  misc_feature (1)..(306): Homolog of NCBI NO: 14422255 NR Description: enoyl-[acyl-carrier protein] reductase [Brassica
  misc_feature (1)..(306): Homolog of NCBI NO: 2204087 NR Description: enoyl-ACP reductase [Arabidopsis thaliana]
  misc_feature (1)..(306): Homolog of NCBI NO: 18396215 NR Description: enoyl-
  misc_feature (1)..(306): Homolog of NCBI NO: 7141083 NR Description: enoyl-ACP reductase [Arabidopsis thaliana]

SEQ ID NO: 32200 - DNA, 1691 bp, Arabidopsis thaliana; identical to SEQ ID NO: 28610
  misc_feature (1)..(1691): Ceres Seq. ID no. 12325280
  misc_feature: MA Experiment ID: 20000179 Result: Down-regulated in Transcription
  misc_feature: MA Experiment 20000179 PARAMETER Experiment Name: At_Germinating_Seeds_P Parameter: Age (hr) Value: 6 vs. 0
  misc_feature: MA Experiment 20000179 PARAMETER Experiment Name: At_Germinating_Seeds_P Parameter: Tissue Value: Germinating Seeds
  misc_feature: MA Experiment ID: 20000180 Result: Down-regulated in Transcription
  misc_feature: MA Experiment 20000180 PARAMETER Experiment Name: At_Germinating_Seeds_P Parameter: Age (hr) Value: 24 vs. 0
  misc_feature: MA Experiment 20000180 PARAMETER Experiment Name: At_Germinating_Seeds_P Parameter: Tissue Value: Germinating Seeds
  misc_feature: MA Experiment ID: 20000184 Result: Up-regulated in Transcription
  misc_feature: MA Experiment 20000184 PARAMETER Experiment Name: At_Shoots__P Parameter: Age (day) Value: 7
  misc_feature: MA Experiment 20000184 PARAMETER Experiment Name: At_Shoots__P Parameter: Tissue Value: Shoots vs. Whole Plant
  misc_feature: MA Experiment ID: 20000436 Result: Up-regulated in Transcription
  misc_feature: MA Experiment 20000436 PARAMETER Experiment Name: At_Drought_P Parameter: Age (day) Value: 7
  misc_feature: MA Experiment 20000436 PARAMETER Experiment Name: At_Drought_P Parameter: Organism Value: A. thaliana
  misc_feature: MA Experiment 20000436 PARAMETER Experiment Name: At_Drought_P Parameter: Plant Line Value: WS
  misc_feature: MA Experiment 20000436 PARAMETER Experiment Name: At_Drought_P Parameter: Timepoint (hr) Value: 12
  misc_feature: MA Experiment 20000436 PARAMETER Experiment Name: At_Drought_P Parameter: Tissue Value: Whole Plant
  misc_feature: MA Experiment 20000436 PARAMETER Experiment Name: At_Drought_P Parameter: Treatment Value: Drought vs. No Drought
  misc_feature: MA Experiment ID: 20000437 Result: Up-regulated in Transcription
  misc_feature: MA Experiment 20000437 PARAMETER Experiment Name: At_Drought_P Parameter: Age (day) Value: 8
  misc_feature: MA Experiment 20000437 PARAMETER Experiment Name: At_Drought_P Parameter: Organism Value: A. thaliana
  misc_feature: MA Experiment 20000437 PARAMETER Experiment Name: At_Drought_P Parameter: Plant Line Value: WS
  misc_feature: MA Experiment 20000437 PARAMETER Experiment Name: At_Drought_P Parameter: Timepoint (hr) Value: 24
  misc_feature: MA Experiment 20000437 PARAMETER Experiment Name: At_Drought_P Parameter: Tissue Value: Whole Plant
  misc_feature: MA Experiment 20000437 PARAMETER Experiment Name: At_Drought_P Parameter: Treatment Value: Drought vs. No Drought
  misc_feature: MA Experiment ID: 20000527 Result: Up-regulated in Transcription
  misc_feature: MA Experiment 20000527 PARAMETER Experiment Name: At_10percent_PEG_P Parameter: Age (day) Value: 20
  misc_feature: MA Experiment 20000527 PARAMETER Experiment Name: At_10percent_PEG_P Parameter: Organism Value: A. thaliana
  misc_feature: MA Experiment 20000527 PARAMETER Experiment Name: At_10percent_PEG_P Parameter: Plant Line Value: WS
  misc_feature: MA Experiment 20000527 PARAMETER Experiment Name: At_10percent_PEG_P Parameter: Timepoint (day) Value: 20
  misc_feature: MA Experiment 20000527 PARAMETER Experiment Name: At_10percent_PEG_P Parameter: Tissue Value: Whole Plant
  misc_feature: MA Experiment 20000527 PARAMETER Experiment Name: At_10percent_PEG_P Parameter: Treatment Value: 10percent PEG vs. No Treatment
  misc_feature: MA Experiment ID: 20001247 Result: Up-regulated in Transcription
  misc_feature: MA Experiment 20001247 PARAMETER Experiment Name: At_Far-red-induction_P Parameter: Age (day) Value: 7
  misc_feature: MA Experiment 20001247 PARAMETER Experiment Name: At_Far-red-induction_P Parameter: Light Value: Far-red vs. White
  misc_feature: MA Experiment 20001247 PARAMETER Experiment Name: At_Far-red-induction_P Parameter: Organism Value: A. thaliana
  misc_feature: MA Experiment 20001247 PARAMETER Experiment Name: At_Far-red-induction_P Parameter: Plant Line Value: Columbia
  misc_feature: MA Experiment 20001247 PARAMETER Experiment Name: At_Far-red-induction_P Parameter: Timepoint (hr) Value: 1
  misc_feature: MA Experiment 20001247 PARAMETER Experiment Name: At_Far-red-induction_P Parameter: Tissue Value: Whole Plant
  misc_feature: MA Experiment ID: 20001450 Result: Up-regulated in Transcription
  misc_feature: MA Experiment 20001450 PARAMETER Experiment Name: At_Far-red-induction_P Parameter: Age (day) Value: 7
  misc_feature: MA Experiment 20001450 PARAMETER Experiment Name: At_Far-red-induction_P Parameter: Light Value: Far-red vs. White
  misc_feature: MA Experiment 20001450 PARAMETER Experiment Name: At_Far-red-induction_P Parameter: Organism Value: A. thaliana
  misc_feature: MA Experiment 20001450 PARAMETER Experiment Name: At_Far-red-induction_P Parameter: Plant Line Value: Columbia
  misc_feature: MA Experiment 20001450 PARAMETER Experiment Name: At_Far-red-induction_P Parameter: Timepoint (hr) Value: 8
  misc_feature: MA Experiment 20001450 PARAMETER Experiment Name: At_Far-red-induction_P Parameter: Tissue Value: Whole Plant
  misc_feature: MA Experiment ID: 20001905 Result: Up-regulated in Transcription
  misc_feature: MA Experiment 20001905 PARAMETER Experiment Name: At_Drought_Reproduction_P Parameter: Age (day) Value: 40
  misc_feature: MA Experiment 20001905 PARAMETER Experiment Name: At_Drought_Reproduction_P Parameter: Organism Value: A. thaliana
  misc_feature: MA Experiment 20001905 PARAMETER Experiment Name: At_Drought_Reproduction_P Parameter: Plant Line Value: WS
  misc_feature: MA Experiment 20001905 PARAMETER Experiment Name: At_Drought_Reproduction_P Parameter: Timepoint (day) Value: 10
  misc_feature: MA Experiment 20001905 PARAMETER Experiment Name: At_Drought_Reproduction_P Parameter: Tissue Value: Rosettes
  misc_feature: MA Experiment 20001905 PARAMETER Experiment Name: At_Drought_Reproduction_P Parameter: Treatment Value: Drought vs. No Drought

SEQ ID NO: 32201 - protein, 385 aa, Arabidopsis thaliana; identical to SEQ ID NO: 28611
  peptide (1)..(385): Ceres Seq. ID no. 12325281
  misc_feature (45)..(328): Pfam Name: Protein phosphatase 2C Pfam Description: Protein phosphatase 2C
  misc_feature (8)..(382): Homolog of NCBI NO: 13357263 NR Description: putative protein phosphatase 2C
  misc_feature (1)..(381): Homolog of NCBI NO: 18855039 NR Description: putative protein phosphatase [Oryza sativa]
  misc_feature (7)..(382): Homolog of NCBI NO: 7485891 NR Description: hypothetical protein F20M13.80 - Arabidopsis
  misc_feature (1)..(382): Homolog of NCBI NO: 17064756 NR Description: putative protein phosphatase-2c [Arabidopsis
  misc_feature (1)..(382): Homolog of NCBI NO: 22329238 NR Description: putative protein phosphatase-2c
  misc_feature (1)..(382): Homolog of NCBI NO: 7768153 NR Description: protein phosphatase 2C (PP2C) [Fagus sylvatica]
  misc_feature (1)..(384): Homolog of NCBI NO: 11282004 NR Description: protein phosphatase 2C homolog [imported] -
  misc_feature (1)..(385): Homolog of NCBI NO: 11282001 NR Description: protein phosphatase 2C-like protein - Arabidopsis
  misc_feature (1)..(385): Homolog of NCBI NO: 20340237 NR Description: protein phosphatase 2c-like protein
  misc_feature (1)..(385): Homolog of NCBI NO: 15239244 NR Description: protein phosphatase 2C-like protein

SEQ ID NO: 32202 - protein, 336 aa, Arabidopsis thaliana; identical to SEQ ID NO: 28612
  peptide (1)..(336): Ceres Seq. ID no. 12325282
  misc_feature (1)..(279): Pfam Name: Protein phosphatase 2C Pfam Description: Protein phosphatase 2C
  misc_feature (1)..(333): Homolog of NCBI NO: 13357263 NR Description: putative protein phosphatase 2C
  misc_feature (1)..(332): Homolog of NCBI NO: 18855039 NR Description: putative protein phosphatase [Oryza sativa]
  misc_feature (1)..(333): Homolog of NCBI NO: 7485891 NR Description: hypothetical protein F20M13.80 - Arabidopsis
  misc_feature (1)..(333): Homolog of NCBI NO: 17064756 NR Description: putative protein phosphatase-2c [Arabidopsis
  misc_feature (1)..(333): Homolog of NCBI NO: 22329238 NR Description: putative protein phosphatase-2c
  misc_feature (1)..(333): Homolog of NCBI NO: 7768153 NR Description: protein phosphatase 2C (PP2C) [Fagus sylvatica]
  misc_feature (1)..(335): Homolog of NCBI NO: 11282004 NR Description: protein phosphatase 2C homolog [imported] -
  misc_feature (1)..(336): Homolog of NCBI NO: 11282001 NR Description: protein phosphatase 2C-like protein - Arabidopsis
  misc_feature (1)..(336): Homolog of NCBI NO: 20340237 NR Description: protein phosphatase 2c-like protein
  misc_feature (1)..(336): Homolog of NCBI NO: 15239244 NR Description: protein phosphatase 2C-like protein

SEQ ID NO: 32203 - protein, 270 aa, Arabidopsis thaliana; identical to SEQ ID NO: 28613
  peptide (1)..(270): Ceres Seq. ID no. 12325283
  misc_feature (1)..(213): Pfam Name: Protein phosphatase 2C Pfam Description: Protein phosphatase 2C
  misc_feature (1)..(267): Homolog of NCBI NO: 13357263 NR Description: putative protein phosphatase 2C
  misc_feature (1)..(266): Homolog of NCBI NO: 18855039 NR Description: putative protein phosphatase [Oryza sativa]
  misc_feature (1)..(267): Homolog of NCBI NO: 7485891 NR Description: hypothetical protein F20M13.80 - Arabidopsis
  misc_feature (1)..(267): Homolog of NCBI NO: 17064756 NR Description: putative protein phosphatase-2c [Arabidopsis
  misc_feature (1)..(267): Homolog of NCBI NO: 22329238 NR Description: putative protein phosphatase-2c
  misc_feature (1)..(267): Homolog of NCBI NO: 7768153 NR Description: protein phosphatase 2C (PP2C) [Fagus sylvatica]
  misc_feature (1)..(269): Homolog of NCBI NO: 11282004 NR Description: protein phosphatase 2C homolog [imported] -
  misc_feature (1)..(270): Homolog of NCBI NO: 11282001 NR Description: protein phosphatase 2C-like protein - Arabidopsis
  misc_feature (1)..(270): Homolog of NCBI NO: 20340237 NR Description: protein phosphatase 2c-like protein
  misc_feature (1)..(270): Homolog of NCBI NO: 15239244 NR Description: protein phosphatase 2C-like protein

SEQ ID NO: 32204 - DNA, 1416 bp, Arabidopsis thaliana; identical to SEQ ID NO: 28614
  misc_feature (1)..(1416): Ceres Seq. ID no. 13487514
  misc_feature: MA Experiment ID: 108461 Result: Up-regulated in Transcription
  misc_feature: MA Experiment 108461 PARAMETER Experiment Name: At_Germinating_Seeds_cDNA_P Parameter: Age (day) Value: 1 vs. 0
  misc_feature: MA Experiment 108461 PARAMETER Experiment Name: At_Germinating_Seeds_cDNA_P Parameter: Tissue Value: Germinating Seeds
  misc_feature: MA Experiment ID: 108462 Result: Up-regulated in Transcription
  misc_feature: MA Experiment 108462 PARAMETER Experiment Name: At_Germinating_Seeds_cDNA_P Parameter: Age (day) Value: 2 vs. 0
  misc_feature: MA Experiment 108462 PARAMETER Experiment Name: At_Germinating_Seeds_cDNA_P Parameter: Tissue Value: Germinating Seeds
  misc_feature: MA Experiment ID: 108577 Result: Down-regulated in Transcription
  misc_feature: MA Experiment 108577 PARAMETER Experiment Name: At_42deg_Heat_cDNA_P Parameter: Temperature (deg C) Value: 42 vs. 22
  misc_feature: MA Experiment 108577 PARAMETER Experiment Name: At_42deg_Heat_cDNA_P Parameter: Timepoint (hr) Value: 6
  misc_feature: MA Experiment 108577 PARAMETER Experiment Name: At_42deg_Heat_cDNA_P Parameter: Tissue Value: Aerial
  misc_feature: MA Experiment ID: 108585 Result: Up-regulated in Transcription
  misc_feature: MA Experiment 108585 PARAMETER Experiment Name: At_5mM_NaNP_cDNA_P Parameter: Timepoint (hr) Value: 6
  misc_feature: MA Experiment 108585 PARAMETER Experiment Name: At_5mM_NaNP_cDNA_P Parameter: Tissue Value: Aerial
  misc_feature: MA Experiment 108585 PARAMETER Experiment Name: At_5mM_NaNP_cDNA_P Parameter: Treatment Value: null
  misc_feature: MA Experiment ID: 20000087 Result: Up-regulated in Transcription
  misc_feature: MA Experiment 20000087 PARAMETER Experiment Name: At_100uM_ABA_Mutants_cDNA_P Parameter: Plant Line Value: WS
  misc_feature: MA Experiment 20000087 PARAMETER Experiment Name: At_100uM_ABA_Mutants_cDNA_P Parameter: Timepoint (hr) Value: 6
  misc_feature: MA Experiment 20000087 PARAMETER Experiment Name: At_100uM_ABA_Mutants_cDNA_P Parameter: Tissue Value: Aerial
  misc_feature: MA Experiment 20000087 PARAMETER Experiment Name: At_100uM_ABA_Mutants_cDNA_P Parameter: Treatment Value: 100uM ABA vs. No Treatment
  misc_feature: MA Experiment ID: 20000093 Result: Down-regulated in Transcription
  misc_feature: MA Experiment 20000093 PARAMETER Experiment Name: At_42deg_Heat_cDNA_P Parameter: Temperature (deg C) Value: 42 vs. 22
  misc_feature: MA Experiment 20000093 PARAMETER Experiment Name: At_42deg_Heat_cDNA_P Parameter: Timepoint (hr) Value: 0.5
  misc_feature: MA Experiment 20000093 PARAMETER Experiment Name: At_42deg_Heat_cDNA_P Parameter: Tissue Value: Aerial
  misc_feature: MA Experiment ID: 20000111 Result: Down-regulated in Transcription
  misc_feature: MA Experiment 20000111 PARAMETER Experiment Name: At_42deg_Heat_cDNA_P Parameter: Temperature (deg C) Value: 42 vs. 22
  misc_feature: MA Experiment 20000111 PARAMETER Experiment Name: At_42deg_Heat_cDNA_P Parameter: Timepoint (hr) Value: 6
  misc_feature: MA Experiment 20000111 PARAMETER Experiment Name: At_42deg_Heat_cDNA_P Parameter: Tissue Value: Aerial
  misc_feature: MA Experiment ID: 20000112 Result: Down-regulated in Transcription
  misc_feature: MA Experiment 20000112 PARAMETER Experiment Name: At_42deg_Heat_cDNA_P Parameter: Temperature (deg C) Value: 42 vs. 22
  misc_feature: MA Experiment 20000112 PARAMETER Experiment Name: At_42deg_Heat_cDNA_P Parameter: Timepoint (hr) Value: 2
  misc_feature: MA Experiment 20000112 PARAMETER Experiment Name: At_42deg_Heat_cDNA_P Parameter: Tissue Value: Aerial
  misc_feature: MA Experiment ID: 20000113 Result: Down-regulated in Transcription
  misc_feature: MA Experiment 20000113 PARAMETER Experiment Name: At_42deg_Heat_cDNA_P Parameter: Temperature (deg C) Value: 42 vs. 22
  misc_feature: MA Experiment 20000113 PARAMETER Experiment Name: At_42deg_Heat_cDNA_P Parameter: Timepoint (hr) Value: 8
  misc_feature: MA Experiment 20000113 PARAMETER Experiment Name: At_42deg_Heat_cDNA_P Parameter: Tissue Value: Aerial
  misc_feature: MA Experiment ID: 20000144 Result: Down-regulated in Transcription
  misc_feature: MA Experiment 20000144 PARAMETER Experiment Name: At_42deg_Heat_cDNA_P Parameter: Temperature (deg C) Value: 42 vs. 22
  misc_feature: MA Experiment 20000144 PARAMETER Experiment Name: At_42deg_Heat_cDNA_P Parameter: Timepoint (hr) Value: 1
  misc_feature: MA Experiment 20000144 PARAMETER Experiment Name: At_42deg_Heat_cDNA_P Parameter: Tissue Value: Aerial
  misc_feature: MA Experiment ID: 20000171 Result: Down-regulated in Transcription
  misc_feature: MA Experiment 20000171 PARAMETER Experiment Name: At_42deg_Heat_P Parameter: Age (day) Value: 14
  misc_feature: MA Experiment 20000171 PARAMETER Experiment Name: At_42deg_Heat_P Parameter: Organism Value: A. thaliana
  misc_feature: MA Experiment 20000171 PARAMETER Experiment Name: At_42deg_Heat_P Parameter: Plant Line Value: WS
  misc_feature: MA Experiment 20000171 PARAMETER Experiment Name: At_42deg_Heat_P Parameter: Temperature (deg C) Value: 42 vs. 22
  misc_feature: MA Experiment 20000171 PARAMETER Experiment Name: At_42deg_Heat_P Parameter: Timepoint (hr) Value: 1
  misc_feature: MA Experiment 20000171 PARAMETER Experiment Name: At_42deg_Heat_P Parameter: Tissue Value: Aerial
  misc_feature: MA Experiment ID: 20000173 Result: Down-regulated in Transcription
  misc_feature: MA Experiment 20000173 PARAMETER Experiment Name: At_42deg_Heat_P Parameter: Age (day) Value: 14
  misc_feature: MA Experiment 20000173 PARAMETER Experiment Name: At_42deg_Heat_P Parameter: Organism Value: A. thaliana
  misc_feature: MA Experiment 20000173 PARAMETER Experiment Name: At_42deg_Heat_P Parameter: Plant Line Value: WS
  misc_feature: MA Experiment 20000173 PARAMETER Experiment Name: At_42deg_Heat_P Parameter: Temperature (deg C) Value: 42 vs. 22
  misc_feature: MA Experiment 20000173 PARAMETER Experiment Name: At_42deg_Heat_P Parameter: Timepoint (hr) Value: 6
  misc_feature: MA Experiment 20000173 PARAMETER Experiment Name: At_42deg_Heat_P Parameter: Tissue Value: Aerial
  misc_feature: MA Experiment ID: 20000179 Result: Up-regulated in Transcription
  misc_feature: MA Experiment 20000179 PARAMETER Experiment Name: At_Germinating_Seeds_P Parameter: Age (hr) Value: 6 vs. 0
  misc_feature: MA Experiment 20000179 PARAMETER Experiment Name: At_Germinating_Seeds_P Parameter: Tissue Value: Germinating Seeds
  misc_feature: MA Experiment ID: 20000180 Result: Up-regulated in Transcription
  misc_feature: MA Experiment 20000180 PARAMETER Experiment Name: At_Germinating_Seeds_P Parameter: Age (hr) Value: 24 vs. 0
  misc_feature: MA Experiment 20000180 PARAMETER Experiment Name: At_Germinating_Seeds_P Parameter: Tissue Value: Germinating Seeds
  misc_feature: MA Experiment ID: 20001557 Result: Up-regulated in Transcription
  misc_feature: MA Experiment 20001557 PARAMETER Experiment Name: At_Drought_Soil_Dry_P Parameter: Age (day) Value: 27
  misc_feature: MA Experiment 20001557 PARAMETER Experiment Name: At_Drought_Soil_Dry_P Parameter: Organism Value: A. thaliana
  misc_feature: MA Experiment 20001557 PARAMETER Experiment Name: At_Drought_Soil_Dry_P Parameter: Plant Line Value: WS
  misc_feature: MA Experiment 20001557 PARAMETER Experiment Name: At_Drought_Soil_Dry_P Parameter: Post Timepoint (hr) Value: 3
  misc_feature: MA Experiment 20001557 PARAMETER Experiment Name: At_Drought_Soil_Dry_P Parameter: Post-Treatment Value: Re-Water vs. No Drought
  misc_feature: MA Experiment 20001557 PARAMETER Experiment Name: At_Drought_Soil_Dry_P Parameter: Timepoint (day) Value: 13
  misc_feature: MA Experiment 20001557 PARAMETER Experiment Name: At_Drought_Soil_Dry_P Parameter: Treatment Value: Drought vs. No Drought

SEQ ID NO: 32205 - protein, 373 aa, Arabidopsis thaliana; identical to SEQ ID NO: 28615
  peptide (1)..(373): Ceres Seq. ID no. 13487515
  misc_feature (31)..(355): Pfam Name: NAD dependent epimerase/dehydratase family Pfam Description: NAD dependent epimerase/dehydratase family
  misc_feature (31)..(355): Pfam Name: NAD dependent epimerase/dehydratase family Pfam Description: NAD dependent epimerase/dehydratase family
  misc_feature (28)..(353): Homolog of NCBI NO: 23128163 NR Description: hypothetical protein [Nostoc punctiforme]
  misc_feature (29)..(352): Homolog of NCBI NO: 16329177 NR Description: GDP-D-mannose dehydratase [Synechocystis sp. PCC
  misc_feature (29)..(353): Homolog of NCBI NO: 4097914 NR Description: putative GDP-D-mannose dehydratase [Anabaena sp.
  misc_feature (28)..(352): Homolog of NCBI NO: 22298176 NR Description: GDP-mannose 4,6-dehydratase [Thermosynechococcus
  misc_feature (7)..(373): Homolog of NCBI NO: 7939611 NR Description: root cap-specific protein [Zea mays]
  misc_feature (28)..(353): Homolog of NCBI NO: 23128163 NR Description: hypothetical protein [Nostoc punctiforme]
  misc_feature (29)..(353): Homolog of NCBI NO: 4097914 NR Description: putative GDP-D-mannose dehydratase [Anabaena sp.
  misc_feature (7)..(373): Homolog of NCBI NO: 7939611 NR Description: root cap-specific protein [Zea mays]
  misc_feature (1)..(373): Homolog of NCBI NO: 21536808 NR Description: GDP-D-mannose-4,6-dehydratase MUR1 [Arabidopsis
  misc_feature (1)..(373): Homolog of NCBI NO: 1764100 NR Description: GDP-D-mannose-4,6-dehydratase [Arabidopsis
  misc_feature (1)..(373): Homolog of NCBI NO: 28373938 NR Description: Chain A, Crystal Structure Of The Gdp-Mannose
  misc_feature (1)..(373): Homolog of NCBI NO: 15230418 NR Description: GDP-D-mannose-4,6-dehydratase (MUR1) [Arabidopsis
  misc_feature (21)..(373): Homolog of NCBI NO: 15239334 NR Description: GDP-D-mannose 4,6-dehydratase, putative
  misc_feature (28)..(352): Homolog of NCBI NO: 22298176 NR Description: GDP-mannose 4,6-dehydratase [Thermosynechococcus
  misc_feature (29)..(352): Homolog of NCBI NO: 16329177 NR Description: GDP-D-mannose dehydratase [Synechocystis sp. PCC
  misc_feature (21)..(373): Homolog of NCBI NO: 15239334 NR Description: GDP-D-mannose 4,6-dehydratase, putative
  misc_feature (1)..(373): Homolog of NCBI NO: 15230418 NR Description: GDP-D-mannose-4,6-dehydratase (MUR1) [Arabidopsis
  misc_feature (1)..(373): Homolog of NCBI NO: 28373938 NR Description: Chain A, Crystal Structure Of The Gdp-Mannose
  misc_feature (1)..(373): Homolog of NCBI NO: 1764100 NR Description: GDP-D-mannose-4,6-dehydratase [Arabidopsis
  misc_feature (1)..(373): Homolog of NCBI NO: 21536808 NR Description: GDP-D-mannose-4,6-dehydratase MUR1 [Arabidopsis

SEQ ID NO: 32206 - protein, 289 aa, Arabidopsis thaliana; identical to SEQ ID NO: 28616
  peptide (1)..(289): Ceres Seq. ID no. 13487516
  misc_feature (1)..(271): Pfam Name: NAD dependent epimerase/dehydratase family Pfam Description: NAD dependent epimerase/dehydratase family
  misc_feature (1)..(271): Pfam Name: NAD dependent epimerase/dehydratase family Pfam Description: NAD dependent epimerase/dehydratase family
  misc_feature (1)..(269): Homolog of NCBI NO: 23128163 NR Description: hypothetical protein [Nostoc punctiforme]
  misc_feature (1)..(268): Homolog of NCBI NO: 16329177 NR Description: GDP-D-mannose dehydratase [Synechocystis sp. PCC
  misc_feature (1)..(269): Homolog of NCBI NO: 4097914 NR Description: putative GDP-D-mannose dehydratase [Anabaena sp.
  misc_feature (1)..(268): Homolog of NCBI NO: 22298176 NR Description: GDP-mannose 4,6-dehydratase [Thermosynechococcus
  misc_feature (1)..(289): Homolog of NCBI NO: 7939611 NR Description: root cap-specific protein [Zea mays]
  misc_feature (1)..(269): Homolog of NCBI NO: 23128163 NR Description: hypothetical protein [Nostoc punctiforme]
  misc_feature (1)..(269): Homolog of NCBI NO: 4097914 NR Description: putative GDP-D-mannose dehydratase [Anabaena sp.
  misc_feature (1)..(289): Homolog of NCBI NO: 7939611 NR Description: root cap-specific protein [Zea mays]
  misc_feature (1)..(289): Homolog of NCBI NO: 21536808 NR Description: GDP-D-mannose-4,6-dehydratase MUR1 [Arabidopsis
  misc_feature (1)..(289): Homolog of NCBI NO: 1764100 NR Description: GDP-D-mannose-4,6-dehydratase [Arabidopsis
  misc_feature (1)..(289): Homolog of NCBI NO: 28373938 NR Description: Chain A, Crystal Structure Of The Gdp-Mannose
  misc_feature (1)..(289): Homolog of NCBI NO: 15230418 NR Description: GDP-D-mannose-4,6-dehydratase (MUR1) [Arabidopsis
  misc_feature (1)..(289): Homolog of NCBI NO: 15239334 NR Description: GDP-D-mannose 4,6-dehydratase, putative
  misc_feature (1)..(268): Homolog of NCBI NO: 22298176 NR Description: GDP-mannose 4,6-dehydratase [Thermosynechococcus
  misc_feature (1)..(268): Homolog of NCBI NO: 16329177 NR Description: GDP-D-mannose dehydratase [Synechocystis sp. PCC
  misc_feature (1)..(289): Homolog of NCBI NO: 15239334 NR Description: GDP-D-mannose 4,6-dehydratase, putative
  misc_feature (1)..(289): Homolog of NCBI NO: 15230418 NR Description: GDP-D-mannose-4,6-dehydratase (MUR1) [Arabidopsis
  misc_feature (1)..(289): Homolog of NCBI NO: 28373938 NR Description: Chain A, Crystal Structure Of The Gdp-Mannose
  misc_feature (1)..(289): Homolog of NCBI NO: 1764100 NR Description: GDP-D-mannose-4,6-dehydratase [Arabidopsis
  misc_feature (1)..(289): Homolog of NCBI NO: 21536808 NR Description: GDP-D-mannose-4,6-dehydratase MUR1 [Arabidopsis

SEQ ID NO: 32207 - protein, 209 aa, Arabidopsis thaliana; identical to SEQ ID NO: 28617
  peptide (1)..(209): Ceres Seq. ID no. 13487517
  misc_feature (1)..(191): Pfam Name: NAD dependent epimerase/dehydratase family Pfam Description: NAD dependent epimerase/dehydratase family
  misc_feature (1)..(191): Pfam Name: NAD dependent epimerase/dehydratase family Pfam Description: NAD dependent epimerase/dehydratase family
  misc_feature (1)..(189): Homolog of NCBI NO: 23128163 NR Description: hypothetical protein [Nostoc punctiforme]
  misc_feature (1)..(188): Homolog of NCBI NO: 16329177 NR Description: GDP-D-mannose dehydratase [Synechocystis sp. PCC
  misc_feature (1)..(189): Homolog of NCBI NO: 4097914 NR Description: putative GDP-D-mannose dehydratase [Anabaena sp.
  misc_feature (1)..(188): Homolog of NCBI NO: 22298176 NR Description: GDP-mannose 4,6-dehydratase [Thermosynechococcus
  misc_feature (1)..(209): Homolog of NCBI NO: 7939611 NR Description: root cap-specific protein [Zea mays]
  misc_feature (1)..(189): Homolog of NCBI NO: 23128163 NR Description: hypothetical protein [Nostoc punctiforme]
  misc_feature (1)..(189): Homolog of NCBI NO: 4097914 NR Description: putative GDP-D-mannose dehydratase [Anabaena sp.
  misc_feature (1)..(209): Homolog of NCBI NO: 7939611 NR Description: root cap-specific protein [Zea mays]
  misc_feature (1)..(209): Homolog of NCBI NO: 21536808 NR Description: GDP-D-mannose-4,6-dehydratase MUR1 [Arabidopsis
  misc_feature (1)..(209): Homolog of NCBI NO: 1764100 NR Description: GDP-D-mannose-4,6-dehydratase [Arabidopsis
  misc_feature (1)..(209): Homolog of NCBI NO: 28373938 NR Description: Chain A, Crystal Structure Of The Gdp-Mannose
  misc_feature (1)..(209): Homolog of NCBI NO: 15230418 NR Description: GDP-D-mannose-4,6-dehydratase (MUR1) [Arabidopsis
  misc_feature (1)..(209): Homolog of NCBI NO: 15239334 NR Description: GDP-D-mannose 4,6-dehydratase, putative
  misc_feature (1)..(188): Homolog of NCBI NO: 22298176 NR Description: GDP-mannose 4,6-dehydratase [Thermosynechococcus
  misc_feature (1)..(188): Homolog of NCBI NO: 16329177 NR Description: GDP-D-mannose dehydratase [Synechocystis sp. PCC
  misc_feature (1)..(209): Homolog of NCBI NO: 15239334 NR Description: GDP-D-mannose 4,6-dehydratase, putative
  misc_feature (1)..(209): Homolog of NCBI NO: 15230418 NR Description: GDP-D-mannose-4,6-dehydratase (MUR1) [Arabidopsis
  misc_feature (1)..(209): Homolog of NCBI NO: 28373938 NR Description: Chain A, Crystal Structure Of The Gdp-Mannose
  misc_feature (1)..(209): Homolog of NCBI NO: 1764100 NR Description: GDP-D-mannose-4,6-dehydratase [Arabidopsis
  misc_feature (1)..(209): Homolog of NCBI NO: 21536808 NR Description: GDP-D-mannose-4,6-dehydratase MUR1 [Arabidopsis

SEQ ID NO: 32208 - DNA, 1257 bp, Arabidopsis thaliana; identical to SEQ ID NO: 28618
  misc_feature (1)..(1257): Ceres Seq. ID no. 12334073
  misc_feature: MA Experiment ID: 20000169 Result: Up-regulated in Transcription
  misc_feature: MA Experiment 20000169 PARAMETER Experiment Name: At_100uM_ABA_P Parameter: Age (day) Value: 14
  misc_feature: MA Experiment 20000169 PARAMETER Experiment Name: At_100uM_ABA_P Parameter: Organism Value: A. thaliana
  misc_feature: MA Experiment 20000169 PARAMETER Experiment Name: At_100uM_ABA_P Parameter: Plant Line Value: WS
  misc_feature: MA Experiment 20000169 PARAMETER Experiment Name: At_100uM_ABA_P Parameter: Timepoint (hr) Value: 6
  misc_feature: MA Experiment 20000169 PARAMETER Experiment Name: At_100uM_ABA_P Parameter: Tissue Value: Aerial
  misc_feature: MA Experiment 20000169 PARAMETER Experiment Name: At_100uM_ABA_P Parameter: Treatment Value: 100uM ABA vs. No Treatment
  misc_feature: MA Experiment ID: 20000171 Result: Up-regulated in Transcription
  misc_feature: MA Experiment 20000171 PARAMETER Experiment Name: At_42deg_Heat_P Parameter: Age (day) Value: 14
  misc_feature: MA Experiment 20000171 PARAMETER Experiment Name: At_42deg_Heat_P Parameter: Organism Value: A. thaliana
  misc_feature: MA Experiment 20000171 PARAMETER Experiment Name: At_42deg_Heat_P Parameter: Plant Line Value: WS
  misc_feature: MA Experiment 20000171 PARAMETER Experiment Name: At_42deg_Heat_P Parameter: Temperature (deg C) Value: 42 vs. 22
  misc_feature: MA Experiment 20000171 PARAMETER Experiment Name: At_42deg_Heat_P Parameter: Timepoint (hr) Value: 1
  misc_feature: MA Experiment 20000171 PARAMETER Experiment Name: At_42deg_Heat_P Parameter: Tissue Value: Aerial
  misc_feature: MA Experiment ID: 20000173 Result: Up-regulated in Transcription
  misc_feature: MA Experiment 20000173 PARAMETER Experiment Name: At_42deg_Heat_P Parameter: Age (day) Value: 14
  misc_feature: MA Experiment 20000173 PARAMETER Experiment Name: At_42deg_Heat_P Parameter: Organism Value: A. thaliana
  misc_feature: MA Experiment 20000173 PARAMETER Experiment Name: At_42deg_Heat_P Parameter: Plant Line Value: WS
  misc_feature: MA Experiment 20000173 PARAMETER Experiment Name: At_42deg_Heat_P Parameter: Temperature (deg C) Value: 42 vs. 22
  misc_feature: MA Experiment 20000173 PARAMETER Experiment Name: At_42deg_Heat_P Parameter: Timepoint (hr) Value: 6
  misc_feature: MA Experiment 20000173 PARAMETER Experiment Name: At_42deg_Heat_P Parameter: Tissue Value: Aerial
  misc_feature: MA Experiment ID: 20000182 Result: Up-regulated in Transcription
  misc_feature: MA Experiment 20000182 PARAMETER Experiment Name: At_2mM_SA_P Parameter: Age (day) Value: 14
  misc_feature: MA Experiment 20000182 PARAMETER Experiment Name: At_2mM_SA_P Parameter: Organism Value: A. thaliana
  misc_feature: MA Experiment 20000182 PARAMETER Experiment Name: At_2mM_SA_P Parameter: Plant Line Value: WS
  misc_feature: MA Experiment 20000182 PARAMETER Experiment Name: At_2mM_SA_P Parameter: Timepoint (hr) Value: 6
  misc_feature: MA Experiment 20000182 PARAMETER Experiment Name: At_2mM_SA_P Parameter: Tissue Value: Aerial
  misc_feature: MA Experiment 20000182 PARAMETER Experiment Name: At_2mM_SA_P Parameter: Treatment Value: 2mM SA vs. No Treatment
  misc_feature: MA Experiment ID: 20000185 Result: Up-regulated in Transcription
  misc_feature: MA Experiment 20000185 PARAMETER Experiment Name: At_Roots__P Parameter: Age (day) Value: 7 vs. 21
  misc_feature: MA Experiment 20000185 PARAMETER Experiment Name: At_Roots__P Parameter: Organism Value: A. thaliana
  misc_feature: MA Experiment 20000185 PARAMETER Experiment Name: At_Roots__P Parameter: Tissue Value: Roots vs. Whole Plant
  misc_feature: MA Experiment ID: 20000265 Result: Down-regulated in Transcription
  misc_feature: MA Experiment 20000265 PARAMETER Experiment Name: At_Open_Flower_P Parameter: Age (day) Value: 21
  misc_feature: MA Experiment 20000265 PARAMETER Experiment Name: At_Open_Flower_P Parameter: Plant Line Value: WS
  misc_feature: MA Experiment 20000265 PARAMETER Experiment Name: At_Open_Flower_P Parameter: Tissue Value: Closed Flower vs. Whole Plant
  misc_feature: MA Experiment ID: 20000267 Result: Up-regulated in Transcription
  misc_feature: MA Experiment 20000267 PARAMETER Experiment Name: At_Drought_P Parameter: Age (day) Value: 7
  misc_feature: MA Experiment 20000267 PARAMETER Experiment Name: At_Drought_P Parameter: Organism Value: A. thaliana
  misc_feature: MA Experiment 20000267 PARAMETER Experiment Name: At_Drought_P Parameter: Plant Line Value: WS
  misc_feature: MA Experiment 20000267 PARAMETER Experiment Name: At_Drought_P Parameter: Timepoint (hr) Value: 6
  misc_feature: MA Experiment 20000267 PARAMETER Experiment Name: At_Drought_P Parameter: Tissue Value: Whole Plant
  misc_feature: MA Experiment 20000267 PARAMETER Experiment Name: At_Drought_P Parameter: Treatment Value: Drought vs. No Drought
  misc_feature: MA Experiment ID: 20000268 Result: Up-regulated in Transcription
  misc_feature: MA Experiment 20000268 PARAMETER Experiment Name: At_100mM_NaCl__P Parameter: Age (day) Value: 14
  misc_feature: MA Experiment 20000268 PARAMETER Experiment Name: At_100mM_NaCl__P Parameter: Organism Value: A. thaliana
  misc_feature: MA Experiment 20000268 PARAMETER Experiment Name: At_100mM_NaCl__P Parameter: Plant Line Value: WS
  misc_feature: MA Experiment 20000268 PARAMETER Experiment Name: At_100mM_NaCl__P Parameter: Timepoint (hr) Value: 6
  misc_feature: MA Experiment 20000268 PARAMETER Experiment Name: At_100mM_NaCl__P Parameter: Tissue Value: Whole Plant
  misc_feature: MA Experiment 20000268 PARAMETER Experiment Name: At_100mM_NaCl__P Parameter: Treatment Value: 100mM NaCl vs. No Treatment
  misc_feature: MA Experiment ID: 20000436 Result: Up-regulated in Transcription
  misc_feature: MA Experiment 20000436 PARAMETER Experiment Name: At_Drought_P Parameter: Age (day) Value: 7
  misc_feature: MA Experiment 20000436 PARAMETER Experiment Name: At_Drought_P Parameter: Organism Value: A. thaliana
  misc_feature: MA Experiment 20000436 PARAMETER Experiment Name: At_Drought_P Parameter: Plant Line Value: WS
  misc_feature: MA Experiment 20000436 PARAMETER Experiment Name: At_Drought_P Parameter: Timepoint (hr) Value: 12
  misc_feature: MA Experiment 20000436 PARAMETER Experiment Name: At_Drought_P Parameter: Tissue Value: Whole Plant
  misc_feature: MA Experiment 20000436 PARAMETER Experiment Name: At_Drought_P Parameter: Treatment Value: Drought vs. No Drought
  misc_feature: MA Experiment ID: 20000437 Result: Up-regulated in Transcription
  misc_feature: MA Experiment 20000437 PARAMETER Experiment Name: At_Drought_P Parameter: Age (day) Value: 8
  misc_feature: MA Experiment 20000437 PARAMETER Experiment Name: At_Drought_P Parameter: Organism Value: A. thaliana
  misc_feature: MA Experiment 20000437 PARAMETER Experiment Name: At_Drought_P Parameter: Plant Line Value: WS
  misc_feature: MA Experiment 20000437 PARAMETER Experiment Name: At_Drought_P Parameter: Timepoint (hr) Value: 24
  misc_feature: MA Experiment 20000437 PARAMETER Experiment Name: At_Drought_P Parameter: Tissue Value: Whole Plant
  misc_feature: MA Experiment 20000437 PARAMETER Experiment Name: At_Drought_P Parameter: Treatment Value: Drought vs. No Drought
  misc_feature: MA Experiment ID: 20000439 Result: Up-regulated in Transcription
  misc_feature: MA Experiment 20000439 PARAMETER Experiment Name: At_Roots__P Parameter: Age (day) Value: 14 vs. 21
  misc_feature: MA Experiment 20000439 PARAMETER Experiment Name: At_Roots__P Parameter: Organism Value: A. thaliana
  misc_feature: MA Experiment 20000439 PARAMETER Experiment Name: At_Roots__P Parameter: Tissue Value: Roots vs. Whole Plant
  misc_feature: MA Experiment ID: 20000453 Result: Up-regulated in Transcription
  misc_feature: MA Experiment 20000453 PARAMETER Experiment Name: At_100uM_ABA_P Parameter: Age (day) Value: 15
  misc_feature: MA Experiment 20000453 PARAMETER Experiment Name: At_100uM_ABA_P Parameter: Organism Value: A. thaliana
  misc_feature: MA Experiment 20000453 PARAMETER Experiment Name: At_100uM_ABA_P Parameter: Plant Line Value: WS
  misc_feature: MA Experiment 20000453 PARAMETER Experiment Name: At_100uM_ABA_P Parameter: Timepoint (hr) Value: 24
  misc_feature: MA Experiment 20000453 PARAMETER Experiment Name: At_100uM_ABA_P Parameter: Tissue Value: Aerial
  misc_feature: MA Experiment 20000453 PARAMETER Experiment Name: At_100uM_ABA_P Parameter: Treatment Value: 100uM ABA vs. No Treatment
  misc_feature: MA Experiment ID: 20001248 Result: Down-regulated in Transcription
  misc_feature: MA Experiment 20001248 PARAMETER Experiment Name: At_Far-red-induction_P Parameter: Age (day) Value: 7
  misc_feature: MA Experiment 20001248 PARAMETER Experiment Name: At_Far-red-induction_P Parameter: Light Value: Far-red vs. White
  misc_feature: MA Experiment 20001248 PARAMETER Experiment Name: At_Far-red-induction_P Parameter: Organism Value: A. thaliana
  misc_feature: MA Experiment 20001248 PARAMETER Experiment Name: At_Far-red-induction_P Parameter: Plant Line Value: Columbia
  misc_feature: MA Experiment 20001248 PARAMETER Experiment Name: At_Far-red-induction_P Parameter: Timepoint (hr) Value: 4
  misc_feature: MA Experiment 20001248 PARAMETER Experiment Name: At_Far-red-induction_P Parameter: Tissue Value: Whole Plant
  misc_feature: MA Experiment ID: 20001905 Result: Up-regulated in Transcription
  misc_feature: MA Experiment 20001905 PARAMETER Experiment Name: At_Drought_Reproduction_P Parameter: Age (day) Value: 40
  misc_feature: MA Experiment 20001905 PARAMETER Experiment Name: At_Drought_Reproduction_P Parameter: Organism Value: A. thaliana
  misc_feature: MA Experiment 20001905 PARAMETER Experiment Name: At_Drought_Reproduction_P Parameter: Plant Line Value: WS
  misc_feature: MA Experiment 20001905 PARAMETER Experiment Name: At_Drought_Reproduction_P Parameter: Timepoint (day) Value: 10
  misc_feature: MA Experiment 20001905 PARAMETER Experiment Name: At_Drought_Reproduction_P Parameter: Tissue Value: Rosettes
  misc_feature: MA Experiment 20001905 PARAMETER Experiment Name: At_Drought_Reproduction_P Parameter: Treatment Value: Drought vs. No Drought
  misc_feature: MA Experiment ID: 20001906 Result: Up-regulated in Transcription
  misc_feature: MA Experiment 20001906 PARAMETER Experiment Name: At_Drought_Reproduction_P Parameter: Age (day) Value: 35
  misc_feature: MA Experiment 20001906 PARAMETER Experiment Name: At_Drought_Reproduction_P Parameter: Organism Value: A. thaliana
  misc_feature: MA Experiment 20001906 PARAMETER Experiment Name: At_Drought_Reproduction_P Parameter: Plant Line Value: WS
  misc_feature: MA Experiment 20001906 PARAMETER Experiment Name: At_Drought_Reproduction_P Parameter: Timepoint (day) Value: 5
  misc_feature: MA Experiment 20001906 PARAMETER Experiment Name: At_Drought_Reproduction_P Parameter: Tissue Value: Siliques
  misc_feature: MA Experiment 20001906 PARAMETER Experiment Name: At_Drought_Reproduction_P Parameter: Treatment Value: Drought vs. No Drought
  misc_feature: MA Experiment ID: 20001908 Result: Up-regulated in Transcription
  misc_feature: MA Experiment 20001908 PARAMETER Experiment Name: At_Drought_Reproduction_P Parameter: Age (day) Value: 40
  misc_feature: MA Experiment 20001908 PARAMETER Experiment Name: At_Drought_Reproduction_P Parameter: Organism Value: A. thaliana
  misc_feature: MA Experiment 20001908 PARAMETER Experiment Name: At_Drought_Reproduction_P Parameter: Plant Line Value: WS
  misc_feature: MA Experiment 20001908 PARAMETER Experiment Name: At_Drought_Reproduction_P Parameter: Timepoint (day) Value: 10
  misc_feature: MA Experiment 20001908 PARAMETER Experiment Name: At_Drought_Reproduction_P Parameter: Tissue Value: Siliques
  misc_feature: MA Experiment 20001908 PARAMETER Experiment Name: At_Drought_Reproduction_P Parameter: Treatment Value: Drought vs. No Drought
  misc_feature: MA Experiment ID: 20001911 Result: Up-regulated in Transcription
  misc_feature: MA Experiment 20001911 PARAMETER Experiment Name: At_Drought_Reproduction_P Parameter: Age (day) Value: 40
  misc_feature: MA Experiment 20001911 PARAMETER Experiment Name: At_Drought_Reproduction_P Parameter: Organism Value: A. thaliana
  misc_feature: MA Experiment 20001911 PARAMETER Experiment Name: At_Drought_Reproduction_P Parameter: Plant Line Value: WS
  misc_feature: MA Experiment 20001911 PARAMETER Experiment Name: At_Drought_Reproduction_P Parameter: Timepoint (day) Value: 10
  misc_feature: MA Experiment 20001911 PARAMETER Experiment Name: At_Drought_Reproduction_P Parameter: Tissue Value: Flowers
  misc_feature: MA Experiment 20001911 PARAMETER Experiment Name: At_Drought_Reproduction_P Parameter: Treatment Value: Drought vs. No Drought

SEQ ID NO: 32209 - protein, 321 aa, Arabidopsis thaliana; identical to SEQ ID NO: 28619
  peptide (1)..(321): Ceres Seq. ID no. 12334074
  misc_feature (8)..(251): Pfam Name: 3-beta hydroxysteroid dehydrogenase/isomerase family Pfam Description: 3-beta hydroxysteroid dehydrogenase/isomerase
  misc_feature (9)..(316): Homolog of NCBI NO: 7431407 NR Description: cinnamoyl-CoA reductase (EC 1.2.1.44) CCR - cider
  misc_feature (6)..(316): Homolog of NCBI NO: 7239228 NR Description: cinnamoyl CoA reductase; CCR [Populus tremuloides]
  misc_feature (9)..(316): Homolog of NCBI NO: 40233135 NR Description: cinnamoyl CoA reductase [Populus tomentosa]
  misc_feature (9)..(316): Homolog of NCBI NO: 9998901 NR Description: cinnamoyl-CoA reductase [Populus balsamifera
  misc_feature (9)..(316): Homolog of NCBI NO: 17978649 NR Description: cinnamoyl-CoA reductase [Pinus taeda]
  misc_feature (6)..(223): Homolog of NCBI NO: 25140436 NR Description: cinnamoyl CoA reductase 2 [Solanum tuberosum]
  misc_feature (6)..(317): Homolog of NCBI NO: 6554472 NR Description: putative cinnamoyl-CoA reductase; 14056-15506
  misc_feature (6)..(317): Homolog of NCBI NO: 15223068 NR Description: putative cinnamoyl-CoA reductase; protein id:
  misc_feature (1)..(321): Homolog of NCBI NO: 15226135 NR Description: putative cinnamoyl-CoA reductase
  misc_feature (1)..(321): Homolog of NCBI NO: 15226134 NR Description: putative cinnamoyl-CoA reductase

SEQ ID NO: 32210 - protein, 188 aa, Arabidopsis thaliana; identical to SEQ ID NO: 28620
  peptide (1)..(188): Ceres Seq. ID no. 12334075
  misc_feature (1)..(118): Pfam Name: 3-beta hydroxysteroid dehydrogenase/isomerase family Pfam Description: 3-beta hydroxysteroid dehydrogenase/isomerase
  misc_feature (1)..(183): Homolog of NCBI NO: 7431407 NR Description: cinnamoyl-CoA reductase (EC 1.2.1.44) CCR - cider
  misc_feature (1)..(183): Homolog of NCBI NO: 7239228 NR Description: cinnamoyl CoA reductase; CCR [Populus tremuloides]
  misc_feature (1)..(183): Homolog of NCBI NO: 40233135 NR Description: cinnamoyl CoA reductase [Populus tomentosa]
  misc_feature (1)..(183): Homolog of NCBI NO: 9998901 NR Description: cinnamoyl-CoA reductase [Populus balsamifera
  misc_feature (1)..(183): Homolog of NCBI NO: 17978649 NR Description: cinnamoyl-CoA reductase [Pinus taeda]
  misc_feature (1)..(90): Homolog of NCBI NO: 25140436 NR Description: cinnamoyl CoA reductase 2 [Solanum tuberosum]
  misc_feature (1)..(184): Homolog of NCBI NO: 6554472 NR Description: putative cinnamoyl-CoA reductase; 14056-15506
  misc_feature (1)..(184): Homolog of NCBI NO: 15223068 NR Description: putative cinnamoyl-CoA reductase; protein id:
  misc_feature (1)..(188): Homolog of NCBI NO: 15226135 NR Description: putative cinnamoyl-CoA reductase
  misc_feature (1)..(188): Homolog of NCBI NO: 15226134 NR Description: putative cinnamoyl-CoA reductase

SEQ ID NO: 32211 - protein, 185 aa, Arabidopsis thaliana; identical to SEQ ID NO: 28621
  peptide (1)..(185): Ceres Seq. ID no. 12334076
  misc_feature (1)..(115): Pfam Name: 3-beta hydroxysteroid dehydrogenase/isomerase family Pfam Description: 3-beta hydroxysteroid dehydrogenase/isomerase
  misc_feature (1)..(180): Homolog of NCBI NO: 7431407 NR Description: cinnamoyl-CoA reductase (EC 1.2.1.44) CCR - cider
  misc_feature (1)..(180): Homolog of NCBI NO: 7239228 NR Description: cinnamoyl CoA reductase; CCR [Populus tremuloides]
  misc_feature (1)..(180): Homolog of NCBI NO: 40233135 NR Description: cinnamoyl CoA reductase [Populus tomentosa]
  misc_feature (1)..(180): Homolog of NCBI NO: 9998901 NR Description: cinnamoyl-CoA reductase [Populus balsamifera
  misc_feature (1)..(180): Homolog of NCBI NO: 17978649 NR Description: cinnamoyl-CoA reductase [Pinus taeda]
  misc_feature (1)..(87): Homolog of NCBI NO: 25140436 NR Description: cinnamoyl CoA reductase 2 [Solanum tuberosum]
  misc_feature (1)..(181): Homolog of NCBI NO: 6554472 NR Description: putative cinnamoyl-CoA reductase; 14056-15506
  misc_feature (1)..(181): Homolog of NCBI NO: 15223068 NR Description: putative cinnamoyl-CoA reductase; protein id:
  misc_feature (1)..(185): Homolog of NCBI NO: 15226135 NR Description: putative cinnamoyl-CoA reductase
  misc_feature (1)..(185): Homolog of NCBI NO: 15226134 NR Description: putative cinnamoyl-CoA reductase

SEQ ID NO: 32212 - DNA, 1254 bp, Arabidopsis thaliana; identical to SEQ ID NO: 28622
  misc_feature (1)..(1254): Ceres Seq. ID no. 12338154
  misc_feature: MA Experiment ID: 20000166 Result: Down-regulated in Transcription
  misc_feature: MA Experiment 20000166 PARAMETER Experiment Name: At_100uM_ABA_P Parameter: Age (day) Value: 14
  misc_feature: MA Experiment 20000166 PARAMETER Experiment Name: At_100uM_ABA_P Parameter: Organism Value: A. thaliana
  misc_feature: MA Experiment 20000166 PARAMETER Experiment Name: At_100uM_ABA_P Parameter: Plant Line Value: WS
  misc_feature: MA Experiment 20000166 PARAMETER Experiment Name: At_100uM_ABA_P Parameter: Timepoint (hr) Value: 1
  misc_feature: MA Experiment 20000166 PARAMETER Experiment Name: At_100uM_ABA_P Parameter: Tissue Value: Aerial
  misc_feature: MA Experiment 20000166 PARAMETER Experiment Name: At_100uM_ABA_P Parameter: Treatment Value: 100uM ABA vs. No Treatment
  misc_feature: MA Experiment ID: 20000171 Result: Down-regulated in Transcription
  misc_feature: MA Experiment 20000171 PARAMETER Experiment Name: At_42deg_Heat_P Parameter: Age (day) Value: 14
  misc_feature: MA Experiment 20000171 PARAMETER Experiment Name: At_42deg_Heat_P Parameter: Organism Value: A. thaliana
  misc_feature: MA Experiment 20000171 PARAMETER Experiment Name: At_42deg_Heat_P Parameter: Plant Line Value: WS
  misc_feature: MA Experiment 20000171 PARAMETER Experiment Name: At_42deg_Heat_P Parameter: Temperature (deg C) Value: 42 vs. 22
  misc_feature: MA Experiment 20000171 PARAMETER Experiment Name: At_42deg_Heat_P Parameter: Timepoint (hr) Value: 1
  misc_feature: MA Experiment 20000171 PARAMETER Experiment Name: At_42deg_Heat_P Parameter: Tissue Value: Aerial
  misc_feature: MA Experiment ID: 20000173 Result: Down-regulated in Transcription
  misc_feature: MA Experiment 20000173 PARAMETER Experiment Name: At_42deg_Heat_P Parameter: Age (day) Value: 14
  misc_feature: MA Experiment 20000173 PARAMETER Experiment Name: At_42deg_Heat_P Parameter: Organism Value: A. thaliana
  misc_feature: MA Experiment 20000173 PARAMETER Experiment Name: At_42deg_Heat_P Parameter: Plant Line Value: WS
  misc_feature: MA Experiment 20000173 PARAMETER Experiment Name: At_42deg_Heat_P Parameter: Temperature (deg C) Value: 42 vs. 22
  misc_feature: MA Experiment 20000173 PARAMETER Experiment Name: At_42deg_Heat_P Parameter: Timepoint (hr) Value: 6
  misc_feature: MA Experiment 20000173 PARAMETER Experiment Name: At_42deg_Heat_P Parameter: Tissue Value: Aerial
  misc_feature: MA Experiment ID: 20000184 Result: Down-regulated in Transcription
  misc_feature: MA Experiment 20000184 PARAMETER Experiment Name: At_Shoots__P Parameter: Age (day) Value: 7
  misc_feature: MA Experiment 20000184 PARAMETER Experiment Name: At_Shoots__P Parameter: Tissue Value: Shoots vs. Whole Plant
  misc_feature: MA Experiment ID: 20000185 Result: Down-regulated in Transcription
  misc_feature: MA Experiment 20000185 PARAMETER Experiment Name: At_Roots__P Parameter: Age (day) Value: 7 vs. 21
  misc_feature: MA Experiment 20000185 PARAMETER Experiment Name: At_Roots__P Parameter: Organism Value: A. thaliana
  misc_feature: MA Experiment 20000185 PARAMETER Experiment Name: At_Roots__P Parameter: Tissue Value: Roots vs. Whole Plant
  misc_feature: MA Experiment ID: 20000213 Result: Down-regulated in Transcription
  misc_feature: MA Experiment 20000213 PARAMETER Experiment Name: At_4deg_Cold_P Parameter: Timepoint (hr) Value: 2
  misc_feature: MA Experiment ID: 20000214 Result: Down-regulated in Transcription
  misc_feature: MA Experiment 20000214 PARAMETER Experiment Name: At_4deg_Cold_P Parameter: Timepoint (hr) Value: 6
  misc_feature: MA Experiment ID: 20000234 Result: Down-regulated in Transcription
  misc_feature: MA Experiment 20000234 PARAMETER Experiment Name: At_Siliques_P Parameter: Age (day) Value: 21
  misc_feature: MA Experiment 20000234 PARAMETER Experiment Name: At_Siliques_P Parameter: Organism Value: A. thaliana
  misc_feature: MA Experiment 20000234 PARAMETER Experiment Name: At_Siliques_P Parameter: Plant Line Value: WS
  misc_feature: MA Experiment 20000234 PARAMETER Experiment Name: At_Siliques_P Parameter: Tissue Value: Less Than 5mm Siliques vs. Whole Plant
  misc_feature: MA Experiment ID: 20000265 Result: Down-regulated in Transcription
  misc_feature: MA Experiment 20000265 PARAMETER Experiment Name: At_Open_Flower_P Parameter: Age (day) Value: 21
  misc_feature: MA Experiment 20000265 PARAMETER Experiment Name: At_Open_Flower_P Parameter: Plant Line Value: WS
  misc_feature: MA Experiment 20000265 PARAMETER Experiment Name: At_Open_Flower_P Parameter: Tissue Value: Closed Flower vs. Whole Plant
  misc_feature: MA Experiment ID: 20000286 Result: Down-regulated in Transcription
  misc_feature: MA Experiment 20000286 PARAMETER Experiment Name: At_Open_Flower_P Parameter: Age (day) Value: 21
  misc_feature: MA Experiment 20000286 PARAMETER Experiment Name: At_Open_Flower_P Parameter: Plant Line Value: WS
  misc_feature: MA Experiment 20000286 PARAMETER Experiment Name: At_Open_Flower_P Parameter: Tissue Value: Half Open vs. Whole Plant
  misc_feature: MA Experiment ID: 20000438 Result: Down-regulated in Transcription
  misc_feature: MA Experiment 20000438 PARAMETER Experiment Name: At_Shoots__P Parameter: Age (day) Value: 14
  misc_feature: MA Experiment 20000438 PARAMETER Experiment Name: At_Shoots__P Parameter: Tissue Value: Shoots vs. Whole Plant
  misc_feature: MA Experiment ID: 20000439 Result: Down-regulated in Transcription
  misc_feature: MA Experiment 20000439 PARAMETER Experiment Name: At_Roots__P Parameter: Age (day) Value: 14 vs. 21
  misc_feature: MA Experiment 20000439 PARAMETER Experiment Name: At_Roots__P Parameter: Organism Value: A. thaliana
  misc_feature: MA Experiment 20000439 PARAMETER Experiment Name: At_Roots__P Parameter: Tissue Value: Roots vs. Whole Plant
  misc_feature: MA Experiment ID: 20000495 Result: Down-regulated in Transcription
  misc_feature: MA Experiment 20000495 PARAMETER Experiment Name: At_Guard_Cells_P Parameter: Harvest Date Value: 8/2/2002
  misc_feature: MA Experiment 20000495 PARAMETER Experiment Name: At_Guard_Cells_P Parameter: Organism Value: A. thaliana
  misc_feature: MA Experiment 20000495 PARAMETER Experiment Name: At_Guard_Cells_P Parameter: Tissue Value: Guard Cells vs. Leaves
  misc_feature: MA Experiment ID: 20000573 Result: Up-regulated in Transcription
  misc_feature: MA Experiment 20000573 PARAMETER Experiment Name: At_100uM_ABA_Mutants__P Parameter: Organism Value: A. thaliana
  misc_feature: MA Experiment 20000573 PARAMETER Experiment Name: At_100uM_ABA_Mutants__P Parameter: Plant Line Value: CS22 vs. Ler wt
  misc_feature: MA Experiment 20000573 PARAMETER Experiment Name: At_100uM_ABA_Mutants__P Parameter: Timepoint (hr) Value: N/A
  misc_feature: MA Experiment 20000573 PARAMETER Experiment Name: At_100uM_ABA_Mutants__P Parameter: Tissue Value: Whole Plant
  misc_feature: MA Experiment 20000573 PARAMETER Experiment Name: At_100uM_ABA_Mutants__P Parameter: Treatment Value: None
  misc_feature: MA Experiment ID: 20000794 Result: Up-regulated in Transcription
  misc_feature: MA Experiment 20000794 PARAMETER Experiment Name: At_Petals_P Parameter: Age (day) Value: 23-25 days
  misc_feature: MA Experiment 20000794 PARAMETER Experiment Name: At_Petals_P Parameter: Plant Line Value: WS
  misc_feature: MA Experiment 20000794 PARAMETER Experiment Name: At_Petals_P Parameter: Tissue Value: Petals vs. Whole plant
  misc_feature: MA Experiment ID: 20001560 Result: Down-regulated in Transcription
  misc_feature: MA Experiment 20001560 PARAMETER Experiment Name: At_Drought_Soil_Dry_P Parameter: Age (day) Value: 28
  misc_feature: MA Experiment 20001560 PARAMETER Experiment Name: At_Drought_Soil_Dry_P Parameter: Organism Value: A. thaliana
  misc_feature: MA Experiment 20001560 PARAMETER Experiment Name: At_Drought_Soil_Dry_P Parameter: Plant Line Value: WS
  misc_feature: MA Experiment 20001560 PARAMETER Experiment Name: At_Drought_Soil_Dry_P Parameter: Post Timepoint (hr) Value: None
  misc_feature: MA Experiment 20001560 PARAMETER Experiment Name: At_Drought_Soil_Dry_P Parameter: Post-Treatment Value: None
  misc_feature: MA Experiment 20001560 PARAMETER Experiment Name: At_Drought_Soil_Dry_P Parameter: Timepoint (day) Value: 14
  misc_feature: MA Experiment 20001560 PARAMETER Experiment Name: At_Drought_Soil_Dry_P Parameter: Treatment Value: Drought vs. No Drought

SEQ ID NO: 32213 - protein, 320 aa, Arabidopsis thaliana; identical to SEQ ID NO: 28623
  peptide (1)..(320): Ceres Seq. ID no. 12338155
  misc_feature (1)..(297): Pfam Name: Pectinacetylesterase Pfam Description: Pectinacetylesterase
  misc_feature (1)..(312): Homolog of NCBI NO: 28392968 NR Description: putative pectinacetylesterase [Arabidopsis
  misc_feature (1)..(312): Homolog of NCBI NO: 18397406 NR Description: pectinacetylesterase, putative
  misc_feature (1)..(307): Homolog of NCBI NO: 15242357 NR Description: pectinacetylesterase, putative
  misc_feature (1)..(307): Homolog of NCBI NO: 21593445 NR Description: pectin acetylesterase [Arabidopsis thaliana]
  misc_feature (3)..(307): Homolog of NCBI NO: 18415308 NR Description: pectinacetylesterase, putative
  misc_feature (9)..(310): Homolog of NCBI NO: 38344147 NR Description: OSJNBa0041A02.14 [Oryza sativa (japonica
  misc_feature (279)..(320): Homolog of NCBI NO: 7487998 NR Description: pectin acetylesterase homolog T5K18.200 -
  misc_feature (1)..(168): Homolog of NCBI NO: 7487998 NR Description: pectin acetylesterase homolog T5K18.200 -
  misc_feature (1)..(320): Homolog of NCBI NO: 7488883 NR Description: pectin acetylesterase (EC 3.1.1.-) precursor -
  misc_feature (1)..(320): Homolog of NCBI NO: 22328797 NR Description: pectinacetylesterase family; protein id:

SEQ ID NO: 32214 - protein, 317 aa, Arabidopsis thaliana; identical to SEQ ID NO: 28624
  peptide (1)..(317): Ceres Seq. ID no. 12338156
  misc_feature (1)..(294): Pfam Name: Pectinacetylesterase Pfam Description: Pectinacetylesterase
  misc_feature (1)..(309): Homolog of NCBI NO: 28392968 NR Description: putative pectinacetylesterase [Arabidopsis
  misc_feature (1)..(309): Homolog of NCBI NO: 18397406 NR Description: pectinacetylesterase, putative
  misc_feature (1)..(304): Homolog of NCBI NO: 15242357 NR Description: pectinacetylesterase, putative
  misc_feature (1)..(304): Homolog of NCBI NO: 21593445 NR Description: pectin acetylesterase [Arabidopsis thaliana]
  misc_feature (1)..(304): Homolog of NCBI NO: 18415308 NR Description: pectinacetylesterase, putative
  misc_feature (6)..(307): Homolog of NCBI NO: 38344147 NR Description: OSJNBa0041A02.14 [Oryza sativa (japonica
  misc_feature (276)..(317): Homolog of NCBI NO: 7487998 NR Description: pectin acetylesterase homolog T5K18.200 -
  misc_feature (1)..(165): Homolog of NCBI NO: 7487998 NR Description: pectin acetylesterase homolog T5K18.200 -
  misc_feature (1)..(317): Homolog of NCBI NO: 7488883 NR Description: pectin acetylesterase (EC 3.1.1.-) precursor -
  misc_feature (1)..(317): Homolog of NCBI NO: 22328797 NR Description: pectinacetylesterase family; protein id:

SEQ ID NO: 32215 - protein, 307 aa, Arabidopsis thaliana; identical to SEQ ID NO: 28625
  peptide (1)..(307): Ceres Seq. ID no. 12338157
  misc_feature (1)..(284): Pfam Name: Pectinacetylesterase Pfam Description: Pectinacetylesterase
  misc_feature (1)..(299): Homolog of NCBI NO: 28392968 NR Description: putative pectinacetylesterase [Arabidopsis
  misc_feature (1)..(299): Homolog of NCBI NO: 18397406 NR Description: pectinacetylesterase, putative
  misc_feature (1)..(294): Homolog of NCBI NO: 15242357 NR Description: pectinacetylesterase, putative
  misc_feature (1)..(294): Homolog of NCBI NO: 21593445 NR Description: pectin acetylesterase [Arabidopsis thaliana]
  misc_feature (1)..(294): Homolog of NCBI NO: 18415308 NR Description: pectinacetylesterase, putative
  misc_feature (1)..(297): Homolog of NCBI NO: 38344147 NR Description: OSJNBa0041A02.14 [Oryza sativa (japonica
  misc_feature (266)..(307): Homolog of NCBI NO: 7487998 NR Description: pectin acetylesterase homolog T5K18.200 -
  misc_feature (1)..(155): Homolog of NCBI NO: 7487998 NR Description: pectin acetylesterase homolog T5K18.200 -
  misc_feature (1)..(307): Homolog of NCBI NO: 7488883 NR Description: pectin acetylesterase (EC 3.1.1.-) precursor -
  misc_feature (1)..(307): Homolog of NCBI NO: 22328797 NR Description: pectinacetylesterase family; protein id:

SEQ ID NO: 32216 - DNA, 1332 bp, Arabidopsis thaliana; identical to SEQ ID NO: 28626
  misc_feature (1)..(1332): Ceres Seq. ID no. 12334081
  misc_feature: MA Experiment ID: 20000113 Result: Up-regulated in Transcription
  misc_feature: MA Experiment 20000113 PARAMETER Experiment Name: At_42deg_Heat_cDNA_P Parameter: Temperature (deg C) Value: 42 vs. 22
  misc_feature: MA Experiment 20000113 PARAMETER Experiment Name: At_42deg_Heat_cDNA_P Parameter: Timepoint (hr) Value: 8
  misc_feature: MA Experiment 20000113 PARAMETER Experiment Name: At_42deg_Heat_cDNA_P Parameter: Tissue Value: Aerial

SEQ ID NO: 32217 - protein, 331 aa, Arabidopsis thaliana; identical to SEQ ID NO: 28627
  peptide (1)..(331): Ceres Seq. ID no. 12334082
  misc_feature (12)..(265): Homolog of NCBI NO: 19112522 NR Description: trp-ast repeats containing protein
  misc_feature (48)..(321): Homolog of NCBI NO: 34877546 NR Description: similar to CG17293-PA [Rattus norvegicus]
  misc_feature (11)..(319): Homolog of NCBI NO: 19920938 NR Description: CG17293-PA [Drosophila melanogaster]
  misc_feature (20)..(321): Homolog of NCBI NO: 21618713 NR Description: RIKEN cDNA 9430077D24 gene [Mus musculus]
  misc_feature (13)..(321): Homolog of NCBI NO: 28277563 NR Description: Similar to RIKEN cDNA 9430077D24 gene [Danio
  misc_feature (14)..(328): Homolog of NCBI NO: 15241434 NR Description: putative protein
  misc_feature (11)..(331): Homolog of NCBI NO: 28564824 NR Description: OSJNBb0005G07.13 [Oryza sativa (japonica
  misc_feature (6)..(331): Homolog of NCBI NO: 30698206 NR Description: transducin / WD-40 repeat protein family
  misc_feature (1)..(331): Homolog of NCBI NO: 21536827 NR Description: WD repeat protein-like [Arabidopsis thaliana]
  misc_feature (1)..(331): Homolog of NCBI NO: 18425050 NR Description: WD repeat protein-like

SEQ ID NO: 32218 - protein, 309 aa, Arabidopsis thaliana; identical to SEQ ID NO: 28628
  peptide (1)..(309): Ceres Seq. ID no. 12334083
  misc_feature (1)..(243): Homolog of NCBI NO: 19112522 NR Description: trp-ast repeats containing protein
  misc_feature (26)..(299): Homolog of NCBI NO: 34877546 NR Description: similar to CG17293-PA [Rattus norvegicus]
  misc_feature (1)..(297): Homolog of NCBI NO: 19920938 NR Description: CG17293-PA [Drosophila melanogaster]
  misc_feature (1)..(299): Homolog of NCBI NO: 21618713 NR Description: RIKEN cDNA 9430077D24 gene [Mus musculus]
  misc_feature (1)..(299): Homolog of NCBI NO: 28277563 NR Description: Similar to RIKEN cDNA 9430077D24 gene [Danio
  misc_feature (1)..(306): Homolog of NCBI NO: 15241434 NR Description: putative protein
  misc_feature (1)..(309): Homolog of NCBI NO: 28564824 NR Description: OSJNBb0005G07.13 [Oryza sativa (japonica
  misc_feature (1)..(309): Homolog of NCBI NO: 30698206 NR Description: transducin / WD-40 repeat protein family
  misc_feature (1)..(309): Homolog of NCBI NO: 21536827 NR Description: WD repeat protein-like [Arabidopsis thaliana]
  misc_feature (1)..(309): Homolog of NCBI NO: 18425050 NR Description: WD repeat protein-like

SEQ ID NO: 32219 - protein, 284 aa, Arabidopsis thaliana; identical to SEQ ID NO: 28629
  peptide (1)..(284): Ceres Seq. ID no. 12334084
  misc_feature (1)..(218): Homolog of NCBI NO: 19112522 NR Description: trp-ast repeats containing protein
  misc_feature (1)..(274): Homolog of NCBI NO: 34877546 NR Description: similar to CG17293-PA [Rattus norvegicus]
  misc_feature (1)..(272): Homolog of NCBI NO: 19920938 NR Description: CG17293-PA [Drosophila melanogaster]
  misc_feature (1)..(274): Homolog of NCBI NO: 21618713 NR Description: RIKEN cDNA 9430077D24 gene [Mus musculus]
  misc_feature (1)..(274): Homolog of NCBI NO: 28277563 NR Description: Similar to RIKEN cDNA 9430077D24 gene [Danio
  misc_feature (1)..(281): Homolog of NCBI NO: 15241434 NR Description: putative protein
  misc_feature (1)..(284): Homolog of NCBI NO: 28564824 NR Description: OSJNBb0005G07.13 [Oryza sativa (japonica
  misc_feature (1)..(284): Homolog of NCBI NO: 30698206 NR Description: transducin / WD-40 repeat protein family
  misc_feature (1)..(284): Homolog of NCBI NO: 21536827 NR Description: WD repeat protein-like [Arabidopsis thaliana]
  misc_feature (1)..(284): Homolog of NCBI NO: 18425050 NR Description: WD repeat protein-like

SEQ ID NO: 32220 - DNA, 1740 bp, Arabidopsis thaliana; identical to SEQ ID NO: 28630
  misc_feature (1)..(1740): Ceres Seq. ID no. 13487482
  misc_feature: MA Experiment ID: 20000171 Result: Down-regulated in Transcription
  misc_feature: MA Experiment 20000171 PARAMETER Experiment Name: At_42deg_Heat_P Parameter: Age (day) Value: 14
  misc_feature: MA Experiment 20000171 PARAMETER Experiment Name: At_42deg_Heat_P Parameter: Organism Value: A. thaliana
  misc_feature: MA Experiment 20000171 PARAMETER Experiment Name: At_42deg_Heat_P Parameter: Plant Line Value: WS
  misc_feature: MA Experiment 20000171 PARAMETER Experiment Name: At_42deg_Heat_P Parameter: Temperature (deg C) Value: 42 vs. 22
  misc_feature: MA Experiment 20000171 PARAMETER Experiment Name: At_42deg_Heat_P Parameter: Timepoint (hr) Value: 1
  misc_feature: MA Experiment 20000171 PARAMETER Experiment Name: At_42deg_Heat_P Parameter: Tissue Value: Aerial
  misc_feature: MA Experiment ID: 20000173 Result: Down-regulated in Transcription
  misc_feature: MA Experiment 20000173 PARAMETER Experiment Name: At_42deg_Heat_P Parameter: Age (day) Value: 14
  misc_feature: MA Experiment 20000173 PARAMETER Experiment Name: At_42deg_Heat_P Parameter: Organism Value: A. thaliana
  misc_feature: MA Experiment 20000173 PARAMETER Experiment Name: At_42deg_Heat_P Parameter: Plant Line Value: WS
  misc_feature: MA Experiment 20000173 PARAMETER Experiment Name: At_42deg_Heat_P Parameter: Temperature (deg C) Value: 42 vs. 22
  misc_feature: MA Experiment 20000173 PARAMETER Experiment Name: At_42deg_Heat_P Parameter: Timepoint (hr) Value: 6
  misc_feature: MA Experiment 20000173 PARAMETER Experiment Name: At_42deg_Heat_P Parameter: Tissue Value: Aerial
  misc_feature: MA Experiment ID: 20000213 Result: Down-regulated in Transcription
  misc_feature: MA Experiment 20000213 PARAMETER Experiment Name: At_4deg_Cold_P Parameter: Timepoint (hr) Value: 2
  misc_feature: MA Experiment ID: 20000214 Result: Down-regulated in Transcription
  misc_feature: MA Experiment 20000214 PARAMETER Experiment Name: At_4deg_Cold_P Parameter: Timepoint (hr) Value: 6
  misc_feature: MA Experiment ID: 20000227 Result: Up-regulated in Transcription
  misc_feature: MA Experiment 20000227 PARAMETER Experiment Name: At_Root-Tips-vs-Tops_P Parameter: Tissue Value: Root Tips vs. Root Tops
  misc_feature: MA Experiment ID: 20000264 Result: Up-regulated in Transcription
  misc_feature: MA Experiment 20000264 PARAMETER Experiment Name: At_Open_Flower_P Parameter: Age (day) Value: 21
  misc_feature: MA Experiment 20000264 PARAMETER Experiment Name: At_Open_Flower_P Parameter: Plant Line Value: WS
  misc_feature: MA Experiment 20000264 PARAMETER Experiment Name: At_Open_Flower_P Parameter: Tissue Value: Open Flower vs. Whole Plant
  misc_feature: MA Experiment ID: 20000286 Result: Up-regulated in Transcription
  misc_feature: MA Experiment 20000286 PARAMETER Experiment Name: At_Open_Flower_P Parameter: Age (day) Value: 21
  misc_feature: MA Experiment 20000286 PARAMETER Experiment Name: At_Open_Flower_P Parameter: Plant Line Value: WS
  misc_feature: MA Experiment 20000286 PARAMETER Experiment Name: At_Open_Flower_P Parameter: Tissue Value: Half Open vs. Whole Plant
  misc_feature: MA Experiment ID: 20000496 Result: Up-regulated in Transcription
  misc_feature: MA Experiment 20000496 PARAMETER Experiment Name: At_Guard_Cells_P Parameter: Harvest Date Value: 7/19/2002
  misc_feature: MA Experiment 20000496 PARAMETER Experiment Name: At_Guard_Cells_P Parameter: Organism Value: Canola
  misc_feature: MA Experiment 20000496 PARAMETER Experiment Name: At_Guard_Cells_P Parameter: Tissue Value: Guard Cells vs. Leaves
  misc_feature: MA Experiment ID: 20000794 Result: Up-regulated in Transcription
  misc_feature: MA Experiment 20000794 PARAMETER Experiment Name: At_Petals_P Parameter: Age (day) Value: 23-25 days
  misc_feature: MA Experiment 20000794 PARAMETER Experiment Name: At_Petals_P Parameter: Plant Line Value: WS
  misc_feature: MA Experiment 20000794 PARAMETER Experiment Name: At_Petals_P Parameter: Tissue Value: Petals vs. Whole plant
  misc_feature: MA Experiment ID: 20001554 Result: Down-regulated in Transcription
  misc_feature: MA Experiment 20001554 PARAMETER Experiment Name: At_Drought_Soil_Dry_P Parameter: Age (day) Value: 21
  misc_feature: MA Experiment 20001554 PARAMETER Experiment Name: At_Drought_Soil_Dry_P Parameter: Organism Value: A. thaliana
  misc_feature: MA Experiment 20001554 PARAMETER Experiment Name: At_Drought_Soil_Dry_P Parameter: Plant Line Value: WS
  misc_feature: MA Experiment 20001554 PARAMETER Experiment Name: At_Drought_Soil_Dry_P Parameter: Post Timepoint (hr) Value: None
  misc_feature: MA Experiment 20001554 PARAMETER Experiment Name: At_Drought_Soil_Dry_P Parameter: Post-Treatment Value: None
  misc_feature: MA Experiment 20001554 PARAMETER Experiment Name: At_Drought_Soil_Dry_P Parameter: Timepoint (day) Value: 7
  misc_feature: MA Experiment 20001554 PARAMETER Experiment Name: At_Drought_Soil_Dry_P Parameter: Treatment Value: Drought vs. No Drought
  misc_feature: MA Experiment ID: 20001555 Result: Down-regulated in Transcription
  misc_feature: MA Experiment 20001555 PARAMETER Experiment Name: At_Drought_Soil_Dry_P Parameter: Age (day) Value: 24
  misc_feature: MA Experiment 20001555 PARAMETER Experiment Name: At_Drought_Soil_Dry_P Parameter: Organism Value: A. thaliana
  misc_feature: MA Experiment 20001555 PARAMETER Experiment Name: At_Drought_Soil_Dry_P Parameter: Plant Line Value: WS
  misc_feature: MA Experiment 20001555 PARAMETER Experiment Name: At_Drought_Soil_Dry_P Parameter: Post Timepoint (hr) Value: None
  misc_feature: MA Experiment 20001555 PARAMETER Experiment Name: At_Drought_Soil_Dry_P Parameter: Post-Treatment Value: None
  misc_feature: MA Experiment 20001555 PARAMETER Experiment Name: At_Drought_Soil_Dry_P Parameter: Timepoint (day) Value: 10
  misc_feature: MA Experiment 20001555 PARAMETER Experiment Name: At_Drought_Soil_Dry_P Parameter: Treatment Value: Drought vs. No Drought
  misc_feature: MA Experiment ID: 20001556 Result: Down-regulated in Transcription
  misc_feature: MA Experiment 20001556 PARAMETER Experiment Name: At_Drought_Soil_Dry_P Parameter: Age (day) Value: 26
  misc_feature: MA Experiment 20001556 PARAMETER Experiment Name: At_Drought_Soil_Dry_P Parameter: Organism Value: A. thaliana
  misc_feature: MA Experiment 20001556 PARAMETER Experiment Name: At_Drought_Soil_Dry_P Parameter: Plant Line Value: WS
  misc_feature: MA Experiment 20001556 PARAMETER Experiment Name: At_Drought_Soil_Dry_P Parameter: Post Timepoint (hr) Value: None
  misc_feature: MA Experiment 20001556 PARAMETER Experiment Name: At_Drought_Soil_Dry_P Parameter: Post-Treatment Value: None
  misc_feature: MA Experiment 20001556 PARAMETER Experiment Name: At_Drought_Soil_Dry_P Parameter: Timepoint (day) Value: 12
  misc_feature: MA Experiment 20001556 PARAMETER Experiment Name: At_Drought_Soil_Dry_P Parameter: Treatment Value: Drought vs. No Drought
  misc_feature: MA Experiment ID: 20001557 Result: Down-regulated in Transcription
  misc_feature: MA Experiment 20001557 PARAMETER Experiment Name: At_Drought_Soil_Dry_P Parameter: Age (day) Value: 27
  misc_feature: MA Experiment 20001557 PARAMETER Experiment Name: At_Drought_Soil_Dry_P Parameter: Organism Value: A. thaliana
  misc_feature: MA Experiment 20001557 PARAMETER Experiment Name: At_Drought_Soil_Dry_P Parameter: Plant Line Value: WS
  misc_feature: MA Experiment 20001557 PARAMETER Experiment Name: At_Drought_Soil_Dry_P Parameter: Post Timepoint (hr) Value: 3
  misc_feature: MA Experiment 20001557 PARAMETER Experiment Name: At_Drought_Soil_Dry_P Parameter: Post-Treatment Value: Re-Water vs. No Drought
  misc_feature: MA Experiment 20001557 PARAMETER Experiment Name: At_Drought_Soil_Dry_P Parameter: Timepoint (day) Value: 13
  misc_feature: MA Experiment 20001557 PARAMETER Experiment Name: At_Drought_Soil_Dry_P Parameter: Treatment Value: Drought vs. No Drought
  misc_feature: MA Experiment ID: 20001911 Result: Down-regulated in Transcription
  misc_feature: MA Experiment 20001911 PARAMETER Experiment Name: At_Drought_Reproduction_P Parameter: Age (day) Value: 40
  misc_feature: MA Experiment 20001911 PARAMETER Experiment Name: At_Drought_Reproduction_P Parameter: Organism Value: A. thaliana
  misc_feature: MA Experiment 20001911 PARAMETER Experiment Name: At_Drought_Reproduction_P Parameter: Plant Line Value: WS
  misc_feature: MA Experiment 20001911 PARAMETER Experiment Name: At_Drought_Reproduction_P Parameter: Timepoint (day) Value: 10
  misc_feature: MA Experiment 20001911 PARAMETER Experiment Name: At_Drought_Reproduction_P Parameter: Tissue Value: Flowers
  misc_feature: MA Experiment 20001911 PARAMETER Experiment Name: At_Drought_Reproduction_P Parameter: Treatment Value: Drought vs. No Drought

SEQ ID NO: 32221 - protein, 465 aa, Arabidopsis thaliana; identical to SEQ ID NO: 28631
  peptide (1)..(465): Ceres Seq. ID no. 13487483
  misc_feature (212)..(462): Pfam Name: Cytochrome P450 Pfam Description: Cytochrome P450
  misc_feature (1)..(464): Homolog of NCBI NO: 20520627 NR Description: putative cytochrome P450 [Oryza sativa (japonica
  misc_feature (5)..(458): Homolog of NCBI NO: 15239203 NR Description: cytochrome p450 90A1 [Arabidopsis thaliana]
  misc_feature (4)..(458): Homolog of NCBI NO: 9587211 NR Description: cytochrome P450 [Vigna radiata]
  misc_feature (3)..(465): Homolog of NCBI NO: 27127269 NR Description: cytochrome P450 [Oryza sativa (japonica
  misc_feature (1)..(465): Homolog of NCBI NO: 5921933 NR Description: Cytochrome P450 85 (Dwarf protein)
  misc_feature (1)..(406): Homolog of NCBI NO: 30693331 NR Description: cytochrome p450, putative [Arabidopsis thaliana]
  misc_feature (1)..(465): Homolog of NCBI NO: 30693327 NR Description: cytochrome p450, putative [Arabidopsis thaliana]
  misc_feature (4)..(465): Homolog of NCBI NO: 21536828 NR Description: cytochrome P450 homolog, putative [Arabidopsis
  misc_feature (1)..(465): Homolog of NCBI NO: 9294419 NR Description: cytochrome P450 [Arabidopsis thaliana]
  misc_feature (1)..(465): Homolog of NCBI NO: 18406372 NR Description: cytochrome p450, putative [Arabidopsis thaliana]

SEQ ID NO: 32222 - protein, 462 aa, Arabidopsis thaliana; identical to SEQ ID NO: 28632
  peptide (1)..(462): Ceres Seq. ID no. 13487484
  misc_feature (209)..(459): Pfam Name: Cytochrome P450 Pfam Description: Cytochrome P450
  misc_feature (1)..(461): Homolog of NCBI NO: 20520627 NR Description: putative cytochrome P450 [Oryza sativa (japonica
  misc_feature (2)..(455): Homolog of NCBI NO: 15239203 NR Description: cytochrome p450 90A1 [Arabidopsis thaliana]
  misc_feature (1)..(455): Homolog of NCBI NO: 9587211 NR Description: cytochrome P450 [Vigna radiata]
  misc_feature (1)..(462): Homolog of NCBI NO: 27127269 NR Description: cytochrome P450 [Oryza sativa (japonica
  misc_feature (1)..(462): Homolog of NCBI NO: 5921933 NR Description: Cytochrome P450 85 (Dwarf protein)
  misc_feature (1)..(403): Homolog of NCBI NO: 30693331 NR Description: cytochrome p450, putative [Arabidopsis thaliana]
  misc_feature (1)..(462): Homolog of NCBI NO: 30693327 NR Description: cytochrome p450, putative [Arabidopsis thaliana]
  misc_feature (1)..(462): Homolog of NCBI NO: 21536828 NR Description: cytochrome P450 homolog, putative [Arabidopsis
  misc_feature (1)..(462): Homolog of NCBI NO: 9294419 NR Description: cytochrome P450 [Arabidopsis thaliana]
  misc_feature (1)..(462): Homolog of NCBI NO: 18406372 NR Description: cytochrome p450, putative [Arabidopsis thaliana]

SEQ ID NO: 32223 - protein, 461 aa, Arabidopsis thaliana; identical to SEQ ID NO: 28633
  peptide (1)..(461): Ceres Seq. ID no. 13487485
  misc_feature (208)..(458): Pfam Name: Cytochrome P450 Pfam Description: Cytochrome P450
  misc_feature (1)..(460): Homolog of NCBI NO: 20520627 NR Description: putative cytochrome P450 [Oryza sativa (japonica
  misc_feature (1)..(454): Homolog of NCBI NO: 15239203 NR Description: cytochrome p450 90A1 [Arabidopsis thaliana]
  misc_feature (1)..(454): Homolog of NCBI NO: 9587211 NR Description: cytochrome P450 [Vigna radiata]
  misc_feature (1)..(461): Homolog of NCBI NO: 27127269 NR Description: cytochrome P450 [Oryza sativa (japonica
  misc_feature (1)..(461): Homolog of NCBI NO: 5921933 NR Description: Cytochrome P450 85 (Dwarf protein)
  misc_feature (1)..(402): Homolog of NCBI NO: 30693331 NR Description: cytochrome p450, putative [Arabidopsis thaliana]
  misc_feature (1)..(461): Homolog of NCBI NO: 30693327 NR Description: cytochrome p450, putative [Arabidopsis thaliana]
  misc_feature (1)..(461): Homolog of NCBI NO: 21536828 NR Description: cytochrome P450 homolog, putative [Arabidopsis
  misc_feature (1)..(461): Homolog of NCBI NO: 9294419 NR Description: cytochrome P450 [Arabidopsis thaliana]
  misc_feature (1)..(461): Homolog of NCBI NO: 18406372 NR Description: cytochrome p450, putative [Arabidopsis thaliana]

SEQ ID NO: 32224 - DNA, 1450 bp, Arabidopsis thaliana; identical to SEQ ID NO: 24649
  misc_feature (1)..(1450): Ceres Seq. ID no. 12682693
  misc_feature: MA Experiment ID: 20000307 Result: Down-regulated in Transcription
  misc_feature: MA Experiment 20000307 PARAMETER Experiment Name: At_Germinating_Seeds_Sub_P Parameter: Age (hr) Value: 24 vs. 0
  misc_feature: MA Experiment 20000307 PARAMETER Experiment Name: At_Germinating_Seeds_Sub_P Parameter: Organism Value: A. thaliana
  misc_feature: MA Experiment 20000307 PARAMETER Experiment Name: At_Germinating_Seeds_Sub_P Parameter: Plant Line Value: WS
  misc_feature: MA Experiment 20000307 PARAMETER Experiment Name: At_Germinating_Seeds_Sub_P Parameter: Tissue Value: Germinating Seeds

SEQ ID NO: 32225 - protein, 278 aa, Arabidopsis thaliana; identical to SEQ ID NO: 23413
  peptide (1)..(278): Ceres Seq. ID no. 12682694
  misc_feature (31)..(98): Pfam Name: RNA recognition motif. (a.k.a. RRM, RBD, or RNP domain) Pfam Description: RNA recognition motif. (a.k.a. RRM, RBD, or RNP
  misc_feature (31)..(98): Pfam Name: RNA recognition motif. (a.k.a. RRM, RBD, or RNP domain) Pfam Description: RNA recognition motif. (a.k.a. RRM, RBD, or RNP
  misc_feature (30)..(247): Homolog of NCBI NO: 18414951 NR Description: RRM-containing protein
  misc_feature (28)..(263): Homolog of NCBI NO: 38344181 NR Description: OSJNBa0053K19.20 [Oryza sativa (japonica
  misc_feature (26)..(266): Homolog of NCBI NO: 38347069 NR Description: OSJNBa0006A01.10 [Oryza sativa (japonica
  misc_feature (28)..(260): Homolog of NCBI NO: 18071362 NR Description: putative splicing regulatory protein
  misc_feature (60)..(278): Homolog of NCBI NO: 25404689 NR Description: unknown protein, 64612-65506 [imported] -
  misc_feature (30)..(247): Homolog of NCBI NO: 18414951 NR Description: RRM-containing protein
  misc_feature (26)..(266): Homolog of NCBI NO: 38347069 NR Description: OSJNBa0006A01.10 [Oryza sativa (japonica
  misc_feature (60)..(278): Homolog of NCBI NO: 25404689 NR Description: unknown protein, 64612-65506 [imported] -
  misc_feature (1)..(278): Homolog of NCBI NO: 18408904 NR Description: RRM-containing protein
  misc_feature (1)..(278): Homolog of NCBI NO: 30697598 NR Description: RNA recognition motif (RRM)-containing protein
  misc_feature (1)..(278): Homolog of NCBI NO: 30697595 NR Description: RNA recognition motif (RRM)-containing protein
  misc_feature (1)..(248): Homolog of NCBI NO: 26450623 NR Description: unknown protein [Arabidopsis thaliana]
  misc_feature (60)..(278): Homolog of NCBI NO: 30697600 NR Description: RNA recognition motif (RRM)-containing protein
  misc_feature (28)..(260): Homolog of NCBI NO: 18071362 NR Description: putative splicing regulatory protein
  misc_feature (28)..(263): Homolog of NCBI NO: 38344181 NR Description: OSJNBa0053K19.20 [Oryza sativa (japonica
  misc_feature (60)..(278): Homolog of NCBI NO: 30697600 NR Description: RNA recognition motif (RRM)-containing protein
  misc_feature (1)..(248): Homolog of NCBI NO: 26450623 NR Description: unknown protein [Arabidopsis thaliana]
  misc_feature (1)..(278): Homolog of NCBI NO: 30697595 NR Description: RNA recognition motif (RRM)-containing protein
  misc_feature (1)..(278): Homolog of NCBI NO: 30697598 NR Description: RNA recognition motif (RRM)-containing protein
  misc_feature (1)..(278): Homolog of NCBI NO: 18408904 NR Description: RRM-containing protein

SEQ ID NO: 32226 - protein, 260 aa, Arabidopsis thaliana; identical to SEQ ID NO: 23414
  peptide (1)..(260): Ceres Seq. ID no. 12682695
  misc_feature (13)..(80): Pfam Name: RNA recognition motif. (a.k.a. RRM, RBD, or RNP domain) Pfam Description: RNA recognition motif. (a.k.a. RRM, RBD, or RNP
  misc_feature (13)..(80): Pfam Name: RNA recognition motif. (a.k.a. RRM, RBD, or RNP domain) Pfam Description: RNA recognition motif. (a.k.a. RRM, RBD, or RNP
  misc_feature (12)..(229): Homolog of NCBI NO: 18414951 NR Description: RRM-containing protein
  misc_feature (10)..(245): Homolog of NCBI NO: 38344181 NR Description: OSJNBa0053K19.20 [Oryza sativa (japonica
  misc_feature (8)..(248): Homolog of NCBI NO: 38347069 NR Description: OSJNBa0006A01.10 [Oryza sativa (japonica
  misc_feature (10)..(242): Homolog of NCBI NO: 18071362 NR Description: putative splicing regulatory protein
  misc_feature (42)..(260): Homolog of NCBI NO: 25404689 NR Description: unknown protein, 64612-65506 [imported] -
  misc_feature (12)..(229): Homolog of NCBI NO: 18414951 NR Description: RRM-containing protein
  misc_feature (8)..(248): Homolog of NCBI NO: 38347069 NR Description: OSJNBa0006A01.10 [Oryza sativa (japonica
  misc_feature (42)..(260): Homolog of NCBI NO: 25404689 NR Description: unknown protein, 64612-65506 [imported] -
  misc_feature (1)..(260): Homolog of NCBI NO: 18408904 NR Description: RRM-containing protein
  misc_feature (1)..(260): Homolog of NCBI NO: 30697598 NR Description: RNA recognition motif (RRM)-containing protein
  misc_feature (1)..(260): Homolog of NCBI NO: 30697595 NR Description: RNA recognition motif (RRM)-containing protein
  misc_feature (1)..(230): Homolog of NCBI NO: 26450623 NR Description: unknown protein [Arabidopsis thaliana]
  misc_feature (42)..(260): Homolog of NCBI NO: 30697600 NR Description: RNA recognition motif (RRM)-containing protein
  misc_feature (10)..(242): Homolog of NCBI NO: 18071362 NR Description: putative splicing regulatory protein
  misc_feature (10)..(245): Homolog of NCBI NO: 38344181 NR Description: OSJNBa0053K19.20 [Oryza sativa (japonica
  misc_feature (42)..(260): Homolog of NCBI NO: 30697600 NR Description: RNA recognition motif (RRM)-containing protein
  misc_feature (1)..(230): Homolog of NCBI NO: 26450623 NR Description: unknown protein [Arabidopsis thaliana]
  misc_feature (1)..(260): Homolog of NCBI NO: 30697595 NR Description: RNA recognition motif (RRM)-containing protein
  misc_feature (1)..(260): Homolog of NCBI NO: 30697598 NR Description: RNA recognition motif (RRM)-containing protein
  misc_feature (1)..(260): Homolog of NCBI NO: 18408904 NR Description: RRM-containing protein

SEQ ID NO: 32227 - protein, 219 aa, Arabidopsis thaliana; identical to SEQ ID NO: 23415
  peptide (1)..(219): Ceres Seq. ID no. 12682696
  misc_feature (1)..(188): Homolog of NCBI NO: 18414951 NR Description: RRM-containing protein
  misc_feature (1)..(204): Homolog of NCBI NO: 38344181 NR Description: OSJNBa0053K19.20 [Oryza sativa (japonica
  misc_feature (1)..(207): Homolog of NCBI NO: 38347069 NR Description: OSJNBa0006A01.10 [Oryza sativa (japonica
  misc_feature (1)..(201): Homolog of NCBI NO: 18071362 NR Description: putative splicing regulatory protein
  misc_feature (1)..(219): Homolog of NCBI NO: 25404689 NR Description: unknown protein, 64612-65506 [imported] -
  misc_feature (1)..(219): Homolog of NCBI NO: 30697600 NR Description: RNA recognition motif (RRM)-containing protein
  misc_feature (1)..(189): Homolog of NCBI NO: 26450623 NR Description: unknown protein [Arabidopsis thaliana]
  misc_feature (1)..(219): Homolog of NCBI NO: 30697595 NR Description: RNA recognition motif (RRM)-containing protein
  misc_feature (1)..(219): Homolog of NCBI NO: 30697598 NR Description: RNA recognition motif (RRM)-containing protein
  misc_feature (1)..(219): Homolog of NCBI NO: 18408904 NR Description: RRM-containing protein
  misc_feature (1)..(188): Homolog of NCBI NO: 18414951 NR Description: RRM-containing protein
  misc_feature (1)..(204): Homolog of NCBI NO: 38344181 NR Description: OSJNBa0053K19.20 [Oryza sativa (japonica
  misc_feature (1)..(207): Homolog of NCBI NO: 38347069 NR Description: OSJNBa0006A01.10 [Oryza sativa (japonica
  misc_feature (1)..(201): Homolog of NCBI NO: 18071362 NR Description: putative splicing regulatory protein
  misc_feature (1)..(219): Homolog of NCBI NO: 25404689 NR Description: unknown protein, 64612-65506 [imported] -
  misc_feature (1)..(219): Homolog of NCBI NO: 30697600 NR Description: RNA recognition motif (RRM)-containing protein
  misc_feature (1)..(189): Homolog of NCBI NO: 26450623 NR Description: unknown protein [Arabidopsis thaliana]
  misc_feature (1)..(219): Homolog of NCBI NO: 30697595 NR Description: RNA recognition motif (RRM)-containing protein
  misc_feature (1)..(219): Homolog of NCBI NO: 30697598 NR Description: RNA recognition motif (RRM)-containing protein
  misc_feature (1)..(219): Homolog of NCBI NO: 18408904 NR Description: RRM-containing protein

SEQ ID NO: 32228 - DNA, 1063 bp, Arabidopsis thaliana; identical to SEQ ID NO: 28638
  misc_feature (1)..(1063): Ceres Seq. ID no. 13486755
  misc_feature: MA Experiment ID: 20000093 Result: Up-regulated in Transcription
  misc_feature: MA Experiment 20000093 PARAMETER Experiment Name: At_42deg_Heat_cDNA_P Parameter: Temperature (deg C) Value: 42 vs. 22
  misc_feature: MA Experiment 20000093 PARAMETER Experiment Name: At_42deg_Heat_cDNA_P Parameter: Timepoint (hr) Value: 0.5
  misc_feature: MA Experiment 20000093 PARAMETER Experiment Name: At_42deg_Heat_cDNA_P Parameter: Tissue Value: Aerial
  misc_feature: MA Experiment ID: 20000111 Result: Up-regulated in Transcription
  misc_feature: MA Experiment 20000111 PARAMETER Experiment Name: At_42deg_Heat_cDNA_P Parameter: Temperature (deg C) Value: 42 vs. 22
  misc_feature: MA Experiment 20000111 PARAMETER Experiment Name: At_42deg_Heat_cDNA_P Parameter: Timepoint (hr) Value: 6
  misc_feature: MA Experiment 20000111 PARAMETER Experiment Name: At_42deg_Heat_cDNA_P Parameter: Tissue Value: Aerial
  misc_feature: MA Experiment ID: 20000171 Result: Up-regulated in Transcription
  misc_feature: MA Experiment 20000171 PARAMETER Experiment Name: At_42deg_Heat_P Parameter: Age (day) Value: 14
  misc_feature: MA Experiment 20000171 PARAMETER Experiment Name: At_42deg_Heat_P Parameter: Organism Value: A. thaliana
  misc_feature: MA Experiment 20000171 PARAMETER Experiment Name: At_42deg_Heat_P Parameter: Plant Line Value: WS
  misc_feature: MA Experiment 20000171 PARAMETER Experiment Name: At_42deg_Heat_P Parameter: Temperature (deg C) Value: 42 vs. 22
  misc_feature: MA Experiment 20000171 PARAMETER Experiment Name: At_42deg_Heat_P Parameter: Timepoint (hr) Value: 1
  misc_feature: MA Experiment 20000171 PARAMETER Experiment Name: At_42deg_Heat_P Parameter: Tissue Value: Aerial
  misc_feature: MA Experiment ID: 20000234 Result: Up-regulated in Transcription
  misc_feature: MA Experiment 20000234 PARAMETER Experiment Name: At_Siliques_P Parameter: Age (day) Value: 21
  misc_feature: MA Experiment 20000234 PARAMETER Experiment Name: At_Siliques_P Parameter: Organism Value: A. thaliana
  misc_feature: MA Experiment 20000234 PARAMETER Experiment Name: At_Siliques_P Parameter: Plant Line Value: WS
  misc_feature: MA Experiment 20000234 PARAMETER Experiment Name: At_Siliques_P Parameter: Tissue Value: Less Than 5mm Siliques vs. Whole Plant
  misc_feature: MA Experiment ID: 20000235 Result: Up-regulated in Transcription
  misc_feature: MA Experiment 20000235 PARAMETER Experiment Name: At_Siliques_P Parameter: Age (day) Value: 21
  misc_feature: MA Experiment 20000235 PARAMETER Experiment Name: At_Siliques_P Parameter: Organism Value: A. thaliana
  misc_feature: MA Experiment 20000235 PARAMETER Experiment Name: At_Siliques_P Parameter: Plant Line Value: WS
  misc_feature: MA Experiment 20000235 PARAMETER Experiment Name: At_Siliques_P Parameter: Tissue Value: 5-10mm Siliques vs. Whole Plant
  misc_feature: MA Experiment ID: 20000264 Result: Up-regulated in Transcription
  misc_feature: MA Experiment 20000264 PARAMETER Experiment Name: At_Open_Flower_P Parameter: Age (day) Value: 21
  misc_feature: MA Experiment 20000264 PARAMETER Experiment Name: At_Open_Flower_P Parameter: Plant Line Value: WS
  misc_feature: MA Experiment 20000264 PARAMETER Experiment Name: At_Open_Flower_P Parameter: Tissue Value: Open Flower vs. Whole Plant
  misc_feature: MA Experiment ID: 20000286 Result: Up-regulated in Transcription
  misc_feature: MA Experiment 20000286 PARAMETER Experiment Name: At_Open_Flower_P Parameter: Age (day) Value: 21
  misc_feature: MA Experiment 20000286 PARAMETER Experiment Name: At_Open_Flower_P Parameter: Plant Line Value: WS
  misc_feature: MA Experiment 20000286 PARAMETER Experiment Name: At_Open_Flower_P Parameter: Tissue Value: Half Open vs. Whole Plant
  misc_feature: MA Experiment ID: 20001457 Result: Up-regulated in Transcription
  misc_feature: MA Experiment 20001457 PARAMETER Experiment Name: At_50mM_NH4NO3_L-to-H_P Parameter: Age (day) Value: Undefined
  misc_feature: MA Experiment 20001457 PARAMETER Experiment Name: At_50mM_NH4NO3_L-to-H_P Parameter: Organism Value: Undefined
  misc_feature: MA Experiment 20001457 PARAMETER Experiment Name: At_50mM_NH4NO3_L-to-H_P Parameter: Plant Line Value: Undefined
  misc_feature: MA Experiment 20001457 PARAMETER Experiment Name: At_50mM_NH4NO3_L-to-H_P Parameter: Timepoint (hr) Value: 0.5
  misc_feature: MA Experiment 20001457 PARAMETER Experiment Name: At_50mM_NH4NO3_L-to-H_P Parameter: Tissue Value: Siliques
  misc_feature: MA Experiment 20001457 PARAMETER Experiment Name: At_50mM_NH4NO3_L-to-H_P Parameter: Treatment Value: 50mM NH4NO3 vs. 100mM Manitol
  misc_feature: MA Experiment ID: 20001906 Result: Down-regulated in Transcription
  misc_feature: MA Experiment 20001906 PARAMETER Experiment Name: At_Drought_Reproduction_P Parameter: Age (day) Value: 35
  misc_feature: MA Experiment 20001906 PARAMETER Experiment Name: At_Drought_Reproduction_P Parameter: Organism Value: A. thaliana
  misc_feature: MA Experiment 20001906 PARAMETER Experiment Name: At_Drought_Reproduction_P Parameter: Plant Line Value: WS
  misc_feature: MA Experiment 20001906 PARAMETER Experiment Name: At_Drought_Reproduction_P Parameter: Timepoint (day) Value: 5
  misc_feature: MA Experiment 20001906 PARAMETER Experiment Name: At_Drought_Reproduction_P Parameter: Tissue Value: Siliques
  misc_feature: MA Experiment 20001906 PARAMETER Experiment Name: At_Drought_Reproduction_P Parameter: Treatment Value: Drought vs. No Drought

SEQ ID NO: 32229 - protein, 300 aa, Arabidopsis thaliana; identical to SEQ ID NO: 28639
  peptide (1)..(300): Ceres Seq. ID no. 13486756
  misc_feature (75)..(298): Pfam Name: Putative undecaprenyl diphosphate synthase Pfam Description: Putative undecaprenyl diphosphate synthase
  misc_feature (46)..(299): Homolog of NCBI NO: 15237748 NR Description: dehydrodolichyl diphosphate synthase
  misc_feature (65)..(300): Homolog of NCBI NO: 18424148 NR Description: dehydrodolichyl diphosphate synthase
  misc_feature (12)..(300): Homolog of NCBI NO: 8843800 NR Description: cis-prenyltransferase homolog-like
  misc_feature (18)..(300): Homolog of NCBI NO: 7447521 NR Description: hypothetical protein At2g23410 [imported] -
  misc_feature (12)..(300): Homolog of NCBI NO: 18400264 NR Description: dehydrodolichyl diphosphate synthase
  misc_feature (76)..(300): Homolog of NCBI NO: 8843798 NR Description: undecaprenyl pyrophosphate synthetase-like
  misc_feature (68)..(300): Homolog of NCBI NO: 8843799 NR Description: undecaprenyl pyrophosphate synthetase-like
  misc_feature (3)..(300): Homolog of NCBI NO: 18424144 NR Description: dehydrodolichyl diphosphate synthase
  misc_feature (12)..(300): Homolog of NCBI NO: 21618322 NR Description: undecaprenyl pyrophosphate synthetase-like
  misc_feature (12)..(300): Homolog of NCBI NO: 18424146 NR Description: dehydrodolichyl diphosphate synthase

SEQ ID NO: 32230 - protein, 289 aa, Arabidopsis thaliana; identical to SEQ ID NO: 28640
  peptide (1)..(289): Ceres Seq. ID no. 13486757
  misc_feature (64)..(287): Pfam Name: Putative undecaprenyl diphosphate synthase Pfam Description: Putative undecaprenyl diphosphate synthase
  misc_feature (35)..(288): Homolog of NCBI NO: 15237748 NR Description: dehydrodolichyl diphosphate synthase
  misc_feature (54)..(289): Homolog of NCBI NO: 18424148 NR Description: dehydrodolichyl diphosphate synthase
  misc_feature (1)..(289): Homolog of NCBI NO: 8843800 NR Description: cis-prenyltransferase homolog-like
  misc_feature (7)..(289): Homolog of NCBI NO: 7447521 NR Description: hypothetical protein At2g23410 [imported] -
  misc_feature (1)..(289): Homolog of NCBI NO: 18400264 NR Description: dehydrodolichyl diphosphate synthase
  misc_feature (65)..(289): Homolog of NCBI NO: 8843798 NR Description: undecaprenyl pyrophosphate synthetase-like
  misc_feature (57)..(289): Homolog of NCBI NO: 8843799 NR Description: undecaprenyl pyrophosphate synthetase-like
  misc_feature (1)..(289): Homolog of NCBI NO: 18424144 NR Description: dehydrodolichyl diphosphate synthase
  misc_feature (1)..(289): Homolog of NCBI NO: 21618322 NR Description: undecaprenyl pyrophosphate synthetase-like
  misc_feature (1)..(289): Homolog of NCBI NO: 18424146 NR Description: dehydrodolichyl diphosphate synthase

SEQ ID NO: 32231 - protein, 286 aa, Arabidopsis thaliana; identical to SEQ ID NO: 28641
  peptide (1)..(286): Ceres Seq. ID no. 13486758
  misc_feature (61)..(284): Pfam Name: Putative undecaprenyl diphosphate synthase Pfam Description: Putative undecaprenyl diphosphate synthase
  misc_feature (32)..(285): Homolog of NCBI NO: 15237748 NR Description: dehydrodolichyl diphosphate synthase
  misc_feature (51)..(286): Homolog of NCBI NO: 18424148 NR Description: dehydrodolichyl diphosphate synthase
  misc_feature (1)..(286): Homolog of NCBI NO: 8843800 NR Description: cis-prenyltransferase homolog-like
  misc_feature (4)..(286): Homolog of NCBI NO: 7447521 NR Description: hypothetical protein At2g23410 [imported] -
  misc_feature (1)..(286): Homolog of NCBI NO: 18400264 NR Description: dehydrodolichyl diphosphate synthase
  misc_feature (62)..(286): Homolog of NCBI NO: 8843798 NR Description: undecaprenyl pyrophosphate synthetase-like
  misc_feature (54)..(286): Homolog of NCBI NO: 8843799 NR Description: undecaprenyl pyrophosphate synthetase-like
  misc_feature (1)..(286): Homolog of NCBI NO: 18424144 NR Description: dehydrodolichyl diphosphate synthase
  misc_feature (1)..(286): Homolog of NCBI NO: 21618322 NR Description: undecaprenyl pyrophosphate synthetase-like
  misc_feature (1)..(286): Homolog of NCBI NO: 18424146 NR Description: dehydrodolichyl diphosphate synthase

SEQ ID NO: 32232 - DNA, 1521 bp, Arabidopsis thaliana; identical to SEQ ID NO: 28642
  misc_feature (1)..(1521): Ceres Seq. ID no. 13580594
  misc_feature: MA Experiment ID: 108433 Result: Up-regulated in Transcription
  misc_feature: MA Experiment 108433 PARAMETER Experiment Name: At_rhl_Mutant2_cDNA_P Parameter: Age (day) Value: 7
  misc_feature: MA Experiment 108433 PARAMETER Experiment Name: At_rhl_Mutant2_cDNA_P Parameter: Organism Value: A. thaliana
  misc_feature: MA Experiment 108433 PARAMETER Experiment Name: At_rhl_Mutant2_cDNA_P Parameter: Plant Line Value: rhl Mutant vs. wt landsburg
  misc_feature: MA Experiment 108433 PARAMETER Experiment Name: At_rhl_Mutant2_cDNA_P Parameter: Tissue Value: Roots
  misc_feature: MA Experiment ID: 108461 Result: Down-regulated in Transcription
  misc_feature: MA Experiment 108461 PARAMETER Experiment Name: At_Germinating_Seeds_cDNA_P Parameter: Age (day) Value: 1 vs. 0
  misc_feature: MA Experiment 108461 PARAMETER Experiment Name: At_Germinating_Seeds_cDNA_P Parameter: Tissue Value: Germinating Seeds
  misc_feature: MA Experiment ID: 108462 Result: Down-regulated in Transcription
  misc_feature: MA Experiment 108462 PARAMETER Experiment Name: At_Germinating_Seeds_cDNA_P Parameter: Age (day) Value: 2 vs. 0
  misc_feature: MA Experiment 108462 PARAMETER Experiment Name: At_Germinating_Seeds_cDNA_P Parameter: Tissue Value: Germinating Seeds
  misc_feature: MA Experiment ID: 108463 Result: Down-regulated in Transcription
  misc_feature: MA Experiment 108463 PARAMETER Experiment Name: At_Germinating_Seeds_cDNA_P Parameter: Age (day) Value: 3 vs. 0
  misc_feature: MA Experiment 108463 PARAMETER Experiment Name: At_Germinating_Seeds_cDNA_P Parameter: Tissue Value: Germinating Seeds
  misc_feature: MA Experiment ID: 108464 Result: Down-regulated in Transcription
  misc_feature: MA Experiment 108464 PARAMETER Experiment Name: At_Germinating_Seeds_cDNA_P Parameter: Age (day) Value: 4 vs. 0
  misc_feature: MA Experiment 108464 PARAMETER Experiment Name: At_Germinating_Seeds_cDNA_P Parameter: Tissue Value: Germinating Seeds
  misc_feature: MA Experiment ID: 108573 Result: Up-regulated in Transcription
  misc_feature: MA Experiment 108573 PARAMETER Experiment Name: At_Drought_cDNA_P Parameter: Timepoint (hr) Value: 6
  misc_feature: MA Experiment 108573 PARAMETER Experiment Name: At_Drought_cDNA_P Parameter: Tissue Value: Aerial
  misc_feature: MA Experiment 108573 PARAMETER Experiment Name: At_Drought_cDNA_P Parameter: Treatment Value: Drought vs. No Drought
  misc_feature: MA Experiment ID: 20000180 Result: Down-regulated in Transcription
  misc_feature: MA Experiment 20000180 PARAMETER Experiment Name: At_Germinating_Seeds_P Parameter: Age (hr) Value: 24 vs. 0
  misc_feature: MA Experiment 20000180 PARAMETER Experiment Name: At_Germinating_Seeds_P Parameter: Tissue Value: Germinating Seeds
  misc_feature: MA Experiment ID: 20000185 Result: Up-regulated in Transcription
  misc_feature: MA Experiment 20000185 PARAMETER Experiment Name: At_Roots__P Parameter: Age (day) Value: 7 vs. 21
  misc_feature: MA Experiment 20000185 PARAMETER Experiment Name: At_Roots__P Parameter: Organism Value: A. thaliana
  misc_feature: MA Experiment 20000185 PARAMETER Experiment Name: At_Roots__P Parameter: Tissue Value: Roots vs. Whole Plant
  misc_feature: MA Experiment ID: 20000235 Result: Up-regulated in Transcription
  misc_feature: MA Experiment 20000235 PARAMETER Experiment Name: At_Siliques_P Parameter: Age (day) Value: 21
  misc_feature: MA Experiment 20000235 PARAMETER Experiment Name: At_Siliques_P Parameter: Organism Value: A. thaliana
  misc_feature: MA Experiment 20000235 PARAMETER Experiment Name: At_Siliques_P Parameter: Plant Line Value: WS
  misc_feature: MA Experiment 20000235 PARAMETER Experiment Name: At_Siliques_P Parameter: Tissue Value: 5-10mm Siliques vs. Whole Plant
  misc_feature: MA Experiment ID: 20000439 Result: Up-regulated in Transcription
  misc_feature: MA Experiment 20000439 PARAMETER Experiment Name: At_Roots__P Parameter: Age (day) Value: 14 vs. 21
  misc_feature: MA Experiment 20000439 PARAMETER Experiment Name: At_Roots__P Parameter: Organism Value: A. thaliana
  misc_feature: MA Experiment 20000439 PARAMETER Experiment Name: At_Roots__P Parameter: Tissue Value: Roots vs. Whole Plant
  misc_feature: MA Experiment ID: 20000574 Result: Up-regulated in Transcription
  misc_feature: MA Experiment 20000574 PARAMETER Experiment Name: At_100uM_ABA_Mutants__P Parameter: Organism Value: A. thaliana
  misc_feature: MA Experiment 20000574 PARAMETER Experiment Name: At_100uM_ABA_Mutants__P Parameter: Plant Line Value: CS23 vs. Ler wt
  misc_feature: MA Experiment 20000574 PARAMETER Experiment Name: At_100uM_ABA_Mutants__P Parameter: Timepoint (hr) Value: N/A
  misc_feature: MA Experiment 20000574 PARAMETER Experiment Name: At_100uM_ABA_Mutants__P Parameter: Tissue Value: Whole Plant
  misc_feature: MA Experiment 20000574 PARAMETER Experiment Name: At_100uM_ABA_Mutants__P Parameter: Treatment Value: None

SEQ ID NO: 32233 - protein, 405 aa, Arabidopsis thaliana; identical to SEQ ID NO: 28643
  peptide (1)..(405): Ceres Seq. ID no. 15222734
  misc_feature (84)..(401): Pfam Name: Aminotransferase class I and II Pfam Description: Aminotransferase class I and II
  misc_feature (84)..(401): Pfam Name: Aminotransferase class I and II Pfam Description: Aminotransferase class I and II
  misc_feature (1)..(405): Homolog of NCBI NO: 693690 NR Description: aspartate aminotransferase
  misc_feature (1)..(405): Homolog of NCBI NO: 693690 NR Description: aspartate aminotransferase
  misc_feature (1)..(405): Homolog of NCBI NO: 15239772 NR Description: aspartate aminotransferase, cytoplasmic isozyme 1
  misc_feature (1)..(405): Homolog of NCBI NO: 15239772 NR Description: aspartate aminotransferase, cytoplasmic isozyme 1

SEQ ID NO: 32234 - DNA, 1803 bp, Arabidopsis thaliana; identical to SEQ ID NO: 28644
  misc_feature (1)..(1803): Ceres Seq. ID no. 13494313
  misc_feature: MA Experiment ID: 108435 Result: Down-regulated in Transcription
  misc_feature: MA Experiment 108435 PARAMETER Experiment Name: At_stm_Mutants_cDNA_P Parameter: Plant Line Value: wt Landsburg vs stm
  misc_feature: MA Experiment 108435 PARAMETER Experiment Name: At_stm_Mutants_cDNA_P Parameter: Tissue Value: Shoot Apical Meristem Region
  misc_feature: MA Experiment ID: 108461 Result: Up-regulated in Transcription
  misc_feature: MA Experiment 108461 PARAMETER Experiment Name: At_Germinating_Seeds_cDNA_P Parameter: Age (day) Value: 1 vs. 0
  misc_feature: MA Experiment 108461 PARAMETER Experiment Name: At_Germinating_Seeds_cDNA_P Parameter: Tissue Value: Germinating Seeds
  misc_feature: MA Experiment ID: 108462 Result: Up-regulated in Transcription
  misc_feature: MA Experiment 108462 PARAMETER Experiment Name: At_Germinating_Seeds_cDNA_P Parameter: Age (day) Value: 2 vs. 0
  misc_feature: MA Experiment 108462 PARAMETER Experiment Name: At_Germinating_Seeds_cDNA_P Parameter: Tissue Value: Germinating Seeds
  misc_feature: MA Experiment ID: 108463 Result: Up-regulated in Transcription
  misc_feature: MA Experiment 108463 PARAMETER Experiment Name: At_Germinating_Seeds_cDNA_P Parameter: Age (day) Value: 3 vs. 0
  misc_feature: MA Experiment 108463 PARAMETER Experiment Name: At_Germinating_Seeds_cDNA_P Parameter: Tissue Value: Germinating Seeds
  misc_feature: MA Experiment ID: 108464 Result: Up-regulated in Transcription
  misc_feature: MA Experiment 108464 PARAMETER Experiment Name: At_Germinating_Seeds_cDNA_P Parameter: Age (day) Value: 4 vs. 0
  misc_feature: MA Experiment 108464 PARAMETER Experiment Name: At_Germinating_Seeds_cDNA_P Parameter: Tissue Value: Germinating Seeds
  misc_feature: MA Experiment ID: 108488 Result: Up-regulated in Transcription
  misc_feature: MA Experiment ID: 108577 Result: Up-regulated in Transcription
  misc_feature: MA Experiment 108577 PARAMETER Experiment Name: At_42deg_Heat_cDNA_P Parameter: Temperature (deg C) Value: 42 vs. 22
  misc_feature: MA Experiment 108577 PARAMETER Experiment Name: At_42deg_Heat_cDNA_P Parameter: Timepoint (hr) Value: 6
  misc_feature: MA Experiment 108577 PARAMETER Experiment Name: At_42deg_Heat_cDNA_P Parameter: Tissue Value: Aerial
  misc_feature: MA Experiment ID: 108594 Result: Down-regulated in Transcription
  misc_feature: MA Experiment 108594 PARAMETER Experiment Name: At_Ler-rhl_Root_cDNA_P Parameter: Plant Line Value: null
  misc_feature: MA Experiment ID: 20000088 Result: Down-regulated in Transcription
  misc_feature: MA Experiment 20000088 PARAMETER Experiment Name: At_100uM_ABA_Mutants_cDNA_P Parameter: Plant Line Value: Landsberg
  misc_feature: MA Experiment 20000088 PARAMETER Experiment Name: At_100uM_ABA_Mutants_cDNA_P Parameter: Timepoint (hr) Value: 6
  misc_feature: MA Experiment 20000088 PARAMETER Experiment Name: At_100uM_ABA_Mutants_cDNA_P Parameter: Tissue Value: Aerial
  misc_feature: MA Experiment 20000088 PARAMETER Experiment Name: At_100uM_ABA_Mutants_cDNA_P Parameter: Treatment Value: 100uM ABA vs. No Treatment
  misc_feature: MA Experiment ID: 20000113 Result: Up-regulated in Transcription
  misc_feature: MA Experiment 20000113 PARAMETER Experiment Name: At_42deg_Heat_cDNA_P Parameter: Temperature (deg C) Value: 42 vs. 22
  misc_feature: MA Experiment 20000113 PARAMETER Experiment Name: At_42deg_Heat_cDNA_P Parameter: Timepoint (hr) Value: 8
  misc_feature: MA Experiment 20000113 PARAMETER Experiment Name: At_42deg_Heat_cDNA_P Parameter: Tissue Value: Aerial
  misc_feature: MA Experiment ID: 20000117 Result: Down-regulated in Transcription
  misc_feature: MA Experiment 20000117 PARAMETER Experiment Name: At_100uM_ABA_Mutants_cDNA_P Parameter: Plant Line Value: Columbia
  misc_feature: MA Experiment 20000117 PARAMETER Experiment Name: At_100uM_ABA_Mutants_cDNA_P Parameter: Timepoint (hr) Value: 6
  misc_feature: MA Experiment 20000117 PARAMETER Experiment Name: At_100uM_ABA_Mutants_cDNA_P Parameter: Tissue Value: Aerial
  misc_feature: MA Experiment 20000117 PARAMETER Experiment Name: At_100uM_ABA_Mutants_cDNA_P Parameter: Treatment Value: 100uM ABA vs. No Treatment
  misc_feature: MA Experiment ID: 20000180 Result: Up-regulated in Transcription
  misc_feature: MA Experiment 20000180 PARAMETER Experiment Name: At_Germinating_Seeds_P Parameter: Age (hr) Value: 24 vs. 0
  misc_feature: MA Experiment 20000180 PARAMETER Experiment Name: At_Germinating_Seeds_P Parameter: Tissue Value: Germinating Seeds
  misc_feature: MA Experiment ID: 20000185 Result: Down-regulated in Transcription
  misc_feature: MA Experiment 20000185 PARAMETER Experiment Name: At_Roots__P Parameter: Age (day) Value: 7 vs. 21
  misc_feature: MA Experiment 20000185 PARAMETER Experiment Name: At_Roots__P Parameter: Organism Value: A. thaliana
  misc_feature: MA Experiment 20000185 PARAMETER Experiment Name: At_Roots__P Parameter: Tissue Value: Roots vs. Whole Plant
  misc_feature: MA Experiment ID: 20000264 Result: Down-regulated in Transcription
  misc_feature: MA Experiment 20000264 PARAMETER Experiment Name: At_Open_Flower_P Parameter: Age (day) Value: 21
  misc_feature: MA Experiment 20000264 PARAMETER Experiment Name: At_Open_Flower_P Parameter: Plant Line Value: WS
  misc_feature: MA Experiment 20000264 PARAMETER Experiment Name: At_Open_Flower_P Parameter: Tissue Value: Open Flower vs. Whole Plant
  misc_feature: MA Experiment ID: 20000286 Result: Down-regulated in Transcription
  misc_feature: MA Experiment 20000286 PARAMETER Experiment Name: At_Open_Flower_P Parameter: Age (day) Value: 21
  misc_feature: MA Experiment 20000286 PARAMETER Experiment Name: At_Open_Flower_P Parameter: Plant Line Value: WS
  misc_feature: MA Experiment 20000286 PARAMETER Experiment Name: At_Open_Flower_P Parameter: Tissue Value: Half Open vs. Whole Plant
  misc_feature: MA Experiment ID: 20000308 Result: Down-regulated in Transcription
  misc_feature: MA Experiment 20000308 PARAMETER Experiment Name: At_100mM_NaCl__P Parameter: Age (day) Value: 17
  misc_feature: MA Experiment 20000308 PARAMETER Experiment Name: At_100mM_NaCl__P Parameter: Organism Value: A. thaliana
  misc_feature: MA Experiment 20000308 PARAMETER Experiment Name: At_100mM_NaCl__P Parameter: Plant Line Value: WS
  misc_feature: MA Experiment 20000308 PARAMETER Experiment Name: At_100mM_NaCl__P Parameter: Timepoint (hr) Value: 72
  misc_feature: MA Experiment 20000308 PARAMETER Experiment Name: At_100mM_NaCl__P Parameter: Tissue Value: Whole Plant
  misc_feature: MA Experiment 20000308 PARAMETER Experiment Name: At_100mM_NaCl__P Parameter: Treatment Value: 100mM NaCl vs. No Treatment
  misc_feature: MA Experiment ID: 20000438 Result: Up-regulated in Transcription
  misc_feature: MA Experiment 20000438 PARAMETER Experiment Name: At_Shoots__P Parameter: Age (day) Value: 14
  misc_feature: MA Experiment 20000438 PARAMETER Experiment Name: At_Shoots__P Parameter: Tissue Value: Shoots vs. Whole Plant
  misc_feature: MA Experiment ID: 20000439 Result: Down-regulated in Transcription
  misc_feature: MA Experiment 20000439 PARAMETER Experiment Name: At_Roots__P Parameter: Age (day) Value: 14 vs. 21
  misc_feature: MA Experiment 20000439 PARAMETER Experiment Name: At_Roots__P Parameter: Organism Value: A. thaliana
  misc_feature: MA Experiment 20000439 PARAMETER Experiment Name: At_Roots__P Parameter: Tissue Value: Roots vs. Whole Plant
  misc_feature: MA Experiment ID: 20000794 Result: Down-regulated in Transcription
  misc_feature: MA Experiment 20000794 PARAMETER Experiment Name: At_Petals_P Parameter: Age (day) Value: 23-25 days
  misc_feature: MA Experiment 20000794 PARAMETER Experiment Name: At_Petals_P Parameter: Plant Line Value: WS
  misc_feature: MA Experiment 20000794 PARAMETER Experiment Name: At_Petals_P Parameter: Tissue Value: Petals vs. Whole plant
  misc_feature: MA Experiment ID: 20001557 Result: Down-regulated in Transcription
  misc_feature: MA Experiment 20001557 PARAMETER Experiment Name: At_Drought_Soil_Dry_P Parameter: Age (day) Value: 27
  misc_feature: MA Experiment 20001557 PARAMETER Experiment Name: At_Drought_Soil_Dry_P Parameter: Organism Value: A. thaliana
  misc_feature: MA Experiment 20001557 PARAMETER Experiment Name: At_Drought_Soil_Dry_P Parameter: Plant Line Value: WS
  misc_feature: MA Experiment 20001557 PARAMETER Experiment Name: At_Drought_Soil_Dry_P Parameter: Post Timepoint (hr) Value: 3
  misc_feature: MA Experiment 20001557 PARAMETER Experiment Name: At_Drought_Soil_Dry_P Parameter: Post-Treatment Value: Re-Water vs. No Drought
  misc_feature: MA Experiment 20001557 PARAMETER Experiment Name: At_Drought_Soil_Dry_P Parameter: Timepoint (day) Value: 13
  misc_feature: MA Experiment 20001557 PARAMETER Experiment Name: At_Drought_Soil_Dry_P Parameter: Treatment Value: Drought vs. No Drought
  misc_feature: MA Experiment ID: 20001560 Result: Down-regulated in Transcription
  misc_feature: MA Experiment 20001560 PARAMETER Experiment Name: At_Drought_Soil_Dry_P Parameter: Age (day) Value: 28
  misc_feature: MA Experiment 20001560 PARAMETER Experiment Name: At_Drought_Soil_Dry_P Parameter: Organism Value: A. thaliana
  misc_feature: MA Experiment 20001560 PARAMETER Experiment Name: At_Drought_Soil_Dry_P Parameter: Plant Line Value: WS
  misc_feature: MA Experiment 20001560 PARAMETER Experiment Name: At_Drought_Soil_Dry_P Parameter: Post Timepoint (hr) Value: None
  misc_feature: MA Experiment 20001560 PARAMETER Experiment Name: At_Drought_Soil_Dry_P Parameter: Post-Treatment Value: None
  misc_feature: MA Experiment 20001560 PARAMETER Experiment Name: At_Drought_Soil_Dry_P Parameter: Timepoint (day) Value: 14
  misc_feature: MA Experiment 20001560 PARAMETER Experiment Name: At_Drought_Soil_Dry_P Parameter: Treatment Value: Drought vs. No Drought
  misc_feature: MA Experiment ID: 20001905 Result: Down-regulated in Transcription
  misc_feature: MA Experiment 20001905 PARAMETER Experiment Name: At_Drought_Reproduction_P Parameter: Age (day) Value: 40
  misc_feature: MA Experiment 20001905 PARAMETER Experiment Name: At_Drought_Reproduction_P Parameter: Organism Value: A. thaliana
  misc_feature: MA Experiment 20001905 PARAMETER Experiment Name: At_Drought_Reproduction_P Parameter: Plant Line Value: WS
  misc_feature: MA Experiment 20001905 PARAMETER Experiment Name: At_Drought_Reproduction_P Parameter: Timepoint (day) Value: 10
  misc_feature: MA Experiment 20001905 PARAMETER Experiment Name: At_Drought_Reproduction_P Parameter: Tissue Value: Rosettes
  misc_feature: MA Experiment 20001905 PARAMETER Experiment Name: At_Drought_Reproduction_P Parameter: Treatment Value: Drought vs. No Drought

SEQ ID NO: 32235 - protein, 481 aa, Arabidopsis thaliana; identical to SEQ ID NO: 28645
  peptide (1)..(481): Ceres Seq. ID no. 13494314
  misc_feature (118)..(465): Pfam Name: Aminotransferase class I and II Pfam Description: Aminotransferase class I and II
  misc_feature (1)..(472): Homolog of NCBI NO: 37533928 NR Description: putative alanine aminotransferase
  misc_feature (4)..(472): Homolog of NCBI NO: 7434113 NR Description: alanine transaminase (EC 2.6.1.2) - Chlamydomonas
  misc_feature (103)..(481): Homolog of NCBI NO: 14596229 NR Description: alanine aminotransferase-like protein
  misc_feature (4)..(481): Homolog of NCBI NO: 34899390 NR Description: putative alanine aminotransferase
  misc_feature (4)..(481): Homolog of NCBI NO: 29569153 NR Description: alanine aminotransferase [Oryza sativa (indica
  misc_feature (1)..(481): Homolog of NCBI NO: 21537112 NR Description: putative alanine aminotransferase [Arabidopsis
  misc_feature (1)..(481): Homolog of NCBI NO: 15223186 NR Description: alanine aminotransferase, putative [Arabidopsis
  misc_feature (1)..(481): Homolog of NCBI NO: 13430566 NR Description: putative alanine aminotransferase [Arabidopsis
  misc_feature (1)..(481): Homolog of NCBI NO: 16604499 NR Description: At1g23310/F26F24_4 [Arabidopsis thaliana]
  misc_feature (1)..(481): Homolog of NCBI NO: 30688330 NR Description: alanine aminotransferase -related [Arabidopsis

SEQ ID NO: 32236 - protein, 403 aa, Arabidopsis thaliana; identical to SEQ ID NO: 28646
  peptide (1)..(403): Ceres Seq. ID no. 13494315
  misc_feature (40)..(387): Pfam Name: Aminotransferase class I and II Pfam Description: Aminotransferase class I and II
  misc_feature (1)..(394): Homolog of NCBI NO: 37533928 NR Description: putative alanine aminotransferase
  misc_feature (1)..(394): Homolog of NCBI NO: 7434113 NR Description: alanine transaminase (EC 2.6.1.2) - Chlamydomonas
  misc_feature (25)..(403): Homolog of NCBI NO: 14596229 NR Description: alanine aminotransferase-like protein
  misc_feature (1)..(403): Homolog of NCBI NO: 34899390 NR Description: putative alanine aminotransferase
  misc_feature (1)..(403): Homolog of NCBI NO: 29569153 NR Description: alanine aminotransferase [Oryza sativa (indica
  misc_feature (1)..(403): Homolog of NCBI NO: 21537112 NR Description: putative alanine aminotransferase [Arabidopsis
  misc_feature (1)..(403): Homolog of NCBI NO: 15223186 NR Description: alanine aminotransferase, putative [Arabidopsis
  misc_feature (1)..(403): Homolog of NCBI NO: 13430566 NR Description: putative alanine aminotransferase [Arabidopsis
  misc_feature (1)..(403): Homolog of NCBI NO: 16604499 NR Description: At1g23310/F26F24_4 [Arabidopsis thaliana]
  misc_feature (1)..(403): Homolog of NCBI NO: 30688330 NR Description: alanine aminotransferase -related [Arabidopsis

SEQ ID NO: 32237 - protein, 338 aa, Arabidopsis thaliana; identical to SEQ ID NO: 28647
  peptide (1)..(338): Ceres Seq. ID no. 13494316
  misc_feature (1)..(322): Pfam Name: Aminotransferase class I and II Pfam Description: Aminotransferase class I and II
  misc_feature (1)..(329): Homolog of NCBI NO: 37533928 NR Description: putative alanine aminotransferase
  misc_feature (1)..(329): Homolog of NCBI NO: 7434113 NR Description: alanine transaminase (EC 2.6.1.2) - Chlamydomonas
  misc_feature (1)..(338): Homolog of NCBI NO: 14596229 NR Description: alanine aminotransferase-like protein
  misc_feature (1)..(338): Homolog of NCBI NO: 34899390 NR Description: putative alanine aminotransferase
  misc_feature (1)..(338): Homolog of NCBI NO: 29569153 NR Description: alanine aminotransferase [Oryza sativa (indica
  misc_feature (1)..(338): Homolog of NCBI NO: 21537112 NR Description: putative alanine aminotransferase [Arabidopsis
  misc_feature (1)..(338): Homolog of NCBI NO: 15223186 NR Description: alanine aminotransferase, putative [Arabidopsis
  misc_feature (1)..(338): Homolog of NCBI NO: 13430566 NR Description: putative alanine aminotransferase [Arabidopsis
  misc_feature (1)..(338): Homolog of NCBI NO: 16604499 NR Description: At1g23310/F26F24_4 [Arabidopsis thaliana]
  misc_feature (1)..(338): Homolog of NCBI NO: 30688330 NR Description: alanine aminotransferase -related [Arabidopsis

SEQ ID NO: 32238 - DNA, 920 bp, Arabidopsis thaliana; identical to SEQ ID NO: 28648
  misc_feature (1)..(920): Ceres Seq. ID no. 13580545
  misc_feature: MA Experiment ID: 108434 Result: Down-regulated in Transcription
  misc_feature: MA Experiment 108434 PARAMETER Experiment Name: At_Root_Tips_cDNA_P Parameter: Tissue Value: Root Tips
  misc_feature: MA Experiment ID: 108577 Result: Up-regulated in Transcription
  misc_feature: MA Experiment 108577 PARAMETER Experiment Name: At_42deg_Heat_cDNA_P Parameter: Temperature (deg C) Value: 42 vs. 22
  misc_feature: MA Experiment 108577 PARAMETER Experiment Name: At_42deg_Heat_cDNA_P Parameter: Timepoint (hr) Value: 6
  misc_feature: MA Experiment 108577 PARAMETER Experiment Name: At_42deg_Heat_cDNA_P Parameter: Tissue Value: Aerial
  misc_feature: MA Experiment ID: 108579 Result: Up-regulated in Transcription
  misc_feature: MA Experiment 108579 PARAMETER Experiment Name: At_4deg_Cold_cDNA_P Parameter: Temperature (deg C) Value: 4 vs. 22
  misc_feature: MA Experiment 108579 PARAMETER Experiment Name: At_4deg_Cold_cDNA_P Parameter: Timepoint (hr) Value: 6
  misc_feature: MA Experiment 108579 PARAMETER Experiment Name: At_4deg_Cold_cDNA_P Parameter: Tissue Value: Aerial
  misc_feature: MA Experiment ID: 20000087 Result: Down-regulated in Transcription
  misc_feature: MA Experiment 20000087 PARAMETER Experiment Name: At_100uM_ABA_Mutants_cDNA_P Parameter: Plant Line Value: WS
  misc_feature: MA Experiment 20000087 PARAMETER Experiment Name: At_100uM_ABA_Mutants_cDNA_P Parameter: Timepoint (hr) Value: 6
  misc_feature: MA Experiment 20000087 PARAMETER Experiment Name: At_100uM_ABA_Mutants_cDNA_P Parameter: Tissue Value: Aerial
  misc_feature: MA Experiment 20000087 PARAMETER Experiment Name: At_100uM_ABA_Mutants_cDNA_P Parameter: Treatment Value: 100uM ABA vs. No Treatment
  misc_feature: MA Experiment ID: 20000093 Result: Up-regulated in Transcription
  misc_feature: MA Experiment 20000093 PARAMETER Experiment Name: At_42deg_Heat_cDNA_P Parameter: Temperature (deg C) Value: 42 vs. 22
  misc_feature: MA Experiment 20000093 PARAMETER Experiment Name: At_42deg_Heat_cDNA_P Parameter: Timepoint (hr) Value: 0.5
  misc_feature: MA Experiment 20000093 PARAMETER Experiment Name: At_42deg_Heat_cDNA_P Parameter: Tissue Value: Aerial
  misc_feature: MA Experiment ID: 20000111 Result: Up-regulated in Transcription
  misc_feature: MA Experiment 20000111 PARAMETER Experiment Name: At_42deg_Heat_cDNA_P Parameter: Temperature (deg C) Value: 42 vs. 22
  misc_feature: MA Experiment 20000111 PARAMETER Experiment Name: At_42deg_Heat_cDNA_P Parameter: Timepoint (hr) Value: 6
  misc_feature: MA Experiment 20000111 PARAMETER Experiment Name: At_42deg_Heat_cDNA_P Parameter: Tissue Value: Aerial
  misc_feature: MA Experiment ID: 20000113 Result: Up-regulated in Transcription
  misc_feature: MA Experiment 20000113 PARAMETER Experiment Name: At_42deg_Heat_cDNA_P Parameter: Temperature (deg C) Value: 42 vs. 22
  misc_feature: MA Experiment 20000113 PARAMETER Experiment Name: At_42deg_Heat_cDNA_P Parameter: Timepoint (hr) Value: 8
  misc_feature: MA Experiment 20000113 PARAMETER Experiment Name: At_42deg_Heat_cDNA_P Parameter: Tissue Value: Aerial
  misc_feature: MA Experiment ID: 20000144 Result: Up-regulated in Transcription
  misc_feature: MA Experiment 20000144 PARAMETER Experiment Name: At_42deg_Heat_cDNA_P Parameter: Temperature (deg C) Value: 42 vs. 22
  misc_feature: MA Experiment 20000144 PARAMETER Experiment Name: At_42deg_Heat_cDNA_P Parameter: Timepoint (hr) Value: 1
  misc_feature: MA Experiment 20000144 PARAMETER Experiment Name: At_42deg_Heat_cDNA_P Parameter: Tissue Value: Aerial
  misc_feature: MA Experiment ID: 20000327 Result: Up-regulated in Transcription
  misc_feature: MA Experiment 20000327 PARAMETER Experiment Name: At_42deg_Heat_Sub_P Parameter: Age (day) Value: 14
  misc_feature: MA Experiment 20000327 PARAMETER Experiment Name: At_42deg_Heat_Sub_P Parameter: Organism Value: A. thaliana
  misc_feature: MA Experiment 20000327 PARAMETER Experiment Name: At_42deg_Heat_Sub_P Parameter: Plant Line Value: WS
  misc_feature: MA Experiment 20000327 PARAMETER Experiment Name: At_42deg_Heat_Sub_P Parameter: Temperature (deg C) Value: 42 vs. 22
  misc_feature: MA Experiment 20000327 PARAMETER Experiment Name: At_42deg_Heat_Sub_P Parameter: Timepoint (hr) Value: 1
  misc_feature: MA Experiment 20000327 PARAMETER Experiment Name: At_42deg_Heat_Sub_P Parameter: Tissue Value: Aerial
  misc_feature: MA Experiment ID: 20000328 Result: Up-regulated in Transcription
  misc_feature: MA Experiment 20000328 PARAMETER Experiment Name: At_42deg_Heat_Sub_P Parameter: Age (day) Value: 14
  misc_feature: MA Experiment 20000328 PARAMETER Experiment Name: At_42deg_Heat_Sub_P Parameter: Organism Value: A. thaliana
  misc_feature: MA Experiment 20000328 PARAMETER Experiment Name: At_42deg_Heat_Sub_P Parameter: Plant Line Value: WS
  misc_feature: MA Experiment 20000328 PARAMETER Experiment Name: At_42deg_Heat_Sub_P Parameter: Temperature (deg C) Value: 42 vs. 22
  misc_feature: MA Experiment 20000328 PARAMETER Experiment Name: At_42deg_Heat_Sub_P Parameter: Timepoint (hr) Value: 6
  misc_feature: MA Experiment 20000328 PARAMETER Experiment Name: At_42deg_Heat_Sub_P Parameter: Tissue Value: Aerial

SEQ ID NO: 32239 - protein, 179 aa, Arabidopsis thaliana; identical to SEQ ID NO: 28649
  peptide (1)..(179): Ceres Seq. ID no. 15222729
  misc_feature (23)..(96): Pfam Name: Ubiquitin family Pfam Description: Ubiquitin family
  misc_feature (23)..(147): Homolog of NCBI NO: 15982787 NR Description: AT4g05320/C17L7_240 [Arabidopsis thaliana]
  misc_feature (23)..(147): Homolog of NCBI NO: 1800281 NR Description: polyubiquitin [Fragaria x ananassa]
  misc_feature (23)..(147): Homolog of NCBI NO: 170354 NR Description: pentameric polyubiquitin
  misc_feature (23)..(147): Homolog of NCBI NO: 170352 NR Description: hexameric polyubiquitin
  misc_feature (23)..(147): Homolog of NCBI NO: 170352 NR Description: hexameric polyubiquitin
  misc_feature (23)..(147): Homolog of NCBI NO: 100490 NR Description: polyubiquitin - garden snapdragon (fragment)
  misc_feature (23)..(147): Homolog of NCBI NO: 70644 NR Description: ubiquitin precursor - common sunflower (fragment)
  misc_feature (23)..(147): Homolog of NCBI NO: 70645 NR Description: polyubiquitin 5 - garden pea
  misc_feature (23)..(147): Homolog of NCBI NO: 70644 NR Description: ubiquitin precursor - common sunflower (fragment)
  misc_feature (23)..(147): Homolog of NCBI NO: 70644 NR Description: ubiquitin precursor - common sunflower (fragment)
  misc_feature (86)..(86): Xaa is any aa, unknown or other
  misc_feature (89)..(89): Xaa is any aa, unknown or other
  misc_feature (90)..(90): Xaa is any aa, unknown or other
  misc_feature (105)..(105): Xaa is any aa, unknown or other
  misc_feature (106)..(106): Xaa is any aa, unknown or other
  misc_feature (113)..(113): Xaa is any aa, unknown or other
  misc_feature (117)..(117): Xaa is any aa, unknown or other
  misc_feature (123)..(123): Xaa is any aa, unknown or other
  misc_feature (125)..(125): Xaa is any aa, unknown or other
  misc_feature (129)..(129): Xaa is any aa, unknown or other
  misc_feature (131)..(131): Xaa is any aa, unknown or other
  misc_feature (134)..(134): Xaa is any aa, unknown or other
  misc_feature (135)..(135): Xaa is any aa, unknown or other
  misc_feature (140)..(140): Xaa is any aa, unknown or other
  misc_feature (144)..(144): Xaa is any aa, unknown or other
  misc_feature (146)..(146): Xaa is any aa, unknown or other
  misc_feature (148)..(148): Xaa is any aa, unknown or other
  misc_feature (150)..(150): Xaa is any aa, unknown or other
  misc_feature (152)..(152): Xaa is any aa, unknown or other
  misc_feature (160)..(160): Xaa is any aa, unknown or other
  misc_feature (164)..(164): Xaa is any aa, unknown or other
  misc_feature (171)..(171): Xaa is any aa, unknown or other

SEQ ID NO: 32240 - protein, 157 aa, Arabidopsis thaliana; identical to SEQ ID NO: 28650
  peptide (1)..(157): Ceres Seq. ID no. 15222730
  misc_feature (1)..(74): Pfam Name: Ubiquitin family Pfam Description: Ubiquitin family
  misc_feature (1)..(125): Homolog of NCBI NO: 170354 NR Description: pentameric polyubiquitin
  misc_feature (1)..(125): Homolog of NCBI NO: 1800281 NR Description: polyubiquitin [Fragaria x ananassa]
  misc_feature (1)..(125): Homolog of NCBI NO: 7488781 NR Description: polyubiquitin 4.4 - kidney bean
  misc_feature (1)..(125): Homolog of NCBI NO: 7488781 NR Description: polyubiquitin 4.4 - kidney bean
  misc_feature (1)..(125): Homolog of NCBI NO: 15982787 NR Description: AT4g05320/C17L7_240 [Arabidopsis thaliana]
  misc_feature (1)..(125): Homolog of NCBI NO: 15982787 NR Description: AT4g05320/C17L7_240 [Arabidopsis thaliana]
  misc_feature (1)..(125): Homolog of NCBI NO: 18412077 NR Description: polyubiquitin (UBQ14) [Arabidopsis thaliana]
  misc_feature (1)..(125): Homolog of NCBI NO: 18412077 NR Description: polyubiquitin (UBQ14) [Arabidopsis thaliana]
  misc_feature (1)..(125): Homolog of NCBI NO: 18412785 NR Description: polyubiquitin UBQ11 [Arabidopsis thaliana]
  misc_feature (1)..(125): Homolog of NCBI NO: 70644 NR Description: ubiquitin precursor - common sunflower (fragment)
  misc_feature (64)..(64): Xaa is any aa, unknown or other
  misc_feature (67)..(67): Xaa is any aa, unknown or other
  misc_feature (68)..(68): Xaa is any aa, unknown or other
  misc_feature (83)..(83): Xaa is any aa, unknown or other
  misc_feature (84)..(84): Xaa is any aa, unknown or other
  misc_feature (91)..(91): Xaa is any aa, unknown or other
  misc_feature (95)..(95): Xaa is any aa, unknown or other
  misc_feature (101)..(101): Xaa is any aa, unknown or other
  misc_feature (103)..(103): Xaa is any aa, unknown or other
  misc_feature (107)..(107): Xaa is any aa, unknown or other
  misc_feature (109)..(109): Xaa is any aa, unknown or other
  misc_feature (112)..(112): Xaa is any aa, unknown or other
  misc_feature (113)..(113): Xaa is any aa, unknown or other
  misc_feature (118)..(118): Xaa is any aa, unknown or other
  misc_feature (122)..(122): Xaa is any aa, unknown or other
  misc_feature (124)..(124): Xaa is any aa, unknown or other
  misc_feature (126)..(126): Xaa is any aa, unknown or other
  misc_feature (128)..(128): Xaa is any aa, unknown or other
  misc_feature (130)..(130): Xaa is any aa, unknown or other
  misc_feature (138)..(138): Xaa is any aa, unknown or other
  misc_feature (142)..(142): Xaa is any aa, unknown or other
  misc_feature (149)..(149): Xaa is any aa, unknown or other

SEQ ID NO: 32241 - DNA, 1287 bp, Arabidopsis thaliana; identical to SEQ ID NO: 28651
  misc_feature (1)..(1287): Ceres Seq. ID no. 13497685
  misc_feature: MA Experiment ID: 108433 Result: Down-regulated in Transcription
  misc_feature: MA Experiment 108433 PARAMETER Experiment Name: At_rhl_Mutant2_cDNA_P Parameter: Age (day) Value: 7
  misc_feature: MA Experiment 108433 PARAMETER Experiment Name: At_rhl_Mutant2_cDNA_P Parameter: Organism Value: A. thaliana
  misc_feature: MA Experiment 108433 PARAMETER Experiment Name: At_rhl_Mutant2_cDNA_P Parameter: Plant Line Value: rhl Mutant vs. wt landsburg
  misc_feature: MA Experiment 108433 PARAMETER Experiment Name: At_rhl_Mutant2_cDNA_P Parameter: Tissue Value: Roots
  misc_feature: MA Experiment ID: 108434 Result: Up-regulated in Transcription
  misc_feature: MA Experiment 108434 PARAMETER Experiment Name: At_Root_Tips_cDNA_P Parameter: Tissue Value: Root Tips
  misc_feature: MA Experiment ID: 108435 Result: Up-regulated in Transcription
  misc_feature: MA Experiment 108435 PARAMETER Experiment Name: At_stm_Mutants_cDNA_P Parameter: Plant Line Value: wt Landsburg vs stm
  misc_feature: MA Experiment 108435 PARAMETER Experiment Name: At_stm_Mutants_cDNA_P Parameter: Tissue Value: Shoot Apical Meristem Region
  misc_feature: MA Experiment ID: 108461 Result: Down-regulated in Transcription
  misc_feature: MA Experiment 108461 PARAMETER Experiment Name: At_Germinating_Seeds_cDNA_P Parameter: Age (day) Value: 1 vs. 0
  misc_feature: MA Experiment 108461 PARAMETER Experiment Name: At_Germinating_Seeds_cDNA_P Parameter: Tissue Value: Germinating Seeds
  misc_feature: MA Experiment ID: 108462 Result: Down-regulated in Transcription
  misc_feature: MA Experiment 108462 PARAMETER Experiment Name: At_Germinating_Seeds_cDNA_P Parameter: Age (day) Value: 2 vs. 0
  misc_feature: MA Experiment 108462 PARAMETER Experiment Name: At_Germinating_Seeds_cDNA_P Parameter: Tissue Value: Germinating Seeds
  misc_feature: MA Experiment ID: 108463 Result: Down-regulated in Transcription
  misc_feature: MA Experiment 108463 PARAMETER Experiment Name: At_Germinating_Seeds_cDNA_P Parameter: Age (day) Value: 3 vs. 0
  misc_feature: MA Experiment 108463 PARAMETER Experiment Name: At_Germinating_Seeds_cDNA_P Parameter: Tissue Value: Germinating Seeds
  misc_feature: MA Experiment ID: 108464 Result: Down-regulated in Transcription
  misc_feature: MA Experiment 108464 PARAMETER Experiment Name: At_Germinating_Seeds_cDNA_P Parameter: Age (day) Value: 4 vs. 0
  misc_feature: MA Experiment 108464 PARAMETER Experiment Name: At_Germinating_Seeds_cDNA_P Parameter: Tissue Value: Germinating Seeds
  misc_feature: MA Experiment ID: 108488 Result: Up-regulated in Transcription
  misc_feature: MA Experiment ID: 108489 Result: Up-regulated in Transcription
  misc_feature: MA Experiment ID: 108561 Result: Down-regulated in Transcription
  misc_feature: MA Experiment 108561 PARAMETER Experiment Name: At_100uM_ABA_cDNA_P Parameter: Timepoint (hr) Value: 6
  misc_feature: MA Experiment 108561 PARAMETER Experiment Name: At_100uM_ABA_cDNA_P Parameter: Tissue Value: Aerial
  misc_feature: MA Experiment 108561 PARAMETER Experiment Name: At_100uM_ABA_cDNA_P Parameter: Treatment Value: 100uM ABA vs. No Treatment
  misc_feature: MA Experiment ID: 108572 Result: Down-regulated in Transcription
  misc_feature: MA Experiment 108572 PARAMETER Experiment Name: At_Drought_cDNA_P Parameter: Timepoint (hr) Value: 1
  misc_feature: MA Experiment 108572 PARAMETER Experiment Name: At_Drought_cDNA_P Parameter: Tissue Value: Aerial
  misc_feature: MA Experiment 108572 PARAMETER Experiment Name: At_Drought_cDNA_P Parameter: Treatment Value: Drought vs. No Drought
  misc_feature: MA Experiment ID: 108573 Result: Down-regulated in Transcription
  misc_feature: MA Experiment 108573 PARAMETER Experiment Name: At_Drought_cDNA_P Parameter: Timepoint (hr) Value: 6
  misc_feature: MA Experiment 108573 PARAMETER Experiment Name: At_Drought_cDNA_P Parameter: Tissue Value: Aerial
  misc_feature: MA Experiment 108573 PARAMETER Experiment Name: At_Drought_cDNA_P Parameter: Treatment Value: Drought vs. No Drought
  misc_feature: MA Experiment ID: 108579 Result: Up-regulated in Transcription
  misc_feature: MA Experiment 108579 PARAMETER Experiment Name: At_4deg_Cold_cDNA_P Parameter: Temperature (deg C) Value: 4 vs. 22
  misc_feature: MA Experiment 108579 PARAMETER Experiment Name: At_4deg_Cold_cDNA_P Parameter: Timepoint (hr) Value: 6
  misc_feature: MA Experiment 108579 PARAMETER Experiment Name: At_4deg_Cold_cDNA_P Parameter: Tissue Value: Aerial
  misc_feature: MA Experiment ID: 108609 Result: Down-regulated in Transcription
  misc_feature: MA Experiment 108609 PARAMETER Experiment Name: At_100uM_ABA_cDNA_P Parameter: Timepoint (hr) Value: 24
  misc_feature: MA Experiment 108609 PARAMETER Experiment Name: At_100uM_ABA_cDNA_P Parameter: Tissue Value: Aerial
  misc_feature: MA Experiment 108609 PARAMETER Experiment Name: At_100uM_ABA_cDNA_P Parameter: Treatment Value: 100uM ABA vs. No Treatment
  misc_feature: MA Experiment ID: 20000180 Result: Down-regulated in Transcription
  misc_feature: MA Experiment 20000180 PARAMETER Experiment Name: At_Germinating_Seeds_P Parameter: Age (hr) Value: 24 vs. 0
  misc_feature: MA Experiment 20000180 PARAMETER Experiment Name: At_Germinating_Seeds_P Parameter: Tissue Value: Germinating Seeds
  misc_feature: MA Experiment ID: 20000185 Result: Up-regulated in Transcription
  misc_feature: MA Experiment 20000185 PARAMETER Experiment Name: At_Roots__P Parameter: Age (day) Value: 7 vs. 21
  misc_feature: MA Experiment 20000185 PARAMETER Experiment Name: At_Roots__P Parameter: Organism Value: A. thaliana
  misc_feature: MA Experiment 20000185 PARAMETER Experiment Name: At_Roots__P Parameter: Tissue Value: Roots vs. Whole Plant
  misc_feature: MA Experiment ID: 20000227 Result: Up-regulated in Transcription
  misc_feature: MA Experiment 20000227 PARAMETER Experiment Name: At_Root-Tips-vs-Tops_P Parameter: Tissue Value: Root Tips vs. Root Tops
  misc_feature: MA Experiment ID: 20000234 Result: Up-regulated in Transcription
  misc_feature: MA Experiment 20000234 PARAMETER Experiment Name: At_Siliques_P Parameter: Age (day) Value: 21
  misc_feature: MA Experiment 20000234 PARAMETER Experiment Name: At_Siliques_P Parameter: Organism Value: A. thaliana
  misc_feature: MA Experiment 20000234 PARAMETER Experiment Name: At_Siliques_P Parameter: Plant Line Value: WS
  misc_feature: MA Experiment 20000234 PARAMETER Experiment Name: At_Siliques_P Parameter: Tissue Value: Less Than 5mm Siliques vs. Whole Plant
  misc_feature: MA Experiment ID: 20000264 Result: Up-regulated in Transcription
  misc_feature: MA Experiment 20000264 PARAMETER Experiment Name: At_Open_Flower_P Parameter: Age (day) Value: 21
  misc_feature: MA Experiment 20000264 PARAMETER Experiment Name: At_Open_Flower_P Parameter: Plant Line Value: WS
  misc_feature: MA Experiment 20000264 PARAMETER Experiment Name: At_Open_Flower_P Parameter: Tissue Value: Open Flower vs. Whole Plant
  misc_feature: MA Experiment ID: 20000265 Result: Up-regulated in Transcription
  misc_feature: MA Experiment 20000265 PARAMETER Experiment Name: At_Open_Flower_P Parameter: Age (day) Value: 21
  misc_feature: MA Experiment 20000265 PARAMETER Experiment Name: At_Open_Flower_P Parameter: Plant Line Value: WS
  misc_feature: MA Experiment 20000265 PARAMETER Experiment Name: At_Open_Flower_P Parameter: Tissue Value: Closed Flower vs. Whole Plant
  misc_feature: MA Experiment ID: 20000286 Result: Up-regulated in Transcription
  misc_feature: MA Experiment 20000286 PARAMETER Experiment Name: At_Open_Flower_P Parameter: Age (day) Value: 21
  misc_feature: MA Experiment 20000286 PARAMETER Experiment Name: At_Open_Flower_P Parameter: Plant Line Value: WS
  misc_feature: MA Experiment 20000286 PARAMETER Experiment Name: At_Open_Flower_P Parameter: Tissue Value: Half Open vs. Whole Plant
  misc_feature: MA Experiment ID: 20000436 Result: Down-regulated in Transcription
  misc_feature: MA Experiment 20000436 PARAMETER Experiment Name: At_Drought_P Parameter: Age (day) Value: 7
  misc_feature: MA Experiment 20000436 PARAMETER Experiment Name: At_Drought_P Parameter: Organism Value: A. thaliana
  misc_feature: MA Experiment 20000436 PARAMETER Experiment Name: At_Drought_P Parameter: Plant Line Value: WS
  misc_feature: MA Experiment 20000436 PARAMETER Experiment Name: At_Drought_P Parameter: Timepoint (hr) Value: 12
  misc_feature: MA Experiment 20000436 PARAMETER Experiment Name: At_Drought_P Parameter: Tissue Value: Whole Plant
  misc_feature: MA Experiment 20000436 PARAMETER Experiment Name: At_Drought_P Parameter: Treatment Value: Drought vs. No Drought
  misc_feature: MA Experiment ID: 20000437 Result: Down-regulated in Transcription
  misc_feature: MA Experiment 20000437 PARAMETER Experiment Name: At_Drought_P Parameter: Age (day) Value: 8
  misc_feature: MA Experiment 20000437 PARAMETER Experiment Name: At_Drought_P Parameter: Organism Value: A. thaliana
  misc_feature: MA Experiment 20000437 PARAMETER Experiment Name: At_Drought_P Parameter: Plant Line Value: WS
  misc_feature: MA Experiment 20000437 PARAMETER Experiment Name: At_Drought_P Parameter: Timepoint (hr) Value: 24
  misc_feature: MA Experiment 20000437 PARAMETER Experiment Name: At_Drought_P Parameter: Tissue Value: Whole Plant
  misc_feature: MA Experiment 20000437 PARAMETER Experiment Name: At_Drought_P Parameter: Treatment Value: Drought vs. No Drought
  misc_feature: MA Experiment ID: 20000453 Result: Down-regulated in Transcription
  misc_feature: MA Experiment 20000453 PARAMETER Experiment Name: At_100uM_ABA_P Parameter: Age (day) Value: 15
  misc_feature: MA Experiment 20000453 PARAMETER Experiment Name: At_100uM_ABA_P Parameter: Organism Value: A. thaliana
  misc_feature: MA Experiment 20000453 PARAMETER Experiment Name: At_100uM_ABA_P Parameter: Plant Line Value: WS
  misc_feature: MA Experiment 20000453 PARAMETER Experiment Name: At_100uM_ABA_P Parameter: Timepoint (hr) Value: 24
  misc_feature: MA Experiment 20000453 PARAMETER Experiment Name: At_100uM_ABA_P Parameter: Tissue Value: Aerial
  misc_feature: MA Experiment 20000453 PARAMETER Experiment Name: At_100uM_ABA_P Parameter: Treatment Value: 100uM ABA vs. No Treatment
  misc_feature: MA Experiment ID: 20000456 Result: Up-regulated in Transcription
  misc_feature: MA Experiment 20000456 PARAMETER Experiment Name: At_100uM_BA_P Parameter: Age (day) Value: 14
  misc_feature: MA Experiment 20000456 PARAMETER Experiment Name: At_100uM_BA_P Parameter: Organism Value: A. thaliana
  misc_feature: MA Experiment 20000456 PARAMETER Experiment Name: At_100uM_BA_P Parameter: Plant Line Value: WS
  misc_feature: MA Experiment 20000456 PARAMETER Experiment Name: At_100uM_BA_P Parameter: Timepoint (hr) Value: 6
  misc_feature: MA Experiment 20000456 PARAMETER Experiment Name: At_100uM_BA_P Parameter: Tissue Value: Aerial
  misc_feature: MA Experiment 20000456 PARAMETER Experiment Name: At_100uM_BA_P Parameter: Treatment Value: 100uM BA vs. No Treatment
  misc_feature: MA Experiment ID: 20000709 Result: Up-regulated in Transcription
  misc_feature: MA Experiment 20000709 PARAMETER Experiment Name: At_15mM_NH4NO3_L-to-H_P Parameter: Age (hr) Value: 14
  misc_feature: MA Experiment 20000709 PARAMETER Experiment Name: At_15mM_NH4NO3_L-to-H_P Parameter: Organism Value: A. thaliana
  misc_feature: MA Experiment 20000709 PARAMETER Experiment Name: At_15mM_NH4NO3_L-to-H_P Parameter: Plant Line Value: WS
  misc_feature: MA Experiment 20000709 PARAMETER Experiment Name: At_15mM_NH4NO3_L-to-H_P Parameter: Timepoint (hr) Value: 4
  misc_feature: MA Experiment 20000709 PARAMETER Experiment Name: At_15mM_NH4NO3_L-to-H_P Parameter: Tissue Value: Aerial
  misc_feature: MA Experiment 20000709 PARAMETER Experiment Name: At_15mM_NH4NO3_L-to-H_P Parameter: Treatment Value: 15mM NH4NO3 vs. 30mM Mannitol
  misc_feature: MA Experiment ID: 20000794 Result: Down-regulated in Transcription
  misc_feature: MA Experiment 20000794 PARAMETER Experiment Name: At_Petals_P Parameter: Age (day) Value: 23-25 days
  misc_feature: MA Experiment 20000794 PARAMETER Experiment Name: At_Petals_P Parameter: Plant Line Value: WS
  misc_feature: MA Experiment 20000794 PARAMETER Experiment Name: At_Petals_P Parameter: Tissue Value: Petals vs. Whole plant
  misc_feature: MA Experiment ID: 20001247 Result: Down-regulated in Transcription
  misc_feature: MA Experiment 20001247 PARAMETER Experiment Name: At_Far-red-induction_P Parameter: Age (day) Value: 7
  misc_feature: MA Experiment 20001247 PARAMETER Experiment Name: At_Far-red-induction_P Parameter: Light Value: Far-red vs. White
  misc_feature: MA Experiment 20001247 PARAMETER Experiment Name: At_Far-red-induction_P Parameter: Organism Value: A. thaliana
  misc_feature: MA Experiment 20001247 PARAMETER Experiment Name: At_Far-red-induction_P Parameter: Plant Line Value: Columbia
  misc_feature: MA Experiment 20001247 PARAMETER Experiment Name: At_Far-red-induction_P Parameter: Timepoint (hr) Value: 1
  misc_feature: MA Experiment 20001247 PARAMETER Experiment Name: At_Far-red-induction_P Parameter: Tissue Value: Whole Plant
  misc_feature: MA Experiment ID: 20001450 Result: Down-regulated in Transcription
  misc_feature: MA Experiment 20001450 PARAMETER Experiment Name: At_Far-red-induction_P Parameter: Age (day) Value: 7
  misc_feature: MA Experiment 20001450 PARAMETER Experiment Name: At_Far-red-induction_P Parameter: Light Value: Far-red vs. White
  misc_feature: MA Experiment 20001450 PARAMETER Experiment Name: At_Far-red-induction_P Parameter: Organism Value: A. thaliana
  misc_feature: MA Experiment 20001450 PARAMETER Experiment Name: At_Far-red-induction_P Parameter: Plant Line Value: Columbia
  misc_feature: MA Experiment 20001450 PARAMETER Experiment Name: At_Far-red-induction_P Parameter: Timepoint (hr) Value: 8
  misc_feature: MA Experiment 20001450 PARAMETER Experiment Name: At_Far-red-induction_P Parameter: Tissue Value: Whole Plant
  misc_feature: MA Experiment ID: 20001451 Result: Down-regulated in Transcription
  misc_feature: MA Experiment 20001451 PARAMETER Experiment Name: At_Far-red-induction_P Parameter: Age (day) Value: 7
  misc_feature: MA Experiment 20001451 PARAMETER Experiment Name: At_Far-red-induction_P Parameter: Light Value: Far-red vs. White
  misc_feature: MA Experiment 20001451 PARAMETER Experiment Name: At_Far-red-induction_P Parameter: Organism Value: A. thaliana
  misc_feature: MA Experiment 20001451 PARAMETER Experiment Name: At_Far-red-induction_P Parameter: Plant Line Value: Columbia
  misc_feature: MA Experiment 20001451 PARAMETER Experiment Name: At_Far-red-induction_P Parameter: Timepoint (hr) Value: 24
  misc_feature: MA Experiment 20001451 PARAMETER Experiment Name: At_Far-red-induction_P Parameter: Tissue Value: Whole Plant
  misc_feature: MA Experiment ID: 20001458 Result: Up-regulated in Transcription
  misc_feature: MA Experiment 20001458 PARAMETER Experiment Name: At_50mM_NH4NO3_L-to-H_P Parameter: Age (day) Value: Undefined
  misc_feature: MA Experiment 20001458 PARAMETER Experiment Name: At_50mM_NH4NO3_L-to-H_P Parameter: Organism Value: Undefined
  misc_feature: MA Experiment 20001458 PARAMETER Experiment Name: At_50mM_NH4NO3_L-to-H_P Parameter: Plant Line Value: Undefined
  misc_feature: MA Experiment 20001458 PARAMETER Experiment Name: At_50mM_NH4NO3_L-to-H_P Parameter: Timepoint (hr) Value: 2
  misc_feature: MA Experiment 20001458 PARAMETER Experiment Name: At_50mM_NH4NO3_L-to-H_P Parameter: Tissue Value: Siliques
  misc_feature: MA Experiment 20001458 PARAMETER Experiment Name: At_50mM_NH4NO3_L-to-H_P Parameter: Treatment Value: 50mM NH4NO3 vs. 100mM Manitol
  misc_feature: MA Experiment ID: 20001557 Result: Up-regulated in Transcription
  misc_feature: MA Experiment 20001557 PARAMETER Experiment Name: At_Drought_Soil_Dry_P Parameter: Age (day) Value: 27
  misc_feature: MA Experiment 20001557 PARAMETER Experiment Name: At_Drought_Soil_Dry_P Parameter: Organism Value: A. thaliana
  misc_feature: MA Experiment 20001557 PARAMETER Experiment Name: At_Drought_Soil_Dry_P Parameter: Plant Line Value: WS
  misc_feature: MA Experiment 20001557 PARAMETER Experiment Name: At_Drought_Soil_Dry_P Parameter: Post Timepoint (hr) Value: 3
  misc_feature: MA Experiment 20001557 PARAMETER Experiment Name: At_Drought_Soil_Dry_P Parameter: Post-Treatment Value: Re-Water vs. No Drought
  misc_feature: MA Experiment 20001557 PARAMETER Experiment Name: At_Drought_Soil_Dry_P Parameter: Timepoint (day) Value: 13
  misc_feature: MA Experiment 20001557 PARAMETER Experiment Name: At_Drought_Soil_Dry_P Parameter: Treatment Value: Drought vs. No Drought
  misc_feature: MA Experiment ID: 20001558 Result: Up-regulated in Transcription
  misc_feature: MA Experiment 20001558 PARAMETER Experiment Name: At_Drought_Soil_Dry_P Parameter: Age (day) Value: 27
  misc_feature: MA Experiment 20001558 PARAMETER Experiment Name: At_Drought_Soil_Dry_P Parameter: Organism Value: A. thaliana
  misc_feature: MA Experiment 20001558 PARAMETER Experiment Name: At_Drought_Soil_Dry_P Parameter: Plant Line Value: WS
  misc_feature: MA Experiment 20001558 PARAMETER Experiment Name: At_Drought_Soil_Dry_P Parameter: Post Timepoint (hr) Value: 6
  misc_feature: MA Experiment 20001558 PARAMETER Experiment Name: At_Drought_Soil_Dry_P Parameter: Post-Treatment Value: Re-Water vs. No Drought
  misc_feature: MA Experiment 20001558 PARAMETER Experiment Name: At_Drought_Soil_Dry_P Parameter: Timepoint (day) Value: 13
  misc_feature: MA Experiment 20001558 PARAMETER Experiment Name: At_Drought_Soil_Dry_P Parameter: Treatment Value: Drought vs. No Drought
  misc_feature: MA Experiment ID: 20001560 Result: Up-regulated in Transcription
  misc_feature: MA Experiment 20001560 PARAMETER Experiment Name: At_Drought_Soil_Dry_P Parameter: Age (day) Value: 28
  misc_feature: MA Experiment 20001560 PARAMETER Experiment Name: At_Drought_Soil_Dry_P Parameter: Organism Value: A. thaliana
  misc_feature: MA Experiment 20001560 PARAMETER Experiment Name: At_Drought_Soil_Dry_P Parameter: Plant Line Value: WS
  misc_feature: MA Experiment 20001560 PARAMETER Experiment Name: At_Drought_Soil_Dry_P Parameter: Post Timepoint (hr) Value: None
  misc_feature: MA Experiment 20001560 PARAMETER Experiment Name: At_Drought_Soil_Dry_P Parameter: Post-Treatment Value: None
  misc_feature: MA Experiment 20001560 PARAMETER Experiment Name: At_Drought_Soil_Dry_P Parameter: Timepoint (day) Value: 14
  misc_feature: MA Experiment 20001560 PARAMETER Experiment Name: At_Drought_Soil_Dry_P Parameter: Treatment Value: Drought vs. No Drought
  misc_feature: MA Experiment ID: 20001756 Result: Up-regulated in Transcription
  misc_feature: MA Experiment 20001756 PARAMETER Experiment Name: At_50mM_NH4NO3_L-to-H_P Parameter: Timepoint (hr) Value: 4
  misc_feature: MA Experiment 20001756 PARAMETER Experiment Name: At_50mM_NH4NO3_L-to-H_P Parameter: Tissue Value: Leaf
  misc_feature: MA Experiment 20001756 PARAMETER Experiment Name: At_50mM_NH4NO3_L-to-H_P Parameter: Treatment Value: 50mM NH4NO3 vs 100mM Mannitol
  misc_feature: MA Experiment ID: 20001757 Result: Up-regulated in Transcription
  misc_feature: MA Experiment 20001757 PARAMETER Experiment Name: At_50mM_NH4NO3_L-to-H_P Parameter: Timepoint (hr) Value: 6
  misc_feature: MA Experiment 20001757 PARAMETER Experiment Name: At_50mM_NH4NO3_L-to-H_P Parameter: Tissue Value: Leaf
  misc_feature: MA Experiment 20001757 PARAMETER Experiment Name: At_50mM_NH4NO3_L-to-H_P Parameter: Treatment Value: 50mM NH4NO3 vs 100mM Mannitol

SEQ ID NO: 32242 - protein, 320 aa, Arabidopsis thaliana; identical to SEQ ID NO: 28652
  peptide (1)..(320): Ceres Seq. ID no. 13497686
  misc_feature (78)..(310): Pfam Name: Fibrillarin Pfam Description: Fibrillarin
  misc_feature (1)..(315): Homolog of NCBI NO: 119856 NR Description: Fibrillarin
  misc_feature (1)..(315): Homolog of NCBI NO: 34855407 NR Description: similar to fibrillarin [Rattus norvegicus]
  misc_feature (7)..(313): Homolog of NCBI NO: 17647425 NR Description: Fibrillarin CG9888-PA [Drosophila melanogaster]
  misc_feature (1)..(315): Homolog of NCBI NO: 27924365 NR Description: Unknown (protein for IMAGE:5543421) [Xenopus
  misc_feature (7)..(313): Homolog of NCBI NO: 27374264 NR Description: Fib-PA [Drosophila erecta]
  misc_feature (7)..(315): Homolog of NCBI NO: 38566188 NR Description: Fibrillarin [Silurana tropicalis]
  misc_feature (1)..(316): Homolog of NCBI NO: 6003681 NR Description: fibrillarin homolog [Arabidopsis thaliana]
  misc_feature (1)..(315): Homolog of NCBI NO: 30696189 NR Description: fibrillarin 1 (Fib1) (SKIP7) [Arabidopsis
  misc_feature (1)..(320): Homolog of NCBI NO: 15028155 NR Description: putative fibrillarin 2 protein AtFib2
  misc_feature (1)..(320): Homolog of NCBI NO: 18416588 NR Description: fibrillarin 2 (AtFib2) [Arabidopsis thaliana]

SEQ ID NO: 32243 - protein, 247 aa, Arabidopsis thaliana; identical to SEQ ID NO: 28653
  peptide (1)..(247): Ceres Seq. ID no. 13497687
  misc_feature (5)..(237): Pfam Name: Fibrillarin Pfam Description: Fibrillarin
  misc_feature (1)..(242): Homolog of NCBI NO: 119856 NR Description: Fibrillarin
  misc_feature (1)..(242): Homolog of NCBI NO: 34855407 NR Description: similar to fibrillarin [Rattus norvegicus]
  misc_feature (1)..(240): Homolog of NCBI NO: 17647425 NR Description: Fibrillarin CG9888-PA [Drosophila melanogaster]
  misc_feature (1)..(242): Homolog of NCBI NO: 27924365 NR Description: Unknown (protein for IMAGE:5543421) [Xenopus
  misc_feature (1)..(240): Homolog of NCBI NO: 27374264 NR Description: Fib-PA [Drosophila erecta]
  misc_feature (1)..(242): Homolog of NCBI NO: 38566188 NR Description: Fibrillarin [Silurana tropicalis]
  misc_feature (1)..(243): Homolog of NCBI NO: 6003681 NR Description: fibrillarin homolog [Arabidopsis thaliana]
  misc_feature (1)..(242): Homolog of NCBI NO: 30696189 NR Description: fibrillarin 1 (Fib1) (SKIP7) [Arabidopsis
  misc_feature (1)..(247): Homolog of NCBI NO: 15028155 NR Description: putative fibrillarin 2 protein AtFib2
  misc_feature (1)..(247): Homolog of NCBI NO: 18416588 NR Description: fibrillarin 2 (AtFib2) [Arabidopsis thaliana]

SEQ ID NO: 32244 - DNA, 2388 bp, Arabidopsis thaliana; identical to SEQ ID NO: 28654
  misc_feature (1)..(2388): Ceres Seq. ID no. 12326046
  misc_feature: MA Experiment ID: 20000171 Result: Down-regulated in Transcription
  misc_feature: MA Experiment 20000171 PARAMETER Experiment Name: At_42deg_Heat_P Parameter: Age (day) Value: 14
  misc_feature: MA Experiment 20000171 PARAMETER Experiment Name: At_42deg_Heat_P Parameter: Organism Value: A. thaliana
  misc_feature: MA Experiment 20000171 PARAMETER Experiment Name: At_42deg_Heat_P Parameter: Plant Line Value: WS
  misc_feature: MA Experiment 20000171 PARAMETER Experiment Name: At_42deg_Heat_P Parameter: Temperature (deg C) Value: 42 vs. 22
  misc_feature: MA Experiment 20000171 PARAMETER Experiment Name: At_42deg_Heat_P Parameter: Timepoint (hr) Value: 1
  misc_feature: MA Experiment 20000171 PARAMETER Experiment Name: At_42deg_Heat_P Parameter: Tissue Value: Aerial
  misc_feature: MA Experiment ID: 20000173 Result: Down-regulated in Transcription
  misc_feature: MA Experiment 20000173 PARAMETER Experiment Name: At_42deg_Heat_P Parameter: Age (day) Value: 14
  misc_feature: MA Experiment 20000173 PARAMETER Experiment Name: At_42deg_Heat_P Parameter: Organism Value: A. thaliana
  misc_feature: MA Experiment 20000173 PARAMETER Experiment Name: At_42deg_Heat_P Parameter: Plant Line Value: WS
  misc_feature: MA Experiment 20000173 PARAMETER Experiment Name: At_42deg_Heat_P Parameter: Temperature (deg C) Value: 42 vs. 22
  misc_feature: MA Experiment 20000173 PARAMETER Experiment Name: At_42deg_Heat_P Parameter: Timepoint (hr) Value: 6
  misc_feature: MA Experiment 20000173 PARAMETER Experiment Name: At_42deg_Heat_P Parameter: Tissue Value: Aerial
  misc_feature: MA Experiment ID: 20000184 Result: Down-regulated in Transcription
  misc_feature: MA Experiment 20000184 PARAMETER Experiment Name: At_Shoots__P Parameter: Age (day) Value: 7
  misc_feature: MA Experiment 20000184 PARAMETER Experiment Name: At_Shoots__P Parameter: Tissue Value: Shoots vs. Whole Plant
  misc_feature: MA Experiment ID: 20000185 Result: Up-regulated in Transcription
  misc_feature: MA Experiment 20000185 PARAMETER Experiment Name: At_Roots__P Parameter: Age (day) Value: 7 vs. 21
  misc_feature: MA Experiment 20000185 PARAMETER Experiment Name: At_Roots__P Parameter: Organism Value: A. thaliana
  misc_feature: MA Experiment 20000185 PARAMETER Experiment Name: At_Roots__P Parameter: Tissue Value: Roots vs. Whole Plant
  misc_feature: MA Experiment ID: 20000234 Result: Up-regulated in Transcription
  misc_feature: MA Experiment 20000234 PARAMETER Experiment Name: At_Siliques_P Parameter: Age (day) Value: 21
  misc_feature: MA Experiment 20000234 PARAMETER Experiment Name: At_Siliques_P Parameter: Organism Value: A. thaliana
  misc_feature: MA Experiment 20000234 PARAMETER Experiment Name: At_Siliques_P Parameter: Plant Line Value: WS
  misc_feature: MA Experiment 20000234 PARAMETER Experiment Name: At_Siliques_P Parameter: Tissue Value: Less Than 5mm Siliques vs. Whole Plant
  misc_feature: MA Experiment ID: 20000264 Result: Up-regulated in Transcription
  misc_feature: MA Experiment 20000264 PARAMETER Experiment Name: At_Open_Flower_P Parameter: Age (day) Value: 21
  misc_feature: MA Experiment 20000264 PARAMETER Experiment Name: At_Open_Flower_P Parameter: Plant Line Value: WS
  misc_feature: MA Experiment 20000264 PARAMETER Experiment Name: At_Open_Flower_P Parameter: Tissue Value: Open Flower vs. Whole Plant
  misc_feature: MA Experiment ID: 20000265 Result: Up-regulated in Transcription
  misc_feature: MA Experiment 20000265 PARAMETER Experiment Name: At_Open_Flower_P Parameter: Age (day) Value: 21
  misc_feature: MA Experiment 20000265 PARAMETER Experiment Name: At_Open_Flower_P Parameter: Plant Line Value: WS
  misc_feature: MA Experiment 20000265 PARAMETER Experiment Name: At_Open_Flower_P Parameter: Tissue Value: Closed Flower vs. Whole Plant
  misc_feature: MA Experiment ID: 20000286 Result: Up-regulated in Transcription
  misc_feature: MA Experiment 20000286 PARAMETER Experiment Name: At_Open_Flower_P Parameter: Age (day) Value: 21
  misc_feature: MA Experiment 20000286 PARAMETER Experiment Name: At_Open_Flower_P Parameter: Plant Line Value: WS
  misc_feature: MA Experiment 20000286 PARAMETER Experiment Name: At_Open_Flower_P Parameter: Tissue Value: Half Open vs. Whole Plant
  misc_feature: MA Experiment ID: 20000439 Result: Up-regulated in Transcription
  misc_feature: MA Experiment 20000439 PARAMETER Experiment Name: At_Roots__P Parameter: Age (day) Value: 14 vs. 21
  misc_feature: MA Experiment 20000439 PARAMETER Experiment Name: At_Roots__P Parameter: Organism Value: A. thaliana
  misc_feature: MA Experiment 20000439 PARAMETER Experiment Name: At_Roots__P Parameter: Tissue Value: Roots vs. Whole Plant
  misc_feature: MA Experiment ID: 20001451 Result: Down-regulated in Transcription
  misc_feature: MA Experiment 20001451 PARAMETER Experiment Name: At_Far-red-induction_P Parameter: Age (day) Value: 7
  misc_feature: MA Experiment 20001451 PARAMETER Experiment Name: At_Far-red-induction_P Parameter: Light Value: Far-red vs. White
  misc_feature: MA Experiment 20001451 PARAMETER Experiment Name: At_Far-red-induction_P Parameter: Organism Value: A. thaliana
  misc_feature: MA Experiment 20001451 PARAMETER Experiment Name: At_Far-red-induction_P Parameter: Plant Line Value: Columbia
  misc_feature: MA Experiment 20001451 PARAMETER Experiment Name: At_Far-red-induction_P Parameter: Timepoint (hr) Value: 24
  misc_feature: MA Experiment 20001451 PARAMETER Experiment Name: At_Far-red-induction_P Parameter: Tissue Value: Whole Plant

SEQ ID NO: 32245 - protein, 733 aa, Arabidopsis thaliana; identical to SEQ ID NO: 28655
  peptide (1)..(733): Ceres Seq. ID no. 12326047
  misc_feature (154)..(430): Pfam Name: Ion transport protein Pfam Description: Ion transport protein
  misc_feature (56)..(733): Homolog of NCBI NO: 18378827 NR Description: cyclic nucleotide-regulated ion channel
  misc_feature (17)..(731): Homolog of NCBI NO: 15238657 NR Description: cyclic nucleotide-regulated ion channel (CNGC1)
  misc_feature (8)..(731): Homolog of NCBI NO: 38344883 NR Description: OSJNBa0033G05.7 [Oryza sativa (japonica
  misc_feature (61)..(680): Homolog of NCBI NO: 15219100 NR Description: cyclic nucleotide-regulated ion channel, putative
  misc_feature (37)..(680): Homolog of NCBI NO: 15223667 NR Description: cyclic nucleotide-regulated ion channel, putative
  misc_feature (10)..(680): Homolog of NCBI NO: 25513728 NR Description: probable cyclic nucleotide and
  misc_feature (14)..(730): Homolog of NCBI NO: 15242908 NR Description: cyclic nucleotide-regulated ion channel (CNGC5)
  misc_feature (14)..(730): Homolog of NCBI NO: 30696976 NR Description: cyclic nucleotide-regulated ion channel (CNGC5)
  misc_feature (27)..(276): Homolog of NCBI NO: 25412181 NR Description: hypothetical protein At2g23980 [imported] -
  misc_feature (281)..(731): Homolog of NCBI NO: 25412181 NR Description: hypothetical protein At2g23980 [imported] -

SEQ ID NO: 32246 - protein, 707 aa, Arabidopsis thaliana; identical to SEQ ID NO: 28656
  peptide (1)..(707): Ceres Seq. ID no. 12326048
  misc_feature (128)..(404): Pfam Name: Ion transport protein Pfam Description: Ion transport protein
  misc_feature (30)..(707): Homolog of NCBI NO: 18378827 NR Description: cyclic nucleotide-regulated ion channel
  misc_feature (1)..(705): Homolog of NCBI NO: 15238657 NR Description: cyclic nucleotide-regulated ion channel (CNGC1)
  misc_feature (1)..(705): Homolog of NCBI NO: 38344883 NR Description: OSJNBa0033G05.7 [Oryza sativa (japonica
  misc_feature (35)..(654): Homolog of NCBI NO: 15219100 NR Description: cyclic nucleotide-regulated ion channel, putative
  misc_feature (11)..(654): Homolog of NCBI NO: 15223667 NR Description: cyclic nucleotide-regulated ion channel, putative
  misc_feature (1)..(654): Homolog of NCBI NO: 25513728 NR Description: probable cyclic nucleotide and
  misc_feature (1)..(704): Homolog of NCBI NO: 15242908 NR Description: cyclic nucleotide-regulated ion channel (CNGC5)
  misc_feature (1)..(704): Homolog of NCBI NO: 30696976 NR Description: cyclic nucleotide-regulated ion channel (CNGC5)
  misc_feature (1)..(250): Homolog of NCBI NO: 25412181 NR Description: hypothetical protein At2g23980 [imported] -
  misc_feature (255)..(705): Homolog of NCBI NO: 25412181 NR Description: hypothetical protein At2g23980 [imported] -

SEQ ID NO: 32247 - protein, 564 aa, Arabidopsis thaliana; identical to SEQ ID NO: 28657
  peptide (1)..(564): Ceres Seq. ID no. 12326049
  misc_feature (1)..(261): Pfam Name: Ion transport protein Pfam Description: Ion transport protein
  misc_feature (1)..(564): Homolog of NCBI NO: 18378827 NR Description: cyclic nucleotide-regulated ion channel
  misc_feature (1)..(562): Homolog of NCBI NO: 15238657 NR Description: cyclic nucleotide-regulated ion channel (CNGC1)
  misc_feature (1)..(562): Homolog of NCBI NO: 38344883 NR Description: OSJNBa0033G05.7 [Oryza sativa (japonica
  misc_feature (1)..(511): Homolog of NCBI NO: 15219100 NR Description: cyclic nucleotide-regulated ion channel, putative
  misc_feature (1)..(511): Homolog of NCBI NO: 15223667 NR Description: cyclic nucleotide-regulated ion channel, putative
  misc_feature (1)..(511): Homolog of NCBI NO: 25513728 NR Description: probable cyclic nucleotide and
  misc_feature (1)..(561): Homolog of NCBI NO: 15242908 NR Description: cyclic nucleotide-regulated ion channel (CNGC5)
  misc_feature (1)..(561): Homolog of NCBI NO: 30696976 NR Description: cyclic nucleotide-regulated ion channel (CNGC5)
  misc_feature (1)..(107): Homolog of NCBI NO: 25412181 NR Description: hypothetical protein At2g23980 [imported] -
  misc_feature (112)..(562): Homolog of NCBI NO: 25412181 NR Description: hypothetical protein At2g23980 [imported] -

SEQ ID NO: 32248 - DNA, 1401 bp, Arabidopsis thaliana; identical to SEQ ID NO: 28658
  misc_feature (1)..(1401): Ceres Seq. ID no. 13500186
  misc_feature: MA Experiment ID: 20000307 Result: Down-regulated in Transcription
  misc_feature: MA Experiment 20000307 PARAMETER Experiment Name: At_Germinating_Seeds_Sub_P Parameter: Age (hr) Value: 24 vs. 0
  misc_feature: MA Experiment 20000307 PARAMETER Experiment Name: At_Germinating_Seeds_Sub_P Parameter: Organism Value: A. thaliana
  misc_feature: MA Experiment 20000307 PARAMETER Experiment Name: At_Germinating_Seeds_Sub_P Parameter: Plant Line Value: WS
  misc_feature: MA Experiment 20000307 PARAMETER Experiment Name: At_Germinating_Seeds_Sub_P Parameter: Tissue Value: Germinating Seeds
  misc_feature: MA Experiment ID: 20000315 Result: Down-regulated in Transcription
  misc_feature: MA Experiment 20000315 PARAMETER Experiment Name: At_14day_Shoots-Roots_Sub_P Parameter: Age (day) Value: 14
  misc_feature: MA Experiment 20000315 PARAMETER Experiment Name: At_14day_Shoots-Roots_Sub_P Parameter: Organism Value: A. thaliana
  misc_feature: MA Experiment 20000315 PARAMETER Experiment Name: At_14day_Shoots-Roots_Sub_P Parameter: Plant Line Value: WS
  misc_feature: MA Experiment 20000315 PARAMETER Experiment Name: At_14day_Shoots-Roots_Sub_P Parameter: Tissue Value: Shoots vs. Whole Plant
  misc_feature: MA Experiment ID: 20000348 Result: Up-regulated in Transcription
  misc_feature: MA Experiment 20000348 PARAMETER Experiment Name: At_100uM_ABA_Sub_P Parameter: Age (day) Value: 14
  misc_feature: MA Experiment 20000348 PARAMETER Experiment Name: At_100uM_ABA_Sub_P Parameter: Organism Value: A. thaliana
  misc_feature: MA Experiment 20000348 PARAMETER Experiment Name: At_100uM_ABA_Sub_P Parameter: Plant Line Value: WS
  misc_feature: MA Experiment 20000348 PARAMETER Experiment Name: At_100uM_ABA_Sub_P Parameter: Timepoint (hr) Value: 1
  misc_feature: MA Experiment 20000348 PARAMETER Experiment Name: At_100uM_ABA_Sub_P Parameter: Tissue Value: Aerial
  misc_feature: MA Experiment 20000348 PARAMETER Experiment Name: At_100uM_ABA_Sub_P Parameter: Treatment Value: 100uM ABA vs. No Treatment
  misc_feature: MA Experiment ID: 20000440 Result: Up-regulated in Transcription
  misc_feature: MA Experiment 20000440 PARAMETER Experiment Name: At_Closed-Flower__Sub_P Parameter: Tissue Value: Closed Flower vs. Whole Plant

SEQ ID NO: 32249 - protein, 350 aa, Arabidopsis thaliana; identical to SEQ ID NO: 28659
  peptide (1)..(350): Ceres Seq. ID no. 13500187
  misc_feature (5)..(338): Pfam Name: NAD dependent epimerase/dehydratase family Pfam Description: NAD dependent epimerase/dehydratase family
  misc_feature (1)..(62): Homolog of NCBI NO: 6633809 NR Description: F1N19.2 [Arabidopsis thaliana]
  misc_feature (234)..(348): Homolog of NCBI NO: 6633809 NR Description: F1N19.2 [Arabidopsis thaliana]
  misc_feature (62)..(235): Homolog of NCBI NO: 6633809 NR Description: F1N19.2 [Arabidopsis thaliana]
  misc_feature (2)..(349): Homolog of NCBI NO: 11386775 NR Description: UDP-glucose 4-epimerase GEPI48 (Galactowaldenase)
  misc_feature (1)..(348): Homolog of NCBI NO: 15217653 NR Description: UDP-glucose 4-epimerase (UDP-galactose
  misc_feature (1)..(346): Homolog of NCBI NO: 21553659 NR Description: UDP-galactose 4-epimerase-like protein
  misc_feature (1)..(349): Homolog of NCBI NO: 15236988 NR Description: UDP-glucose 4-epimerase (UDP-galactose
  misc_feature (1)..(349): Homolog of NCBI NO: 12643850 NR Description: Probable UDP-glucose 4-epimerase At4g10960
  misc_feature (1)..(350): Homolog of NCBI NO: 21536846 NR Description: UDPglucose 4-epimerase-like protein [Arabidopsis
  misc_feature (1)..(350): Homolog of NCBI NO: 15236663 NR Description: UDP-glucose 4-epimerase (UDP-galactose

SEQ ID NO: 32250 - protein, 235 aa, Arabidopsis thaliana; identical to SEQ ID NO: 28660
  peptide (1)..(235): Ceres Seq. ID no. 13500188
  misc_feature (1)..(223): Pfam Name: NAD dependent epimerase/dehydratase family Pfam Description: NAD dependent epimerase/dehydratase family
  misc_feature (1)..(231): Homolog of NCBI NO: 21715990 NR Description: UDP-glucose 4-epimerase [Oryza sativa (japonica
  misc_feature (119)..(233): Homolog of NCBI NO: 6633809 NR Description: F1N19.2 [Arabidopsis thaliana]
  misc_feature (1)..(120): Homolog of NCBI NO: 6633809 NR Description: F1N19.2 [Arabidopsis thaliana]
  misc_feature (1)..(234): Homolog of NCBI NO: 11386775 NR Description: UDP-glucose 4-epimerase GEPI48 (Galactowaldenase)
  misc_feature (1)..(233): Homolog of NCBI NO: 15217653 NR Description: UDP-glucose 4-epimerase (UDP-galactose
  misc_feature (1)..(231): Homolog of NCBI NO: 21553659 NR Description: UDP-galactose 4-epimerase-like protein
  misc_feature (1)..(234): Homolog of NCBI NO: 15236988 NR Description: UDP-glucose 4-epimerase (UDP-galactose
  misc_feature (1)..(234): Homolog of NCBI NO: 12643850 NR Description: Probable UDP-glucose 4-epimerase At4g10960
  misc_feature (1)..(235): Homolog of NCBI NO: 21536846 NR Description: UDPglucose 4-epimerase-like protein [Arabidopsis
  misc_feature (1)..(235): Homolog of NCBI NO: 15236663 NR Description: UDP-glucose 4-epimerase (UDP-galactose

SEQ ID NO: 32251 - DNA, 925 bp, Arabidopsis thaliana; identical to SEQ ID NO: 28661
  misc_feature (1)..(925): Ceres Seq. ID no. 12397142
  misc_feature: MA Experiment ID: 20000227 Result: Down-regulated in Transcription
  misc_feature: MA Experiment 20000227 PARAMETER Experiment Name: At_Root-Tips-vs-Tops_P Parameter: Tissue Value: Root Tips vs. Root Tops
  misc_feature: MA Experiment ID: 20000437 Result: Up-regulated in Transcription
  misc_feature: MA Experiment 20000437 PARAMETER Experiment Name: At_Drought_P Parameter: Age (day) Value: 8
  misc_feature: MA Experiment 20000437 PARAMETER Experiment Name: At_Drought_P Parameter: Organism Value: A. thaliana
  misc_feature: MA Experiment 20000437 PARAMETER Experiment Name: At_Drought_P Parameter: Plant Line Value: WS
  misc_feature: MA Experiment 20000437 PARAMETER Experiment Name: At_Drought_P Parameter: Timepoint (hr) Value: 24
  misc_feature: MA Experiment 20000437 PARAMETER Experiment Name: At_Drought_P Parameter: Tissue Value: Whole Plant
  misc_feature: MA Experiment 20000437 PARAMETER Experiment Name: At_Drought_P Parameter: Treatment Value: Drought vs. No Drought
  misc_feature: MA Experiment ID: 20000453 Result: Up-regulated in Transcription
  misc_feature: MA Experiment 20000453 PARAMETER Experiment Name: At_100uM_ABA_P Parameter: Age (day) Value: 15
  misc_feature: MA Experiment 20000453 PARAMETER Experiment Name: At_100uM_ABA_P Parameter: Organism Value: A. thaliana
  misc_feature: MA Experiment 20000453 PARAMETER Experiment Name: At_100uM_ABA_P Parameter: Plant Line Value: WS
  misc_feature: MA Experiment 20000453 PARAMETER Experiment Name: At_100uM_ABA_P Parameter: Timepoint (hr) Value: 24
  misc_feature: MA Experiment 20000453 PARAMETER Experiment Name: At_100uM_ABA_P Parameter: Tissue Value: Aerial
  misc_feature: MA Experiment 20000453 PARAMETER Experiment Name: At_100uM_ABA_P Parameter: Treatment Value: 100uM ABA vs. No Treatment
  misc_feature: MA Experiment ID: 20000794 Result: Up-regulated in Transcription
  misc_feature: MA Experiment 20000794 PARAMETER Experiment Name: At_Petals_P Parameter: Age (day) Value: 23-25 days
  misc_feature: MA Experiment 20000794 PARAMETER Experiment Name: At_Petals_P Parameter: Plant Line Value: WS
  misc_feature: MA Experiment 20000794 PARAMETER Experiment Name: At_Petals_P Parameter: Tissue Value: Petals vs. Whole plant
  misc_feature: MA Experiment ID: 20001558 Result: Down-regulated in Transcription
  misc_feature: MA Experiment 20001558 PARAMETER Experiment Name: At_Drought_Soil_Dry_P Parameter: Age (day) Value: 27
  misc_feature: MA Experiment 20001558 PARAMETER Experiment Name: At_Drought_Soil_Dry_P Parameter: Organism Value: A. thaliana
  misc_feature: MA Experiment 20001558 PARAMETER Experiment Name: At_Drought_Soil_Dry_P Parameter: Plant Line Value: WS
  misc_feature: MA Experiment 20001558 PARAMETER Experiment Name: At_Drought_Soil_Dry_P Parameter: Post Timepoint (hr) Value: 6
  misc_feature: MA Experiment 20001558 PARAMETER Experiment Name: At_Drought_Soil_Dry_P Parameter: Post-Treatment Value: Re-Water vs. No Drought
  misc_feature: MA Experiment 20001558 PARAMETER Experiment Name: At_Drought_Soil_Dry_P Parameter: Timepoint (day) Value: 13
  misc_feature: MA Experiment 20001558 PARAMETER Experiment Name: At_Drought_Soil_Dry_P Parameter: Treatment Value: Drought vs. No Drought

SEQ ID NO: 32252 - protein, 239 aa, Arabidopsis thaliana; identical to SEQ ID NO: 28662
  peptide (1)..(239): Ceres Seq. ID no. 12397143
  misc_feature (28)..(238): Pfam Name: Dienelactone hydrolase family Pfam Description: Dienelactone hydrolase family
  misc_feature (14)..(238): Homolog of NCBI NO: 40740730 NR Description: hypothetical protein AN3712.2 [Aspergillus
  misc_feature (20)..(238): Homolog of NCBI NO: 38181938 NR Description: Unknown (protein for MGC:76315) [Silurana
  misc_feature (69)..(239): Homolog of NCBI NO: 40253308 NR Description: Endo-1,3;1,4-beta-D-glucanase precursor-like
  misc_feature (5)..(194): Homolog of NCBI NO: 8928122 NR Description: Endo-1,3;1,4-beta-D-glucanase precursor
  misc_feature (6)..(239): Homolog of NCBI NO: 40253306 NR Description: putative Endo-1,3;1,4-beta-D-glucanase precursor
  misc_feature (5)..(239): Homolog of NCBI NO: 40253303 NR Description: putative Endo-1,3;1,4-beta-D-glucanase precursor
  misc_feature (9)..(239): Homolog of NCBI NO: 9294513 NR Description: contains similarity to
  misc_feature (1)..(239): Homolog of NCBI NO: 24899687 NR Description: Unknown protein [Arabidopsis thaliana]
  misc_feature (1)..(239): Homolog of NCBI NO: 18403812 NR Description: expressed protein
  misc_feature (1)..(239): Homolog of NCBI NO: 18403820 NR Description: expressed protein

SEQ ID NO: 32253 - DNA, 1392 bp, Arabidopsis thaliana; identical to SEQ ID NO: 28663
  misc_feature (1)..(1392): Ceres Seq. ID no. 13487454
  misc_feature: MA Experiment ID: 108434 Result: Down-regulated in Transcription
  misc_feature: MA Experiment 108434 PARAMETER Experiment Name: At_Root_Tips_cDNA_P Parameter: Tissue Value: Root Tips
  misc_feature: MA Experiment ID: 108488 Result: Down-regulated in Transcription
  misc_feature: MA Experiment ID: 108585 Result: Up-regulated in Transcription
  misc_feature: MA Experiment 108585 PARAMETER Experiment Name: At_5mM_NaNP_cDNA_P Parameter: Timepoint (hr) Value: 6
  misc_feature: MA Experiment 108585 PARAMETER Experiment Name: At_5mM_NaNP_cDNA_P Parameter: Tissue Value: Aerial
  misc_feature: MA Experiment 108585 PARAMETER Experiment Name: At_5mM_NaNP_cDNA_P Parameter: Treatment Value: null
  misc_feature: MA Experiment ID: 108668 Result: Up-regulated in Transcription
  misc_feature: MA Experiment 108668 PARAMETER Experiment Name: At_2mM_SA_cDNA_P Parameter: Plant Line Value: WS
  misc_feature: MA Experiment 108668 PARAMETER Experiment Name: At_2mM_SA_cDNA_P Parameter: Timepoint (hr) Value: 6
  misc_feature: MA Experiment 108668 PARAMETER Experiment Name: At_2mM_SA_cDNA_P Parameter: Treatment Value: 2mM SA vs. No Treatment
  misc_feature: MA Experiment ID: 20000112 Result: Up-regulated in Transcription
  misc_feature: MA Experiment 20000112 PARAMETER Experiment Name: At_42deg_Heat_cDNA_P Parameter: Temperature (deg C) Value: 42 vs. 22
  misc_feature: MA Experiment 20000112 PARAMETER Experiment Name: At_42deg_Heat_cDNA_P Parameter: Timepoint (hr) Value: 2
  misc_feature: MA Experiment 20000112 PARAMETER Experiment Name: At_42deg_Heat_cDNA_P Parameter: Tissue Value: Aerial
  misc_feature: MA Experiment ID: 20000144 Result: Up-regulated in Transcription
  misc_feature: MA Experiment 20000144 PARAMETER Experiment Name: At_42deg_Heat_cDNA_P Parameter: Temperature (deg C) Value: 42 vs. 22
  misc_feature: MA Experiment 20000144 PARAMETER Experiment Name: At_42deg_Heat_cDNA_P Parameter: Timepoint (hr) Value: 1
  misc_feature: MA Experiment 20000144 PARAMETER Experiment Name: At_42deg_Heat_cDNA_P Parameter: Tissue Value: Aerial
  misc_feature: MA Experiment ID: 20000180 Result: Down-regulated in Transcription
  misc_feature: MA Experiment 20000180 PARAMETER Experiment Name: At_Germinating_Seeds_P Parameter: Age (hr) Value: 24 vs. 0
  misc_feature: MA Experiment 20000180 PARAMETER Experiment Name: At_Germinating_Seeds_P Parameter: Tissue Value: Germinating Seeds
  misc_feature: MA Experiment ID: 20000182 Result: Up-regulated in Transcription
  misc_feature: MA Experiment 20000182 PARAMETER Experiment Name: At_2mM_SA_P Parameter: Age (day) Value: 14
  misc_feature: MA Experiment 20000182 PARAMETER Experiment Name: At_2mM_SA_P Parameter: Organism Value: A. thaliana
  misc_feature: MA Experiment 20000182 PARAMETER Experiment Name: At_2mM_SA_P Parameter: Plant Line Value: WS
  misc_feature: MA Experiment 20000182 PARAMETER Experiment Name: At_2mM_SA_P Parameter: Timepoint (hr) Value: 6
  misc_feature: MA Experiment 20000182 PARAMETER Experiment Name: At_2mM_SA_P Parameter: Tissue Value: Aerial
  misc_feature: MA Experiment 20000182 PARAMETER Experiment Name: At_2mM_SA_P Parameter: Treatment Value: 2mM SA vs. No Treatment
  misc_feature: MA Experiment ID: 20000184 Result: Down-regulated in Transcription
  misc_feature: MA Experiment 20000184 PARAMETER Experiment Name: At_Shoots__P Parameter: Age (day) Value: 7
  misc_feature: MA Experiment 20000184 PARAMETER Experiment Name: At_Shoots__P Parameter: Tissue Value: Shoots vs. Whole Plant
  misc_feature: MA Experiment ID: 20000794 Result: Up-regulated in Transcription
  misc_feature: MA Experiment 20000794 PARAMETER Experiment Name: At_Petals_P Parameter: Age (day) Value: 23-25 days
  misc_feature: MA Experiment 20000794 PARAMETER Experiment Name: At_Petals_P Parameter: Plant Line Value: WS
  misc_feature: MA Experiment 20000794 PARAMETER Experiment Name: At_Petals_P Parameter: Tissue Value: Petals vs. Whole plant
  misc_feature: MA Experiment ID: 20001560 Result: Down-regulated in Transcription
  misc_feature: MA Experiment 20001560 PARAMETER Experiment Name: At_Drought_Soil_Dry_P Parameter: Age (day) Value: 28
  misc_feature: MA Experiment 20001560 PARAMETER Experiment Name: At_Drought_Soil_Dry_P Parameter: Organism Value: A. thaliana
  misc_feature: MA Experiment 20001560 PARAMETER Experiment Name: At_Drought_Soil_Dry_P Parameter: Plant Line Value: WS
  misc_feature: MA Experiment 20001560 PARAMETER Experiment Name: At_Drought_Soil_Dry_P Parameter: Post Timepoint (hr) Value: None
  misc_feature: MA Experiment 20001560 PARAMETER Experiment Name: At_Drought_Soil_Dry_P Parameter: Post-Treatment Value: None
  misc_feature: MA Experiment 20001560 PARAMETER Experiment Name: At_Drought_Soil_Dry_P Parameter: Timepoint (day) Value: 14
  misc_feature: MA Experiment 20001560 PARAMETER Experiment Name: At_Drought_Soil_Dry_P Parameter: Treatment Value: Drought vs. No Drought
  misc_feature: MA Experiment ID: 20001911 Result: Up-regulated in Transcription
  misc_feature: MA Experiment 20001911 PARAMETER Experiment Name: At_Drought_Reproduction_P Parameter: Age (day) Value: 40
  misc_feature: MA Experiment 20001911 PARAMETER Experiment Name: At_Drought_Reproduction_P Parameter: Organism Value: A. thaliana
  misc_feature: MA Experiment 20001911 PARAMETER Experiment Name: At_Drought_Reproduction_P Parameter: Plant Line Value: WS
  misc_feature: MA Experiment 20001911 PARAMETER Experiment Name: At_Drought_Reproduction_P Parameter: Timepoint (day) Value: 10
  misc_feature: MA Experiment 20001911 PARAMETER Experiment Name: At_Drought_Reproduction_P Parameter: Tissue Value: Flowers
  misc_feature: MA Experiment 20001911 PARAMETER Experiment Name: At_Drought_Reproduction_P Parameter: Treatment Value: Drought vs. No Drought

SEQ ID NO: 32254 - protein, 320 aa, Arabidopsis thaliana; identical to SEQ ID NO: 28664
  peptide (1)..(320): Ceres Seq. ID no. 13487455
  misc_feature (96)..(232): Pfam Name: DedA family Pfam Description: DedA family
  misc_feature (233)..(289): Homolog of NCBI NO: 8778630 NR Description: F5O11.19 [Arabidopsis thaliana]
  misc_feature (32)..(161): Homolog of NCBI NO: 8778630 NR Description: F5O11.19 [Arabidopsis thaliana]
  misc_feature (148)..(289): Homolog of NCBI NO: 7486891 NR Description: hypothetical protein T12H17.240 - Arabidopsis
  misc_feature (24)..(289): Homolog of NCBI NO: 30685958 NR Description: expressed protein [Arabidopsis thaliana]
  misc_feature (10)..(286): Homolog of NCBI NO: 15234386 NR Description: expressed protein [Arabidopsis thaliana]
  misc_feature (32)..(289): Homolog of NCBI NO: 15221330 NR Description: expressed protein [Arabidopsis thaliana]
  misc_feature (55)..(320): Homolog of NCBI NO: 34913316 NR Description: P0519E12.36 [Oryza sativa (japonica
  misc_feature (161)..(320): Homolog of NCBI NO: 25410981 NR Description: hypothetical protein At2g02370 [imported] -
  misc_feature (8)..(289): Homolog of NCBI NO: 31249711 NR Description: hypothetical protein [Oryza sativa (japonica
  misc_feature (1)..(320): Homolog of NCBI NO: 18395356 NR Description: expressed protein [Arabidopsis thaliana]

SEQ ID NO: 32255 - protein, 302 aa, Arabidopsis thaliana; identical to SEQ ID NO: 28665
  peptide (1)..(302): Ceres Seq. ID no. 13487456
  misc_feature (78)..(214): Pfam Name: DedA family Pfam Description: DedA family
  misc_feature (215)..(271): Homolog of NCBI NO: 8778630 NR Description: F5O11.19 [Arabidopsis thaliana]
  misc_feature (14)..(143): Homolog of NCBI NO: 8778630 NR Description: F5O11.19 [Arabidopsis thaliana]
  misc_feature (130)..(271): Homolog of NCBI NO: 7486891 NR Description: hypothetical protein T12H17.240 - Arabidopsis
  misc_feature (6)..(271): Homolog of NCBI NO: 30685958 NR Description: expressed protein [Arabidopsis thaliana]
  misc_feature (1)..(268): Homolog of NCBI NO: 15234386 NR Description: expressed protein [Arabidopsis thaliana]
  misc_feature (14)..(271): Homolog of NCBI NO: 15221330 NR Description: expressed protein [Arabidopsis thaliana]
  misc_feature (37)..(302): Homolog of NCBI NO: 34913316 NR Description: P0519E12.36 [Oryza sativa (japonica
  misc_feature (143)..(302): Homolog of NCBI NO: 25410981 NR Description: hypothetical protein At2g02370 [imported] -
  misc_feature (1)..(271): Homolog of NCBI NO: 31249711 NR Description: hypothetical protein [Oryza sativa (japonica
  misc_feature (1)..(302): Homolog of NCBI NO: 18395356 NR Description: expressed protein [Arabidopsis thaliana]

SEQ ID NO: 32256 - protein, 268 aa, Arabidopsis thaliana; identical to SEQ ID NO: 28666
  peptide (1)..(268): Ceres Seq. ID no. 13487457
  misc_feature (44)..(180): Pfam Name: DedA family Pfam Description: DedA family
  misc_feature (181)..(237): Homolog of NCBI NO: 8778630 NR Description: F5O11.19 [Arabidopsis thaliana]
  misc_feature (1)..(109): Homolog of NCBI NO: 8778630 NR Description: F5O11.19 [Arabidopsis thaliana]
  misc_feature (96)..(237): Homolog of NCBI NO: 7486891 NR Description: hypothetical protein T12H17.240 - Arabidopsis
  misc_feature (1)..(237): Homolog of NCBI NO: 30685958 NR Description: expressed protein [Arabidopsis thaliana]
  misc_feature (1)..(234): Homolog of NCBI NO: 15234386 NR Description: expressed protein [Arabidopsis thaliana]
  misc_feature (1)..(237): Homolog of NCBI NO: 15221330 NR Description: expressed protein [Arabidopsis thaliana]
  misc_feature (3)..(268): Homolog of NCBI NO: 34913316 NR Description: P0519E12.36 [Oryza sativa (japonica
  misc_feature (109)..(268): Homolog of NCBI NO: 25410981 NR Description: hypothetical protein At2g02370 [imported] -
  misc_feature (1)..(237): Homolog of NCBI NO: 31249711 NR Description: hypothetical protein [Oryza sativa (japonica
  misc_feature (1)..(268): Homolog of NCBI NO: 18395356 NR Description: expressed protein [Arabidopsis thaliana]

SEQ ID NO: 32257 - DNA, 1012 bp, Arabidopsis thaliana; identical to SEQ ID NO: 28667
  misc_feature (1)..(1012): Ceres Seq. ID no. 12423264
  misc_feature: MA Experiment ID: 108434 Result: Up-regulated in Transcription
  misc_feature: MA Experiment 108434 PARAMETER Experiment Name: At_Root_Tips_cDNA_P Parameter: Tissue Value: Root Tips
  misc_feature: MA Experiment ID: 108462 Result: Down-regulated in Transcription
  misc_feature: MA Experiment 108462 PARAMETER Experiment Name: At_Germinating_Seeds_cDNA_P Parameter: Age (day) Value: 2 vs. 0
  misc_feature: MA Experiment 108462 PARAMETER Experiment Name: At_Germinating_Seeds_cDNA_P Parameter: Tissue Value: Germinating Seeds
  misc_feature: MA Experiment ID: 108463 Result: Down-regulated in Transcription
  misc_feature: MA Experiment 108463 PARAMETER Experiment Name: At_Germinating_Seeds_cDNA_P Parameter: Age (day) Value: 3 vs. 0
  misc_feature: MA Experiment 108463 PARAMETER Experiment Name: At_Germinating_Seeds_cDNA_P Parameter: Tissue Value: Germinating Seeds
  misc_feature: MA Experiment ID: 108464 Result: Down-regulated in Transcription
  misc_feature: MA Experiment 108464 PARAMETER Experiment Name: At_Germinating_Seeds_cDNA_P Parameter: Age (day) Value: 4 vs. 0
  misc_feature: MA Experiment 108464 PARAMETER Experiment Name: At_Germinating_Seeds_cDNA_P Parameter: Tissue Value: Germinating Seeds
  misc_feature: MA Experiment ID: 20000185 Result: Up-regulated in Transcription
  misc_feature: MA Experiment 20000185 PARAMETER Experiment Name: At_Roots__P Parameter: Age (day) Value: 7 vs. 21
  misc_feature: MA Experiment 20000185 PARAMETER Experiment Name: At_Roots__P Parameter: Organism Value: A. thaliana
  misc_feature: MA Experiment 20000185 PARAMETER Experiment Name: At_Roots__P Parameter: Tissue Value: Roots vs. Whole Plant
  misc_feature: MA Experiment ID: 20000234 Result: Up-regulated in Transcription
  misc_feature: MA Experiment 20000234 PARAMETER Experiment Name: At_Siliques_P Parameter: Age (day) Value: 21
  misc_feature: MA Experiment 20000234 PARAMETER Experiment Name: At_Siliques_P Parameter: Organism Value: A. thaliana
  misc_feature: MA Experiment 20000234 PARAMETER Experiment Name: At_Siliques_P Parameter: Plant Line Value: WS
  misc_feature: MA Experiment 20000234 PARAMETER Experiment Name: At_Siliques_P Parameter: Tissue Value: Less Than 5mm Siliques vs. Whole Plant
  misc_feature: MA Experiment ID: 20000235 Result: Up-regulated in Transcription
  misc_feature: MA Experiment 20000235 PARAMETER Experiment Name: At_Siliques_P Parameter: Age (day) Value: 21
  misc_feature: MA Experiment 20000235 PARAMETER Experiment Name: At_Siliques_P Parameter: Organism Value: A. thaliana
  misc_feature: MA Experiment 20000235 PARAMETER Experiment Name: At_Siliques_P Parameter: Plant Line Value: WS
  misc_feature: MA Experiment 20000235 PARAMETER Experiment Name: At_Siliques_P Parameter: Tissue Value: 5-10mm Siliques vs. Whole Plant
  misc_feature: MA Experiment ID: 20000265 Result: Up-regulated in Transcription
  misc_feature: MA Experiment 20000265 PARAMETER Experiment Name: At_Open_Flower_P Parameter: Age (day) Value: 21
  misc_feature: MA Experiment 20000265 PARAMETER Experiment Name: At_Open_Flower_P Parameter: Plant Line Value: WS
  misc_feature: MA Experiment 20000265 PARAMETER Experiment Name: At_Open_Flower_P Parameter: Tissue Value: Closed Flower vs. Whole Plant
  misc_feature: MA Experiment ID: 20000267 Result: Up-regulated in Transcription
  misc_feature: MA Experiment 20000267 PARAMETER Experiment Name: At_Drought_P Parameter: Age (day) Value: 7
  misc_feature: MA Experiment 20000267 PARAMETER Experiment Name: At_Drought_P Parameter: Organism Value: A. thaliana
  misc_feature: MA Experiment 20000267 PARAMETER Experiment Name: At_Drought_P Parameter: Plant Line Value: WS
  misc_feature: MA Experiment 20000267 PARAMETER Experiment Name: At_Drought_P Parameter: Timepoint (hr) Value: 6
  misc_feature: MA Experiment 20000267 PARAMETER Experiment Name: At_Drought_P Parameter: Tissue Value: Whole Plant
  misc_feature: MA Experiment 20000267 PARAMETER Experiment Name: At_Drought_P Parameter: Treatment Value: Drought vs. No Drought
  misc_feature: MA Experiment ID: 20000437 Result: Up-regulated in Transcription
  misc_feature: MA Experiment 20000437 PARAMETER Experiment Name: At_Drought_P Parameter: Age (day) Value: 8
  misc_feature: MA Experiment 20000437 PARAMETER Experiment Name: At_Drought_P Parameter: Organism Value: A. thaliana
  misc_feature: MA Experiment 20000437 PARAMETER Experiment Name: At_Drought_P Parameter: Plant Line Value: WS
  misc_feature: MA Experiment 20000437 PARAMETER Experiment Name: At_Drought_P Parameter: Timepoint (hr) Value: 24
  misc_feature: MA Experiment 20000437 PARAMETER Experiment Name: At_Drought_P Parameter: Tissue Value: Whole Plant
  misc_feature: MA Experiment 20000437 PARAMETER Experiment Name: At_Drought_P Parameter: Treatment Value: Drought vs. No Drought
  misc_feature: MA Experiment ID: 20000438 Result: Down-regulated in Transcription
  misc_feature: MA Experiment 20000438 PARAMETER Experiment Name: At_Shoots__P Parameter: Age (day) Value: 14
  misc_feature: MA Experiment 20000438 PARAMETER Experiment Name: At_Shoots__P Parameter: Tissue Value: Shoots vs. Whole Plant
  misc_feature: MA Experiment ID: 20000439 Result: Up-regulated in Transcription
  misc_feature: MA Experiment 20000439 PARAMETER Experiment Name: At_Roots__P Parameter: Age (day) Value: 14 vs. 21
  misc_feature: MA Experiment 20000439 PARAMETER Experiment Name: At_Roots__P Parameter: Organism Value: A. thaliana
  misc_feature: MA Experiment 20000439 PARAMETER Experiment Name: At_Roots__P Parameter: Tissue Value: Roots vs. Whole Plant
  misc_feature: MA Experiment ID: 20000441 Result: Down-regulated in Transcription
  misc_feature: MA Experiment 20000441 PARAMETER Experiment Name: At_1uM_BR-BRZ__P Parameter: Tissue Value: Shoot Apices
  misc_feature: MA Experiment 20000441 PARAMETER Experiment Name: At_1uM_BR-BRZ__P Parameter: Treatment Value: 1uM BR vs. No Treatment
  misc_feature: MA Experiment ID: 20000443 Result: Down-regulated in Transcription
  misc_feature: MA Experiment 20000443 PARAMETER Experiment Name: At_1uM_BR-BRZ__P Parameter: Tissue Value: Shoot Apices
  misc_feature: MA Experiment 20000443 PARAMETER Experiment Name: At_1uM_BR-BRZ__P Parameter: Treatment Value: 1uM BRZ vs. No Treatment

SEQ ID NO: 32258 - protein, 262 aa, Arabidopsis thaliana; identical to SEQ ID NO: 28668
  peptide (1)..(262): Ceres Seq. ID no. 12423265
  misc_feature (27)..(226): Pfam Name: GDSL-like Lipase/Acylhydrolase Pfam Description: GDSL-like Lipase/Acylhydrolase
  misc_feature (24)..(232): Homolog of NCBI NO: 18399151 NR Description: expressed protein
  misc_feature (24)..(232): Homolog of NCBI NO: 21554235 NR Description: CPRD49 [Arabidopsis thaliana]
  misc_feature (23)..(232): Homolog of NCBI NO: 13161403 NR Description: CPRD49 [Vigna unguiculata]
  misc_feature (26)..(255): Homolog of NCBI NO: 27754071 NR Description: hypothetical protein 4833421E05Rik; RIKEN cDNA
  misc_feature (26)..(255): Homolog of NCBI NO: 27478045 NR Description: hypothetical protein XP_209490 [Homo sapiens]
  misc_feature (22)..(259): Homolog of NCBI NO: 37535366 NR Description: putative esterase [Oryza sativa (japonica
  misc_feature (23)..(261): Homolog of NCBI NO: 15242002 NR Description: putative protein
  misc_feature (23)..(260): Homolog of NCBI NO: 34903948 NR Description: OSJNBa0038J17.19 [Oryza sativa (japonica
  misc_feature (23)..(262): Homolog of NCBI NO: 15242539 NR Description: putative protein; protein id: At5g45920.1
  misc_feature (22)..(262): Homolog of NCBI NO: 38454102 NR Description: At5g45920 [Arabidopsis thaliana]

SEQ ID NO: 32259 - protein, 241 aa, Arabidopsis thaliana; identical to SEQ ID NO: 28669
  peptide (1)..(241): Ceres Seq. ID no. 12423266
  misc_feature (6)..(205): Pfam Name: GDSL-like Lipase/Acylhydrolase Pfam Description: GDSL-like Lipase/Acylhydrolase
  misc_feature (3)..(211): Homolog of NCBI NO: 18399151 NR Description: expressed protein
  misc_feature (3)..(211): Homolog of NCBI NO: 21554235 NR Description: CPRD49 [Arabidopsis thaliana]
  misc_feature (2)..(211): Homolog of NCBI NO: 13161403 NR Description: CPRD49 [Vigna unguiculata]
  misc_feature (5)..(234): Homolog of NCBI NO: 27754071 NR Description: hypothetical protein 4833421E05Rik; RIKEN cDNA
  misc_feature (5)..(234): Homolog of NCBI NO: 27478045 NR Description: hypothetical protein XP_209490 [Homo sapiens]
  misc_feature (1)..(238): Homolog of NCBI NO: 37535366 NR Description: putative esterase [Oryza sativa (japonica
  misc_feature (2)..(240): Homolog of NCBI NO: 15242002 NR Description: putative protein
  misc_feature (2)..(239): Homolog of NCBI NO: 34903948 NR Description: OSJNBa0038J17.19 [Oryza sativa (japonica
  misc_feature (2)..(241): Homolog of NCBI NO: 15242539 NR Description: putative protein; protein id: At5g45920.1
  misc_feature (1)..(241): Homolog of NCBI NO: 38454102 NR Description: At5g45920 [Arabidopsis thaliana]

SEQ ID NO: 32260 - protein, 240 aa, Arabidopsis thaliana; identical to SEQ ID NO: 28670
  peptide (1)..(240): Ceres Seq. ID no. 12423267
  misc_feature (5)..(204): Pfam Name: GDSL-like Lipase/Acylhydrolase Pfam Description: GDSL-like Lipase/Acylhydrolase
  misc_feature (2)..(210): Homolog of NCBI NO: 18399151 NR Description: expressed protein
  misc_feature (2)..(210): Homolog of NCBI NO: 21554235 NR Description: CPRD49 [Arabidopsis thaliana]
  misc_feature (1)..(210): Homolog of NCBI NO: 13161403 NR Description: CPRD49 [Vigna unguiculata]
  misc_feature (4)..(233): Homolog of NCBI NO: 27754071 NR Description: hypothetical protein 4833421E05Rik; RIKEN cDNA
  misc_feature (4)..(233): Homolog of NCBI NO: 27478045 NR Description: hypothetical protein XP_209490 [Homo sapiens]
  misc_feature (1)..(237): Homolog of NCBI NO: 37535366 NR Description: putative esterase [Oryza sativa (japonica
  misc_feature (1)..(239): Homolog of NCBI NO: 15242002 NR Description: putative protein
  misc_feature (1)..(238): Homolog of NCBI NO: 34903948 NR Description: OSJNBa0038J17.19 [Oryza sativa (japonica
  misc_feature (1)..(240): Homolog of NCBI NO: 15242539 NR Description: putative protein; protein id: At5g45920.1
  misc_feature (1)..(240): Homolog of NCBI NO: 38454102 NR Description: At5g45920 [Arabidopsis thaliana]

SEQ ID NO: 32261 - DNA, 606 bp, Arabidopsis thaliana; identical to SEQ ID NO: 28671
  misc_feature (1)..(606): Ceres Seq. ID no. 12421141
  misc_feature: MA Experiment ID: 108435 Result: Down-regulated in Transcription
  misc_feature: MA Experiment 108435 PARAMETER Experiment Name: At_stm_Mutants_cDNA_P Parameter: Plant Line Value: wt Landsburg vs stm
  misc_feature: MA Experiment 108435 PARAMETER Experiment Name: At_stm_Mutants_cDNA_P Parameter: Tissue Value: Shoot Apical Meristem Region
  misc_feature: MA Experiment ID: 108462 Result: Up-regulated in Transcription
  misc_feature: MA Experiment 108462 PARAMETER Experiment Name: At_Germinating_Seeds_cDNA_P Parameter: Age (day) Value: 2 vs. 0
  misc_feature: MA Experiment 108462 PARAMETER Experiment Name: At_Germinating_Seeds_cDNA_P Parameter: Tissue Value: Germinating Seeds
  misc_feature: MA Experiment ID: 108464 Result: Up-regulated in Transcription
  misc_feature: MA Experiment 108464 PARAMETER Experiment Name: At_Germinating_Seeds_cDNA_P Parameter: Age (day) Value: 4 vs. 0
  misc_feature: MA Experiment 108464 PARAMETER Experiment Name: At_Germinating_Seeds_cDNA_P Parameter: Tissue Value: Germinating Seeds
  misc_feature: MA Experiment ID: 108668 Result: Up-regulated in Transcription
  misc_feature: MA Experiment 108668 PARAMETER Experiment Name: At_2mM_SA_cDNA_P Parameter: Plant Line Value: WS
  misc_feature: MA Experiment 108668 PARAMETER Experiment Name: At_2mM_SA_cDNA_P Parameter: Timepoint (hr) Value: 6
  misc_feature: MA Experiment 108668 PARAMETER Experiment Name: At_2mM_SA_cDNA_P Parameter: Treatment Value: 2mM SA vs. No Treatment
  misc_feature: MA Experiment ID: 20000113 Result: Down-regulated in Transcription
  misc_feature: MA Experiment 20000113 PARAMETER Experiment Name: At_42deg_Heat_cDNA_P Parameter: Temperature (deg C) Value: 42 vs. 22
  misc_feature: MA Experiment 20000113 PARAMETER Experiment Name: At_42deg_Heat_cDNA_P Parameter: Timepoint (hr) Value: 8
  misc_feature: MA Experiment 20000113 PARAMETER Experiment Name: At_42deg_Heat_cDNA_P Parameter: Tissue Value: Aerial
  misc_feature: MA Experiment ID: 20000180 Result: Up-regulated in Transcription
  misc_feature: MA Experiment 20000180 PARAMETER Experiment Name: At_Germinating_Seeds_P Parameter: Age (hr) Value: 24 vs. 0
  misc_feature: MA Experiment 20000180 PARAMETER Experiment Name: At_Germinating_Seeds_P Parameter: Tissue Value: Germinating Seeds
  misc_feature: MA Experiment ID: 20001248 Result: Down-regulated in Transcription
  misc_feature: MA Experiment 20001248 PARAMETER Experiment Name: At_Far-red-induction_P Parameter: Age (day) Value: 7
  misc_feature: MA Experiment 20001248 PARAMETER Experiment Name: At_Far-red-induction_P Parameter: Light Value: Far-red vs. White
  misc_feature: MA Experiment 20001248 PARAMETER Experiment Name: At_Far-red-induction_P Parameter: Organism Value: A. thaliana
  misc_feature: MA Experiment 20001248 PARAMETER Experiment Name: At_Far-red-induction_P Parameter: Plant Line Value: Columbia
  misc_feature: MA Experiment 20001248 PARAMETER Experiment Name: At_Far-red-induction_P Parameter: Timepoint (hr) Value: 4
  misc_feature: MA Experiment 20001248 PARAMETER Experiment Name: At_Far-red-induction_P Parameter: Tissue Value: Whole Plant
  misc_feature: MA Experiment ID: 20001557 Result: Down-regulated in Transcription
  misc_feature: MA Experiment 20001557 PARAMETER Experiment Name: At_Drought_Soil_Dry_P Parameter: Age (day) Value: 27
  misc_feature: MA Experiment 20001557 PARAMETER Experiment Name: At_Drought_Soil_Dry_P Parameter: Organism Value: A. thaliana
  misc_feature: MA Experiment 20001557 PARAMETER Experiment Name: At_Drought_Soil_Dry_P Parameter: Plant Line Value: WS
  misc_feature: MA Experiment 20001557 PARAMETER Experiment Name: At_Drought_Soil_Dry_P Parameter: Post Timepoint (hr) Value: 3
  misc_feature: MA Experiment 20001557 PARAMETER Experiment Name: At_Drought_Soil_Dry_P Parameter: Post-Treatment Value: Re-Water vs. No Drought
  misc_feature: MA Experiment 20001557 PARAMETER Experiment Name: At_Drought_Soil_Dry_P Parameter: Timepoint (day) Value: 13
  misc_feature: MA Experiment 20001557 PARAMETER Experiment Name: At_Drought_Soil_Dry_P Parameter: Treatment Value: Drought vs. No Drought
  misc_feature: MA Experiment ID: 20001558 Result: Down-regulated in Transcription
  misc_feature: MA Experiment 20001558 PARAMETER Experiment Name: At_Drought_Soil_Dry_P Parameter: Age (day) Value: 27
  misc_feature: MA Experiment 20001558 PARAMETER Experiment Name: At_Drought_Soil_Dry_P Parameter: Organism Value: A. thaliana
  misc_feature: MA Experiment 20001558 PARAMETER Experiment Name: At_Drought_Soil_Dry_P Parameter: Plant Line Value: WS
  misc_feature: MA Experiment 20001558 PARAMETER Experiment Name: At_Drought_Soil_Dry_P Parameter: Post Timepoint (hr) Value: 6
  misc_feature: MA Experiment 20001558 PARAMETER Experiment Name: At_Drought_Soil_Dry_P Parameter: Post-Treatment Value: Re-Water vs. No Drought
  misc_feature: MA Experiment 20001558 PARAMETER Experiment Name: At_Drought_Soil_Dry_P Parameter: Timepoint (day) Value: 13
  misc_feature: MA Experiment 20001558 PARAMETER Experiment Name: At_Drought_Soil_Dry_P Parameter: Treatment Value: Drought vs. No Drought

SEQ ID NO: 32262 - protein, 152 aa, Arabidopsis thaliana; identical to SEQ ID NO: 28672
  peptide (1)..(152): Ceres Seq. ID no. 12421142
  misc_feature (23)..(143): Pfam Name: ML domain Pfam Description: ML domain
  misc_feature (29)..(137): Homolog of NCBI NO: 4322563 NR Description: phosphatidylglycerol/phosphatidylinositol
  misc_feature (1)..(147): Homolog of NCBI NO: 22330033 NR Description: unknown protein; protein id: At1g45015.1
  misc_feature (1)..(144): Homolog of NCBI NO: 18397991 NR Description: Expressed protein
  misc_feature (1)..(144): Homolog of NCBI NO: 21618166 NR Description: unknown [Arabidopsis thaliana]
  misc_feature (1)..(143): Homolog of NCBI NO: 34899866 NR Description: OJ1714_H10.15 [Oryza sativa (japonica
  misc_feature (6)..(149): Homolog of NCBI NO: 21593850 NR Description: unknown [Arabidopsis thaliana]
  misc_feature (6)..(149): Homolog of NCBI NO: 15240063 NR Description: putative protein
  misc_feature (12)..(149): Homolog of NCBI NO: 21554315 NR Description: unknown [Arabidopsis thaliana]
  misc_feature (12)..(149): Homolog of NCBI NO: 18399355 NR Description: expressed protein
  misc_feature (1)..(152): Homolog of NCBI NO: 15229872 NR Description: putative protein

SEQ ID NO: 32263 - DNA, 1061 bp, Arabidopsis thaliana; identical to SEQ ID NO: 28673
  misc_feature (1)..(1061): Ceres Seq. ID no. 13580294
  misc_feature: MA Experiment ID: 108433 Result: Up-regulated in Transcription
  misc_feature: MA Experiment 108433 PARAMETER Experiment Name: At_rhl_Mutant2_cDNA_P Parameter: Age (day) Value: 7
  misc_feature: MA Experiment 108433 PARAMETER Experiment Name: At_rhl_Mutant2_cDNA_P Parameter: Organism Value: A. thaliana
  misc_feature: MA Experiment 108433 PARAMETER Experiment Name: At_rhl_Mutant2_cDNA_P Parameter: Plant Line Value: rhl Mutant vs. wt landsburg
  misc_feature: MA Experiment 108433 PARAMETER Experiment Name: At_rhl_Mutant2_cDNA_P Parameter: Tissue Value: Roots
  misc_feature: MA Experiment ID: 108501 Result: Up-regulated in Transcription
  misc_feature: MA Experiment 108501 PARAMETER Experiment Name: At_ap2_floral_buds_cDNA_P Parameter: Plant Line Value: ap2 (Ler.)
  misc_feature: MA Experiment 108501 PARAMETER Experiment Name: At_ap2_floral_buds_cDNA_P Parameter: Tissue Value: Closed Flower
  misc_feature: MA Experiment ID: 108572 Result: Up-regulated in Transcription
  misc_feature: MA Experiment 108572 PARAMETER Experiment Name: At_Drought_cDNA_P Parameter: Timepoint (hr) Value: 1
  misc_feature: MA Experiment 108572 PARAMETER Experiment Name: At_Drought_cDNA_P Parameter: Tissue Value: Aerial
  misc_feature: MA Experiment 108572 PARAMETER Experiment Name: At_Drought_cDNA_P Parameter: Treatment Value: Drought vs. No Drought
  misc_feature: MA Experiment ID: 108576 Result: Down-regulated in Transcription
  misc_feature: MA Experiment 108576 PARAMETER Experiment Name: At_42deg_Heat_cDNA_P Parameter: Temperature (deg C) Value: 42 vs. 22
  misc_feature: MA Experiment 108576 PARAMETER Experiment Name: At_42deg_Heat_cDNA_P Parameter: Timepoint (hr) Value: 1
  misc_feature: MA Experiment 108576 PARAMETER Experiment Name: At_42deg_Heat_cDNA_P Parameter: Tissue Value: Aerial
  misc_feature: MA Experiment ID: 108608 Result: Up-regulated in Transcription
  misc_feature: MA Experiment 108608 PARAMETER Experiment Name: At_100uM_ABA_cDNA_P Parameter: Timepoint (hr) Value: 1
  misc_feature: MA Experiment 108608 PARAMETER Experiment Name: At_100uM_ABA_cDNA_P Parameter: Tissue Value: Aerial
  misc_feature: MA Experiment 108608 PARAMETER Experiment Name: At_100uM_ABA_cDNA_P Parameter: Treatment Value: 100uM ABA vs. No Treatment
  misc_feature: MA Experiment ID: 20000071 Result: Up-regulated in Transcription
  misc_feature: MA Experiment 20000071 PARAMETER Experiment Name: At_100uM_ABA_Mutants_cDNA_P Parameter: Plant Line Value: CS8104
  misc_feature: MA Experiment 20000071 PARAMETER Experiment Name: At_100uM_ABA_Mutants_cDNA_P Parameter: Timepoint (hr) Value: 6
  misc_feature: MA Experiment 20000071 PARAMETER Experiment Name: At_100uM_ABA_Mutants_cDNA_P Parameter: Tissue Value: Aerial
  misc_feature: MA Experiment 20000071 PARAMETER Experiment Name: At_100uM_ABA_Mutants_cDNA_P Parameter: Treatment Value: 100uM ABA vs. No Treatment
  misc_feature: MA Experiment ID: 20000111 Result: Down-regulated in Transcription
  misc_feature: MA Experiment 20000111 PARAMETER Experiment Name: At_42deg_Heat_cDNA_P Parameter: Temperature (deg C) Value: 42 vs. 22
  misc_feature: MA Experiment 20000111 PARAMETER Experiment Name: At_42deg_Heat_cDNA_P Parameter: Timepoint (hr) Value: 6
  misc_feature: MA Experiment 20000111 PARAMETER Experiment Name: At_42deg_Heat_cDNA_P Parameter: Tissue Value: Aerial
  misc_feature: MA Experiment ID: 20000112 Result: Down-regulated in Transcription
  misc_feature: MA Experiment 20000112 PARAMETER Experiment Name: At_42deg_Heat_cDNA_P Parameter: Temperature (deg C) Value: 42 vs. 22
  misc_feature: MA Experiment 20000112 PARAMETER Experiment Name: At_42deg_Heat_cDNA_P Parameter: Timepoint (hr) Value: 2
  misc_feature: MA Experiment 20000112 PARAMETER Experiment Name: At_42deg_Heat_cDNA_P Parameter: Tissue Value: Aerial
  misc_feature: MA Experiment ID: 20000144 Result: Down-regulated in Transcription
  misc_feature: MA Experiment 20000144 PARAMETER Experiment Name: At_42deg_Heat_cDNA_P Parameter: Temperature (deg C) Value: 42 vs. 22
  misc_feature: MA Experiment 20000144 PARAMETER Experiment Name: At_42deg_Heat_cDNA_P Parameter: Timepoint (hr) Value: 1
  misc_feature: MA Experiment 20000144 PARAMETER Experiment Name: At_42deg_Heat_cDNA_P Parameter: Tissue Value: Aerial
  misc_feature: MA Experiment ID: 20000166 Result: Up-regulated in Transcription
  misc_feature: MA Experiment 20000166 PARAMETER Experiment Name: At_100uM_ABA_P Parameter: Age (day) Value: 14
  misc_feature: MA Experiment 20000166 PARAMETER Experiment Name: At_100uM_ABA_P Parameter: Organism Value: A. thaliana
  misc_feature: MA Experiment 20000166 PARAMETER Experiment Name: At_100uM_ABA_P Parameter: Plant Line Value: WS
  misc_feature: MA Experiment 20000166 PARAMETER Experiment Name: At_100uM_ABA_P Parameter: Timepoint (hr) Value: 1
  misc_feature: MA Experiment 20000166 PARAMETER Experiment Name: At_100uM_ABA_P Parameter: Tissue Value: Aerial
  misc_feature: MA Experiment 20000166 PARAMETER Experiment Name: At_100uM_ABA_P Parameter: Treatment Value: 100uM ABA vs. No Treatment
  misc_feature: MA Experiment ID: 20000171 Result: Down-regulated in Transcription
  misc_feature: MA Experiment 20000171 PARAMETER Experiment Name: At_42deg_Heat_P Parameter: Age (day) Value: 14
  misc_feature: MA Experiment 20000171 PARAMETER Experiment Name: At_42deg_Heat_P Parameter: Organism Value: A. thaliana
  misc_feature: MA Experiment 20000171 PARAMETER Experiment Name: At_42deg_Heat_P Parameter: Plant Line Value: WS
  misc_feature: MA Experiment 20000171 PARAMETER Experiment Name: At_42deg_Heat_P Parameter: Temperature (deg C) Value: 42 vs. 22
  misc_feature: MA Experiment 20000171 PARAMETER Experiment Name: At_42deg_Heat_P Parameter: Timepoint (hr) Value: 1
  misc_feature: MA Experiment 20000171 PARAMETER Experiment Name: At_42deg_Heat_P Parameter: Tissue Value: Aerial
  misc_feature: MA Experiment ID: 20000173 Result: Down-regulated in Transcription
  misc_feature: MA Experiment 20000173 PARAMETER Experiment Name: At_42deg_Heat_P Parameter: Age (day) Value: 14
  misc_feature: MA Experiment 20000173 PARAMETER Experiment Name: At_42deg_Heat_P Parameter: Organism Value: A. thaliana
  misc_feature: MA Experiment 20000173 PARAMETER Experiment Name: At_42deg_Heat_P Parameter: Plant Line Value: WS
  misc_feature: MA Experiment 20000173 PARAMETER Experiment Name: At_42deg_Heat_P Parameter: Temperature (deg C) Value: 42 vs. 22
  misc_feature: MA Experiment 20000173 PARAMETER Experiment Name: At_42deg_Heat_P Parameter: Timepoint (hr) Value: 6
  misc_feature: MA Experiment 20000173 PARAMETER Experiment Name: At_42deg_Heat_P Parameter: Tissue Value: Aerial
  misc_feature: MA Experiment ID: 20000185 Result: Up-regulated in Transcription
  misc_feature: MA Experiment 20000185 PARAMETER Experiment Name: At_Roots__P Parameter: Age (day) Value: 7 vs. 21
  misc_feature: MA Experiment 20000185 PARAMETER Experiment Name: At_Roots__P Parameter: Organism Value: A. thaliana
  misc_feature: MA Experiment 20000185 PARAMETER Experiment Name: At_Roots__P Parameter: Tissue Value: Roots vs. Whole Plant
  misc_feature: MA Experiment ID: 20000224 Result: Down-regulated in Transcription
  misc_feature: MA Experiment ID: 20000439 Result: Up-regulated in Transcription
  misc_feature: MA Experiment 20000439 PARAMETER Experiment Name: At_Roots__P Parameter: Age (day) Value: 14 vs. 21
  misc_feature: MA Experiment 20000439 PARAMETER Experiment Name: At_Roots__P Parameter: Organism Value: A. thaliana
  misc_feature: MA Experiment 20000439 PARAMETER Experiment Name: At_Roots__P Parameter: Tissue Value: Roots vs. Whole Plant
  misc_feature: MA Experiment ID: 20000451 Result: Down-regulated in Transcription
  misc_feature: MA Experiment 20000451 PARAMETER Experiment Name: At_CS6879_Shoots-Roots_P Parameter: Age (day) Value: 14
  misc_feature: MA Experiment 20000451 PARAMETER Experiment Name: At_CS6879_Shoots-Roots_P Parameter: Organism Value: A. thaliana
  misc_feature: MA Experiment 20000451 PARAMETER Experiment Name: At_CS6879_Shoots-Roots_P Parameter: Plant Line Value: CS6879 vs. WS
  misc_feature: MA Experiment 20000451 PARAMETER Experiment Name: At_CS6879_Shoots-Roots_P Parameter: Tissue Value: Roots
  misc_feature: MA Experiment ID: 20000496 Result: Down-regulated in Transcription
  misc_feature: MA Experiment 20000496 PARAMETER Experiment Name: At_Guard_Cells_P Parameter: Harvest Date Value: 7/19/2002
  misc_feature: MA Experiment 20000496 PARAMETER Experiment Name: At_Guard_Cells_P Parameter: Organism Value: Canola
  misc_feature: MA Experiment 20000496 PARAMETER Experiment Name: At_Guard_Cells_P Parameter: Tissue Value: Guard Cells vs. Leaves
  misc_feature: MA Experiment ID: 20001557 Result: Down-regulated in Transcription
  misc_feature: MA Experiment 20001557 PARAMETER Experiment Name: At_Drought_Soil_Dry_P Parameter: Age (day) Value: 27
  misc_feature: MA Experiment 20001557 PARAMETER Experiment Name: At_Drought_Soil_Dry_P Parameter: Organism Value: A. thaliana
  misc_feature: MA Experiment 20001557 PARAMETER Experiment Name: At_Drought_Soil_Dry_P Parameter: Plant Line Value: WS
  misc_feature: MA Experiment 20001557 PARAMETER Experiment Name: At_Drought_Soil_Dry_P Parameter: Post Timepoint (hr) Value: 3
  misc_feature: MA Experiment 20001557 PARAMETER Experiment Name: At_Drought_Soil_Dry_P Parameter: Post-Treatment Value: Re-Water vs. No Drought
  misc_feature: MA Experiment 20001557 PARAMETER Experiment Name: At_Drought_Soil_Dry_P Parameter: Timepoint (day) Value: 13
  misc_feature: MA Experiment 20001557 PARAMETER Experiment Name: At_Drought_Soil_Dry_P Parameter: Treatment Value: Drought vs. No Drought
  misc_feature: MA Experiment ID: 20001558 Result: Down-regulated in Transcription
  misc_feature: MA Experiment 20001558 PARAMETER Experiment Name: At_Drought_Soil_Dry_P Parameter: Age (day) Value: 27
  misc_feature: MA Experiment 20001558 PARAMETER Experiment Name: At_Drought_Soil_Dry_P Parameter: Organism Value: A. thaliana
  misc_feature: MA Experiment 20001558 PARAMETER Experiment Name: At_Drought_Soil_Dry_P Parameter: Plant Line Value: WS
  misc_feature: MA Experiment 20001558 PARAMETER Experiment Name: At_Drought_Soil_Dry_P Parameter: Post Timepoint (hr) Value: 6
  misc_feature: MA Experiment 20001558 PARAMETER Experiment Name: At_Drought_Soil_Dry_P Parameter: Post-Treatment Value: Re-Water vs. No Drought
  misc_feature: MA Experiment 20001558 PARAMETER Experiment Name: At_Drought_Soil_Dry_P Parameter: Timepoint (day) Value: 13
  misc_feature: MA Experiment 20001558 PARAMETER Experiment Name: At_Drought_Soil_Dry_P Parameter: Treatment Value: Drought vs. No Drought
  misc_feature: MA Experiment ID: 20001560 Result: Down-regulated in Transcription
  misc_feature: MA Experiment 20001560 PARAMETER Experiment Name: At_Drought_Soil_Dry_P Parameter: Age (day) Value: 28
  misc_feature: MA Experiment 20001560 PARAMETER Experiment Name: At_Drought_Soil_Dry_P Parameter: Organism Value: A. thaliana
  misc_feature: MA Experiment 20001560 PARAMETER Experiment Name: At_Drought_Soil_Dry_P Parameter: Plant Line Value: WS
  misc_feature: MA Experiment 20001560 PARAMETER Experiment Name: At_Drought_Soil_Dry_P Parameter: Post Timepoint (hr) Value: None
  misc_feature: MA Experiment 20001560 PARAMETER Experiment Name: At_Drought_Soil_Dry_P Parameter: Post-Treatment Value: None
  misc_feature: MA Experiment 20001560 PARAMETER Experiment Name: At_Drought_Soil_Dry_P Parameter: Timepoint (day) Value: 14
  misc_feature: MA Experiment 20001560 PARAMETER Experiment Name: At_Drought_Soil_Dry_P Parameter: Treatment Value: Drought vs. No Drought
  misc_feature: MA Experiment ID: 20001905 Result: Down-regulated in Transcription
  misc_feature: MA Experiment 20001905 PARAMETER Experiment Name: At_Drought_Reproduction_P Parameter: Age (day) Value: 40
  misc_feature: MA Experiment 20001905 PARAMETER Experiment Name: At_Drought_Reproduction_P Parameter: Organism Value: A. thaliana
  misc_feature: MA Experiment 20001905 PARAMETER Experiment Name: At_Drought_Reproduction_P Parameter: Plant Line Value: WS
  misc_feature: MA Experiment 20001905 PARAMETER Experiment Name: At_Drought_Reproduction_P Parameter: Timepoint (day) Value: 10
  misc_feature: MA Experiment 20001905 PARAMETER Experiment Name: At_Drought_Reproduction_P Parameter: Tissue Value: Rosettes
  misc_feature: MA Experiment 20001905 PARAMETER Experiment Name: At_Drought_Reproduction_P Parameter: Treatment Value: Drought vs. No Drought
  misc_feature: MA Experiment ID: 20001911 Result: Down-regulated in Transcription
  misc_feature: MA Experiment 20001911 PARAMETER Experiment Name: At_Drought_Reproduction_P Parameter: Age (day) Value: 40
  misc_feature: MA Experiment 20001911 PARAMETER Experiment Name: At_Drought_Reproduction_P Parameter: Organism Value: A. thaliana
  misc_feature: MA Experiment 20001911 PARAMETER Experiment Name: At_Drought_Reproduction_P Parameter: Plant Line Value: WS
  misc_feature: MA Experiment 20001911 PARAMETER Experiment Name: At_Drought_Reproduction_P Parameter: Timepoint (day) Value: 10
  misc_feature: MA Experiment 20001911 PARAMETER Experiment Name: At_Drought_Reproduction_P Parameter: Tissue Value: Flowers
  misc_feature: MA Experiment 20001911 PARAMETER Experiment Name: At_Drought_Reproduction_P Parameter: Treatment Value: Drought vs. No Drought

SEQ ID NO: 32264 - protein, 185 aa, Arabidopsis thaliana; identical to SEQ ID NO: 28674
  peptide (1)..(185): Ceres Seq. ID no. 13580295
  misc_feature (3)..(148): Pfam Name: Tetraspanin family Pfam Description: Tetraspanin family
  misc_feature (1)..(150): Homolog of NCBI NO: 15237490 NR Description: senescence-associated protein, putative
  misc_feature (1)..(150): Homolog of NCBI NO: 15224802 NR Description: senescence-associated protein- related
  misc_feature (1)..(149): Homolog of NCBI NO: 21537169 NR Description: senescence-associated protein-like protein
  misc_feature (1)..(149): Homolog of NCBI NO: 15234743 NR Description: senescence-associated protein family [Arabidopsis
  misc_feature (1)..(145): Homolog of NCBI NO: 15234374 NR Description: senescence-associated protein, putative
  misc_feature (2)..(149): Homolog of NCBI NO: 20197174 NR Description: hypothetical protein [Arabidopsis thaliana]
  misc_feature (1)..(150): Homolog of NCBI NO: 29367553 NR Description: senescence-associated protein-like protein
  misc_feature (2)..(147): Homolog of NCBI NO: 3551954 NR Description: senescence-associated protein 5 [Hemerocallis
  misc_feature (1)..(148): Homolog of NCBI NO: 15238641 NR Description: senescence-associated protein family [Arabidopsis
  misc_feature (1)..(148): Homolog of NCBI NO: 15231187 NR Description: senescence-associated protein family [Arabidopsis

SEQ ID NO: 32265 - protein, 132 aa, Arabidopsis thaliana; identical to SEQ ID NO: 28675
  peptide (1)..(132): Ceres Seq. ID no. 13580296
  misc_feature (1)..(95): Pfam Name: Tetraspanin family Pfam Description: Tetraspanin family
  misc_feature (1)..(97): Homolog of NCBI NO: 15237490 NR Description: senescence-associated protein, putative
  misc_feature (1)..(97): Homolog of NCBI NO: 15224802 NR Description: senescence-associated protein- related
  misc_feature (1)..(96): Homolog of NCBI NO: 21537169 NR Description: senescence-associated protein-like protein
  misc_feature (1)..(96): Homolog of NCBI NO: 15234743 NR Description: senescence-associated protein family [Arabidopsis
  misc_feature (1)..(92): Homolog of NCBI NO: 15234374 NR Description: senescence-associated protein, putative
  misc_feature (1)..(96): Homolog of NCBI NO: 20197174 NR Description: hypothetical protein [Arabidopsis thaliana]
  misc_feature (1)..(97): Homolog of NCBI NO: 29367553 NR Description: senescence-associated protein-like protein
  misc_feature (1)..(94): Homolog of NCBI NO: 3551954 NR Description: senescence-associated protein 5 [Hemerocallis
  misc_feature (1)..(95): Homolog of NCBI NO: 15238641 NR Description: senescence-associated protein family [Arabidopsis
  misc_feature (1)..(95): Homolog of NCBI NO: 15231187 NR Description: senescence-associated protein family [Arabidopsis

SEQ ID NO: 32266 - protein, 125 aa, Arabidopsis thaliana; identical to SEQ ID NO: 28676
  peptide (1)..(125): Ceres Seq. ID no. 13580297
  misc_feature (1)..(87): Pfam Name: Tetraspanin family Pfam Description: Tetraspanin family
  misc_feature (1)..(105): Homolog of NCBI NO: 15237490 NR Description: senescence-associated protein, putative
  misc_feature (1)..(105): Homolog of NCBI NO: 15224802 NR Description: senescence-associated protein- related
  misc_feature (1)..(104): Homolog of NCBI NO: 21537169 NR Description: senescence-associated protein-like protein
  misc_feature (1)..(104): Homolog of NCBI NO: 15234743 NR Description: senescence-associated protein family [Arabidopsis
  misc_feature (2)..(103): Homolog of NCBI NO: 15234374 NR Description: senescence-associated protein, putative
  misc_feature (1)..(106): Homolog of NCBI NO: 20197174 NR Description: hypothetical protein [Arabidopsis thaliana]
  misc_feature (2)..(113): Homolog of NCBI NO: 29367553 NR Description: senescence-associated protein-like protein
  misc_feature (1)..(104): Homolog of NCBI NO: 3551954 NR Description: senescence-associated protein 5 [Hemerocallis
  misc_feature (1)..(116): Homolog of NCBI NO: 15238641 NR Description: senescence-associated protein family [Arabidopsis
  misc_feature (1)..(125): Homolog of NCBI NO: 15231187 NR Description: senescence-associated protein family [Arabidopsis

SEQ ID NO: 32267 - DNA, 1518 bp, Arabidopsis thaliana; identical to SEQ ID NO: 28677
  misc_feature (1)..(1518): Ceres Seq. ID no. 12579421
  misc_feature: MA Experiment ID: 108463 Result: Up-regulated in Transcription
  misc_feature: MA Experiment 108463 PARAMETER Experiment Name: At_Germinating_Seeds_cDNA_P Parameter: Age (day) Value: 3 vs. 0
  misc_feature: MA Experiment 108463 PARAMETER Experiment Name: At_Germinating_Seeds_cDNA_P Parameter: Tissue Value: Germinating Seeds
  misc_feature: MA Experiment ID: 108464 Result: Up-regulated in Transcription
  misc_feature: MA Experiment 108464 PARAMETER Experiment Name: At_Germinating_Seeds_cDNA_P Parameter: Age (day) Value: 4 vs. 0
  misc_feature: MA Experiment 108464 PARAMETER Experiment Name: At_Germinating_Seeds_cDNA_P Parameter: Tissue Value: Germinating Seeds
  misc_feature: MA Experiment ID: 108595 Result: Down-regulated in Transcription
  misc_feature: MA Experiment 108595 PARAMETER Experiment Name: At_Ler-pi_Ovule_cDNA_P Parameter: Plant Line Value: null
  misc_feature: MA Experiment ID: 20000112 Result: Up-regulated in Transcription
  misc_feature: MA Experiment 20000112 PARAMETER Experiment Name: At_42deg_Heat_cDNA_P Parameter: Temperature (deg C) Value: 42 vs. 22
  misc_feature: MA Experiment 20000112 PARAMETER Experiment Name: At_42deg_Heat_cDNA_P Parameter: Timepoint (hr) Value: 2
  misc_feature: MA Experiment 20000112 PARAMETER Experiment Name: At_42deg_Heat_cDNA_P Parameter: Tissue Value: Aerial
  misc_feature: MA Experiment ID: 20000184 Result: Down-regulated in Transcription
  misc_feature: MA Experiment 20000184 PARAMETER Experiment Name: At_Shoots__P Parameter: Age (day) Value: 7
  misc_feature: MA Experiment 20000184 PARAMETER Experiment Name: At_Shoots__P Parameter: Tissue Value: Shoots vs. Whole Plant
  misc_feature: MA Experiment ID: 20000235 Result: Down-regulated in Transcription
  misc_feature: MA Experiment 20000235 PARAMETER Experiment Name: At_Siliques_P Parameter: Age (day) Value: 21
  misc_feature: MA Experiment 20000235 PARAMETER Experiment Name: At_Siliques_P Parameter: Organism Value: A. thaliana
  misc_feature: MA Experiment 20000235 PARAMETER Experiment Name: At_Siliques_P Parameter: Plant Line Value: WS
  misc_feature: MA Experiment 20000235 PARAMETER Experiment Name: At_Siliques_P Parameter: Tissue Value: 5-10mm Siliques vs. Whole Plant
  misc_feature: MA Experiment ID: 20000286 Result: Down-regulated in Transcription
  misc_feature: MA Experiment 20000286 PARAMETER Experiment Name: At_Open_Flower_P Parameter: Age (day) Value: 21
  misc_feature: MA Experiment 20000286 PARAMETER Experiment Name: At_Open_Flower_P Parameter: Plant Line Value: WS
  misc_feature: MA Experiment 20000286 PARAMETER Experiment Name: At_Open_Flower_P Parameter: Tissue Value: Half Open vs. Whole Plant

SEQ ID NO: 32268 - protein, 355 aa, Arabidopsis thaliana; identical to SEQ ID NO: 28678
  peptide (1)..(355): Ceres Seq. ID no. 12579422
  misc_feature (22)..(322): Pfam Name: Protein phosphatase 2C Pfam Description: Protein phosphatase 2C
  misc_feature (156)..(348): Homolog of NCBI NO: 22219444 NR Description: protein phosphatase 1G (formerly 2C),
  misc_feature (1)..(117): Homolog of NCBI NO: 4505999 NR Description: protein phosphatase 1G (formerly 2C),
  misc_feature (1)..(120): Homolog of NCBI NO: 27697184 NR Description: Similar to protein phosphatase 1G (formerly 2C),
  misc_feature (156)..(348): Homolog of NCBI NO: 4505999 NR Description: protein phosphatase 1G (formerly 2C),
  misc_feature (134)..(355): Homolog of NCBI NO: 27697184 NR Description: Similar to protein phosphatase 1G (formerly 2C),
  misc_feature (1)..(99): Homolog of NCBI NO: 19921654 NR Description: CG10417-PA [Drosophila melanogaster]
  misc_feature (156)..(331): Homolog of NCBI NO: 19921654 NR Description: CG10417-PA [Drosophila melanogaster]
  misc_feature (1)..(343): Homolog of NCBI NO: 12003990 NR Description: protein phosphatase type-2C [Zea mays]
  misc_feature (1)..(355): Homolog of NCBI NO: 15236548 NR Description: protein phosphatase 2C (PP2C)
  misc_feature (1)..(355): Homolog of NCBI NO: 15224677 NR Description: protein phosphatase 2C (PP2C)

SEQ ID NO: 32269 - protein, 327 aa, Arabidopsis thaliana; identical to SEQ ID NO: 28679
  peptide (1)..(327): Ceres Seq. ID no. 12579423
  misc_feature (1)..(294): Pfam Name: Protein phosphatase 2C Pfam Description: Protein phosphatase 2C
  misc_feature (128)..(320): Homolog of NCBI NO: 22219444 NR Description: protein phosphatase 1G (formerly 2C),
  misc_feature (1)..(89): Homolog of NCBI NO: 4505999 NR Description: protein phosphatase 1G (formerly 2C),
  misc_feature (1)..(92): Homolog of NCBI NO: 27697184 NR Description: Similar to protein phosphatase 1G (formerly 2C),
  misc_feature (128)..(320): Homolog of NCBI NO: 4505999 NR Description: protein phosphatase 1G (formerly 2C),
  misc_feature (106)..(327): Homolog of NCBI NO: 27697184 NR Description: Similar to protein phosphatase 1G (formerly 2C),
  misc_feature (1)..(71): Homolog of NCBI NO: 19921654 NR Description: CG10417-PA [Drosophila melanogaster]
  misc_feature (128)..(303): Homolog of NCBI NO: 19921654 NR Description: CG10417-PA [Drosophila melanogaster]
  misc_feature (1)..(315): Homolog of NCBI NO: 12003990 NR Description: protein phosphatase type-2C [Zea mays]
  misc_feature (1)..(327): Homolog of NCBI NO: 15236548 NR Description: protein phosphatase 2C (PP2C)
  misc_feature (1)..(327): Homolog of NCBI NO: 15224677 NR Description: protein phosphatase 2C (PP2C)

SEQ ID NO: 32270 - protein, 320 aa, Arabidopsis thaliana; identical to SEQ ID NO: 28680
  peptide (1)..(320): Ceres Seq. ID no. 12579424
  misc_feature (1)..(287): Pfam Name: Protein phosphatase 2C Pfam Description: Protein phosphatase 2C
  misc_feature (121)..(313): Homolog of NCBI NO: 22219444 NR Description: protein phosphatase 1G (formerly 2C),
  misc_feature (1)..(82): Homolog of NCBI NO: 4505999 NR Description: protein phosphatase 1G (formerly 2C),
  misc_feature (1)..(85): Homolog of NCBI NO: 27697184 NR Description: Similar to protein phosphatase 1G (formerly 2C),
  misc_feature (121)..(313): Homolog of NCBI NO: 4505999 NR Description: protein phosphatase 1G (formerly 2C),
  misc_feature (99)..(320): Homolog of NCBI NO: 27697184 NR Description: Similar to protein phosphatase 1G (formerly 2C),
  misc_feature (1)..(64): Homolog of NCBI NO: 19921654 NR Description: CG10417-PA [Drosophila melanogaster]
  misc_feature (121)..(296): Homolog of NCBI NO: 19921654 NR Description: CG10417-PA [Drosophila melanogaster]
  misc_feature (1)..(308): Homolog of NCBI NO: 12003990 NR Description: protein phosphatase type-2C [Zea mays]
  misc_feature (1)..(320): Homolog of NCBI NO: 15236548 NR Description: protein phosphatase 2C (PP2C)
  misc_feature (1)..(320): Homolog of NCBI NO: 15224677 NR Description: protein phosphatase 2C (PP2C)

SEQ ID NO: 32271 - DNA, 1331 bp, Arabidopsis thaliana; identical to SEQ ID NO: 28681
  misc_feature (1)..(1331): Ceres Seq. ID no. 12337850
  misc_feature: MA Experiment ID: 20001451 Result: Down-regulated in Transcription
  misc_feature: MA Experiment 20001451 PARAMETER Experiment Name: At_Far-red-induction_P Parameter: Age (day) Value: 7
  misc_feature: MA Experiment 20001451 PARAMETER Experiment Name: At_Far-red-induction_P Parameter: Light Value: Far-red vs. White
  misc_feature: MA Experiment 20001451 PARAMETER Experiment Name: At_Far-red-induction_P Parameter: Organism Value: A. thaliana
  misc_feature: MA Experiment 20001451 PARAMETER Experiment Name: At_Far-red-induction_P Parameter: Plant Line Value: Columbia
  misc_feature: MA Experiment 20001451 PARAMETER Experiment Name: At_Far-red-induction_P Parameter: Timepoint (hr) Value: 24
  misc_feature: MA Experiment 20001451 PARAMETER Experiment Name: At_Far-red-induction_P Parameter: Tissue Value: Whole Plant

SEQ ID NO: 32272 - protein, 321 aa, Arabidopsis thaliana; identical to SEQ ID NO: 28682
  peptide (1)..(321): Ceres Seq. ID no. 12337851
  misc_feature (56)..(118): Homolog of NCBI NO: 25405838 NR Description: hypothetical protein T5A14.4 [imported] -
  misc_feature (119)..(321): Homolog of NCBI NO: 21618303 NR Description: unknown [Arabidopsis thaliana]
  misc_feature (1)..(321): Homolog of NCBI NO: 24417230 NR Description: unknown [Arabidopsis thaliana]
  misc_feature (1)..(321): Homolog of NCBI NO: 30682651 NR Description: expressed protein [Arabidopsis thaliana]

SEQ ID NO: 32273 - protein, 266 aa, Arabidopsis thaliana; identical to SEQ ID NO: 28683
  peptide (1)..(266): Ceres Seq. ID no. 12337852
  misc_feature (1)..(63): Homolog of NCBI NO: 25405838 NR Description: hypothetical protein T5A14.4 [imported] -
  misc_feature (64)..(266): Homolog of NCBI NO: 21618303 NR Description: unknown [Arabidopsis thaliana]
  misc_feature (1)..(266): Homolog of NCBI NO: 24417230 NR Description: unknown [Arabidopsis thaliana]
  misc_feature (1)..(266): Homolog of NCBI NO: 30682651 NR Description: expressed protein [Arabidopsis thaliana]

SEQ ID NO: 32274 - protein, 183 aa, Arabidopsis thaliana; identical to SEQ ID NO: 28684
  peptide (1)..(183): Ceres Seq. ID no. 12337853
  misc_feature (1)..(183): Homolog of NCBI NO: 21618303 NR Description: unknown [Arabidopsis thaliana]
  misc_feature (1)..(183): Homolog of NCBI NO: 24417230 NR Description: unknown [Arabidopsis thaliana]
  misc_feature (1)..(183): Homolog of NCBI NO: 30682651 NR Description: expressed protein [Arabidopsis thaliana]

SEQ ID NO: 32275 - DNA, 737 bp, Arabidopsis thaliana; identical to SEQ ID NO: 28685
  misc_feature (1)..(737): Ceres Seq. ID no. 12580393
  misc_feature: MA Experiment ID: 108433 Result: Up-regulated in Transcription
  misc_feature: MA Experiment 108433 PARAMETER Experiment Name: At_rhl_Mutant2_cDNA_P Parameter: Age (day) Value: 7
  misc_feature: MA Experiment 108433 PARAMETER Experiment Name: At_rhl_Mutant2_cDNA_P Parameter: Organism Value: A. thaliana
  misc_feature: MA Experiment 108433 PARAMETER Experiment Name: At_rhl_Mutant2_cDNA_P Parameter: Plant Line Value: rhl Mutant vs. wt landsburg
  misc_feature: MA Experiment 108433 PARAMETER Experiment Name: At_rhl_Mutant2_cDNA_P Parameter: Tissue Value: Roots
  misc_feature: MA Experiment ID: 108434 Result: Down-regulated in Transcription
  misc_feature: MA Experiment 108434 PARAMETER Experiment Name: At_Root_Tips_cDNA_P Parameter: Tissue Value: Root Tips
  misc_feature: MA Experiment ID: 108488 Result: Down-regulated in Transcription
  misc_feature: MA Experiment ID: 108561 Result: Up-regulated in Transcription
  misc_feature: MA Experiment 108561 PARAMETER Experiment Name: At_100uM_ABA_cDNA_P Parameter: Timepoint (hr) Value: 6
  misc_feature: MA Experiment 108561 PARAMETER Experiment Name: At_100uM_ABA_cDNA_P Parameter: Tissue Value: Aerial
  misc_feature: MA Experiment 108561 PARAMETER Experiment Name: At_100uM_ABA_cDNA_P Parameter: Treatment Value: 100uM ABA vs. No Treatment
  misc_feature: MA Experiment ID: 108572 Result: Up-regulated in Transcription
  misc_feature: MA Experiment 108572 PARAMETER Experiment Name: At_Drought_cDNA_P Parameter: Timepoint (hr) Value: 1
  misc_feature: MA Experiment 108572 PARAMETER Experiment Name: At_Drought_cDNA_P Parameter: Tissue Value: Aerial
  misc_feature: MA Experiment 108572 PARAMETER Experiment Name: At_Drought_cDNA_P Parameter: Treatment Value: Drought vs. No Drought
  misc_feature: MA Experiment ID: 108605 Result: Up-regulated in Transcription
  misc_feature: MA Experiment 108605 PARAMETER Experiment Name: At_100uM_ABA_cDNA_P Parameter: Timepoint (hr) Value: 6
  misc_feature: MA Experiment 108605 PARAMETER Experiment Name: At_100uM_ABA_cDNA_P Parameter: Tissue Value: Aerial
  misc_feature: MA Experiment 108605 PARAMETER Experiment Name: At_100uM_ABA_cDNA_P Parameter: Treatment Value: 100uM ABA vs. No Treatment
  misc_feature: MA Experiment ID: 108607 Result: Up-regulated in Transcription
  misc_feature: MA Experiment 108607 PARAMETER Experiment Name: At_100uM_ABA_cDNA_P Parameter: Timepoint (hr) Value: 4
  misc_feature: MA Experiment 108607 PARAMETER Experiment Name: At_100uM_ABA_cDNA_P Parameter: Tissue Value: Aerial
  misc_feature: MA Experiment 108607 PARAMETER Experiment Name: At_100uM_ABA_cDNA_P Parameter: Treatment Value: 100uM ABA vs. No Treatment
  misc_feature: MA Experiment ID: 108668 Result: Up-regulated in Transcription
  misc_feature: MA Experiment 108668 PARAMETER Experiment Name: At_2mM_SA_cDNA_P Parameter: Plant Line Value: WS
  misc_feature: MA Experiment 108668 PARAMETER Experiment Name: At_2mM_SA_cDNA_P Parameter: Timepoint (hr) Value: 6
  misc_feature: MA Experiment 108668 PARAMETER Experiment Name: At_2mM_SA_cDNA_P Parameter: Treatment Value: 2mM SA vs. No Treatment
  misc_feature: MA Experiment ID: 20000069 Result: Up-regulated in Transcription
  misc_feature: MA Experiment 20000069 PARAMETER Experiment Name: At_100uM_ABA_Mutants_cDNA_P Parameter: Plant Line Value: CS23
  misc_feature: MA Experiment 20000069 PARAMETER Experiment Name: At_100uM_ABA_Mutants_cDNA_P Parameter: Timepoint (hr) Value: 6
  misc_feature: MA Experiment 20000069 PARAMETER Experiment Name: At_100uM_ABA_Mutants_cDNA_P Parameter: Tissue Value: Aerial
  misc_feature: MA Experiment 20000069 PARAMETER Experiment Name: At_100uM_ABA_Mutants_cDNA_P Parameter: Treatment Value: 100uM ABA vs. No Treatment
  misc_feature: MA Experiment ID: 20000224 Result: Down-regulated in Transcription

SEQ ID NO: 32276 - protein, 234 aa, Arabidopsis thaliana; identical to SEQ ID NO: 28686
  peptide (1)..(234): Ceres Seq. ID no. 12580394
  misc_feature (28)..(234): Pfam Name: Pyroglutamyl peptidase Pfam Description: Pyroglutamyl peptidase
  misc_feature (71)..(209): Homolog of NCBI NO: 14590492 NR Description: pyrrolidone-carboxylate peptidase [Pyrococcus
  misc_feature (18)..(107): Homolog of NCBI NO: 15220751 NR Description: hypothetical protein; protein id: At1g23430.1
  misc_feature (18)..(107): Homolog of NCBI NO: 9295697 NR Description: F26F24.31 [Arabidopsis thaliana]
  misc_feature (103)..(234): Homolog of NCBI NO: 15220753 NR Description: hypothetical protein; protein id: At1g23440.1
  misc_feature (18)..(232): Homolog of NCBI NO: 12039349 NR Description: putative pyrrolidone carboxyl peptidase [Oryza
  misc_feature (18)..(234): Homolog of NCBI NO: 18405940 NR Description: expressed protein
  misc_feature (18)..(231): Homolog of NCBI NO: 38175741 NR Description: pyrrolidone carboxyl peptidase-like protein
  misc_feature (18)..(107): Homolog of NCBI NO: 8778575 NR Description: F28C11.8 [Arabidopsis thaliana]
  misc_feature (108)..(234): Homolog of NCBI NO: 8778575 NR Description: F28C11.8 [Arabidopsis thaliana]
  misc_feature (18)..(234): Homolog of NCBI NO: 13430708 NR Description: unknown protein [Arabidopsis thaliana]

SEQ ID NO: 32277 - protein, 217 aa, Arabidopsis thaliana; identical to SEQ ID NO: 28687
  peptide (1)..(217): Ceres Seq. ID no. 12580395
  misc_feature (11)..(217): Pfam Name: Pyroglutamyl peptidase Pfam Description: Pyroglutamyl peptidase
  misc_feature (54)..(192): Homolog of NCBI NO: 14590492 NR Description: pyrrolidone-carboxylate peptidase [Pyrococcus
  misc_feature (1)..(90): Homolog of NCBI NO: 15220751 NR Description: hypothetical protein; protein id: At1g23430.1
  misc_feature (1)..(90): Homolog of NCBI NO: 9295697 NR Description: F26F24.31 [Arabidopsis thaliana]
  misc_feature (86)..(217): Homolog of NCBI NO: 15220753 NR Description: hypothetical protein; protein id: At1g23440.1
  misc_feature (1)..(215): Homolog of NCBI NO: 12039349 NR Description: putative pyrrolidone carboxyl peptidase [Oryza
  misc_feature (1)..(217): Homolog of NCBI NO: 18405940 NR Description: expressed protein
  misc_feature (1)..(214): Homolog of NCBI NO: 38175741 NR Description: pyrrolidone carboxyl peptidase-like protein
  misc_feature (1)..(90): Homolog of NCBI NO: 8778575 NR Description: F28C11.8 [Arabidopsis thaliana]
  misc_feature (91)..(217): Homolog of NCBI NO: 8778575 NR Description: F28C11.8 [Arabidopsis thaliana]
  misc_feature (1)..(217): Homolog of NCBI NO: 13430708 NR Description: unknown protein [Arabidopsis thaliana]

SEQ ID NO: 32278 - DNA, 998 bp, Arabidopsis thaliana; identical to SEQ ID NO: 28688
  misc_feature (1)..(998): Ceres Seq. ID no. 12384543
  misc_feature: MA Experiment ID: 108573 Result: Up-regulated in Transcription
  misc_feature: MA Experiment 108573 PARAMETER Experiment Name: At_Drought_cDNA_P Parameter: Timepoint (hr) Value: 6
  misc_feature: MA Experiment 108573 PARAMETER Experiment Name: At_Drought_cDNA_P Parameter: Tissue Value: Aerial
  misc_feature: MA Experiment 108573 PARAMETER Experiment Name: At_Drought_cDNA_P Parameter: Treatment Value: Drought vs. No Drought
  misc_feature: MA Experiment ID: 20000112 Result: Up-regulated in Transcription
  misc_feature: MA Experiment 20000112 PARAMETER Experiment Name: At_42deg_Heat_cDNA_P Parameter: Temperature (deg C) Value: 42 vs. 22
  misc_feature: MA Experiment 20000112 PARAMETER Experiment Name: At_42deg_Heat_cDNA_P Parameter: Timepoint (hr) Value: 2
  misc_feature: MA Experiment 20000112 PARAMETER Experiment Name: At_42deg_Heat_cDNA_P Parameter: Tissue Value: Aerial
  misc_feature: MA Experiment ID: 20000113 Result: Up-regulated in Transcription
  misc_feature: MA Experiment 20000113 PARAMETER Experiment Name: At_42deg_Heat_cDNA_P Parameter: Temperature (deg C) Value: 42 vs. 22
  misc_feature: MA Experiment 20000113 PARAMETER Experiment Name: At_42deg_Heat_cDNA_P Parameter: Timepoint (hr) Value: 8
  misc_feature: MA Experiment 20000113 PARAMETER Experiment Name: At_42deg_Heat_cDNA_P Parameter: Tissue Value: Aerial
  misc_feature: MA Experiment ID: 20000224 Result: Down-regulated in Transcription
  misc_feature: MA Experiment ID: 20000227 Result: Down-regulated in Transcription
  misc_feature: MA Experiment 20000227 PARAMETER Experiment Name: At_Root-Tips-vs-Tops_P Parameter: Tissue Value: Root Tips vs. Root Tops
  misc_feature: MA Experiment ID: 20000234 Result: Down-regulated in Transcription
  misc_feature: MA Experiment 20000234 PARAMETER Experiment Name: At_Siliques_P Parameter: Age (day) Value: 21
  misc_feature: MA Experiment 20000234 PARAMETER Experiment Name: At_Siliques_P Parameter: Organism Value: A. thaliana
  misc_feature: MA Experiment 20000234 PARAMETER Experiment Name: At_Siliques_P Parameter: Plant Line Value: WS
  misc_feature: MA Experiment 20000234 PARAMETER Experiment Name: At_Siliques_P Parameter: Tissue Value: Less Than 5mm Siliques vs. Whole Plant
  misc_feature: MA Experiment ID: 20000264 Result: Down-regulated in Transcription
  misc_feature: MA Experiment 20000264 PARAMETER Experiment Name: At_Open_Flower_P Parameter: Age (day) Value: 21
  misc_feature: MA Experiment 20000264 PARAMETER Experiment Name: At_Open_Flower_P Parameter: Plant Line Value: WS
  misc_feature: MA Experiment 20000264 PARAMETER Experiment Name: At_Open_Flower_P Parameter: Tissue Value: Open Flower vs. Whole Plant
  misc_feature: MA Experiment ID: 20000265 Result: Down-regulated in Transcription
  misc_feature: MA Experiment 20000265 PARAMETER Experiment Name: At_Open_Flower_P Parameter: Age (day) Value: 21
  misc_feature: MA Experiment 20000265 PARAMETER Experiment Name: At_Open_Flower_P Parameter: Plant Line Value: WS
  misc_feature: MA Experiment 20000265 PARAMETER Experiment Name: At_Open_Flower_P Parameter: Tissue Value: Closed Flower vs. Whole Plant
  misc_feature: MA Experiment ID: 20000286 Result: Down-regulated in Transcription
  misc_feature: MA Experiment 20000286 PARAMETER Experiment Name: At_Open_Flower_P Parameter: Age (day) Value: 21
  misc_feature: MA Experiment 20000286 PARAMETER Experiment Name: At_Open_Flower_P Parameter: Plant Line Value: WS
  misc_feature: MA Experiment 20000286 PARAMETER Experiment Name: At_Open_Flower_P Parameter: Tissue Value: Half Open vs. Whole Plant
  misc_feature: MA Experiment ID: 20000496 Result: Down-regulated in Transcription
  misc_feature: MA Experiment 20000496 PARAMETER Experiment Name: At_Guard_Cells_P Parameter: Harvest Date Value: 7/19/2002
  misc_feature: MA Experiment 20000496 PARAMETER Experiment Name: At_Guard_Cells_P Parameter: Organism Value: Canola
  misc_feature: MA Experiment 20000496 PARAMETER Experiment Name: At_Guard_Cells_P Parameter: Tissue Value: Guard Cells vs. Leaves
  misc_feature: MA Experiment ID: 20000794 Result: Down-regulated in Transcription
  misc_feature: MA Experiment 20000794 PARAMETER Experiment Name: At_Petals_P Parameter: Age (day) Value: 23-25 days
  misc_feature: MA Experiment 20000794 PARAMETER Experiment Name: At_Petals_P Parameter: Plant Line Value: WS
  misc_feature: MA Experiment 20000794 PARAMETER Experiment Name: At_Petals_P Parameter: Tissue Value: Petals vs. Whole plant
  misc_feature: MA Experiment ID: 20001558 Result: Down-regulated in Transcription
  misc_feature: MA Experiment 20001558 PARAMETER Experiment Name: At_Drought_Soil_Dry_P Parameter: Age (day) Value: 27
  misc_feature: MA Experiment 20001558 PARAMETER Experiment Name: At_Drought_Soil_Dry_P Parameter: Organism Value: A. thaliana
  misc_feature: MA Experiment 20001558 PARAMETER Experiment Name: At_Drought_Soil_Dry_P Parameter: Plant Line Value: WS
  misc_feature: MA Experiment 20001558 PARAMETER Experiment Name: At_Drought_Soil_Dry_P Parameter: Post Timepoint (hr) Value: 6
  misc_feature: MA Experiment 20001558 PARAMETER Experiment Name: At_Drought_Soil_Dry_P Parameter: Post-Treatment Value: Re-Water vs. No Drought
  misc_feature: MA Experiment 20001558 PARAMETER Experiment Name: At_Drought_Soil_Dry_P Parameter: Timepoint (day) Value: 13
  misc_feature: MA Experiment 20001558 PARAMETER Experiment Name: At_Drought_Soil_Dry_P Parameter: Treatment Value: Drought vs. No Drought
  misc_feature: MA Experiment ID: 20001560 Result: Down-regulated in Transcription
  misc_feature: MA Experiment 20001560 PARAMETER Experiment Name: At_Drought_Soil_Dry_P Parameter: Age (day) Value: 28
  misc_feature: MA Experiment 20001560 PARAMETER Experiment Name: At_Drought_Soil_Dry_P Parameter: Organism Value: A. thaliana
  misc_feature: MA Experiment 20001560 PARAMETER Experiment Name: At_Drought_Soil_Dry_P Parameter: Plant Line Value: WS
  misc_feature: MA Experiment 20001560 PARAMETER Experiment Name: At_Drought_Soil_Dry_P Parameter: Post Timepoint (hr) Value: None
  misc_feature: MA Experiment 20001560 PARAMETER Experiment Name: At_Drought_Soil_Dry_P Parameter: Post-Treatment Value: None
  misc_feature: MA Experiment 20001560 PARAMETER Experiment Name: At_Drought_Soil_Dry_P Parameter: Timepoint (day) Value: 14
  misc_feature: MA Experiment 20001560 PARAMETER Experiment Name: At_Drought_Soil_Dry_P Parameter: Treatment Value: Drought vs. No Drought

SEQ ID NO: 32279 - protein, 173 aa, Arabidopsis thaliana; identical to SEQ ID NO: 28689
  peptide (1)..(173): Ceres Seq. ID no. 12384544
  misc_feature (114)..(154): Pfam Name: AN1-like Zinc finger Pfam Description: AN1-like Zinc finger
  misc_feature (1)..(173): Homolog of NCBI NO: 8778645 NR Description: F5O11.17 [Arabidopsis thaliana]
  misc_feature (15)..(173): Homolog of NCBI NO: 15225894 NR Description: putative zinc finger protein
  misc_feature (8)..(173): Homolog of NCBI NO: 14596167 NR Description: zinc finger-like protein [Arabidopsis thaliana]
  misc_feature (11)..(173): Homolog of NCBI NO: 15234402 NR Description: putative protein
  misc_feature (8)..(173): Homolog of NCBI NO: 15231686 NR Description: zinc finger - like protein
  misc_feature (8)..(173): Homolog of NCBI NO: 18404102 NR Description: expressed protein
  misc_feature (1)..(173): Homolog of NCBI NO: 35187687 NR Description: zinc-finger protein [Oryza sativa (indica
  misc_feature (1)..(173): Homolog of NCBI NO: 11361253 NR Description: hypothetical protein p85RF [imported] - Prunus
  misc_feature (1)..(173): Homolog of NCBI NO: 25082726 NR Description: expressed protein [Arabidopsis thaliana]
  misc_feature (1)..(173): Homolog of NCBI NO: 18403408 NR Description: expressed protein

SEQ ID NO: 32280 - protein, 143 aa, Arabidopsis thaliana; identical to SEQ ID NO: 28690
  peptide (1)..(143): Ceres Seq. ID no. 12384545
  misc_feature (84)..(124): Pfam Name: AN1-like Zinc finger Pfam Description: AN1-like Zinc finger
  misc_feature (1)..(143): Homolog of NCBI NO: 8778645 NR Description: F5O11.17 [Arabidopsis thaliana]
  misc_feature (1)..(143): Homolog of NCBI NO: 15225894 NR Description: putative zinc finger protein
  misc_feature (1)..(143): Homolog of NCBI NO: 14596167 NR Description: zinc finger-like protein [Arabidopsis thaliana]
  misc_feature (1)..(143): Homolog of NCBI NO: 15234402 NR Description: putative protein
  misc_feature (1)..(143): Homolog of NCBI NO: 15231686 NR Description: zinc finger - like protein
  misc_feature (1)..(143): Homolog of NCBI NO: 18404102 NR Description: expressed protein
  misc_feature (1)..(143): Homolog of NCBI NO: 35187687 NR Description: zinc-finger protein [Oryza sativa (indica
  misc_feature (1)..(143): Homolog of NCBI NO: 11361253 NR Description: hypothetical protein p85RF [imported] - Prunus
  misc_feature (1)..(143): Homolog of NCBI NO: 25082726 NR Description: expressed protein [Arabidopsis thaliana]
  misc_feature (1)..(143): Homolog of NCBI NO: 18403408 NR Description: expressed protein

SEQ ID NO: 32281 - protein, 141 aa, Arabidopsis thaliana; identical to SEQ ID NO: 28691
  peptide (1)..(141): Ceres Seq. ID no. 12384546
  misc_feature (82)..(122): Pfam Name: AN1-like Zinc finger Pfam Description: AN1-like Zinc finger
  misc_feature (1)..(141): Homolog of NCBI NO: 8778645 NR Description: F5O11.17 [Arabidopsis thaliana]
  misc_feature (1)..(141): Homolog of NCBI NO: 15225894 NR Description: putative zinc finger protein
  misc_feature (1)..(141): Homolog of NCBI NO: 14596167 NR Description: zinc finger-like protein [Arabidopsis thaliana]
  misc_feature (1)..(141): Homolog of NCBI NO: 15234402 NR Description: putative protein
  misc_feature (1)..(141): Homolog of NCBI NO: 15231686 NR Description: zinc finger - like protein
  misc_feature (1)..(141): Homolog of NCBI NO: 18404102 NR Description: expressed protein
  misc_feature (1)..(141): Homolog of NCBI NO: 35187687 NR Description: zinc-finger protein [Oryza sativa (indica
  misc_feature (1)..(141): Homolog of NCBI NO: 11361253 NR Description: hypothetical protein p85RF [imported] - Prunus
  misc_feature (1)..(141): Homolog of NCBI NO: 25082726 NR Description: expressed protein [Arabidopsis thaliana]
  misc_feature (1)..(141): Homolog of NCBI NO: 18403408 NR Description: expressed protein

SEQ ID NO: 32282 - DNA, 905 bp, Arabidopsis thaliana; identical to SEQ ID NO: 28692
  misc_feature (1)..(905): Ceres Seq. ID no. 12711793
  misc_feature: MA Experiment ID: 108434 Result: Down-regulated in Transcription
  misc_feature: MA Experiment 108434 PARAMETER Experiment Name: At_Root_Tips_cDNA_P Parameter: Tissue Value: Root Tips
  misc_feature: MA Experiment ID: 108435 Result: Down-regulated in Transcription
  misc_feature: MA Experiment 108435 PARAMETER Experiment Name: At_stm_Mutants_cDNA_P Parameter: Plant Line Value: wt Landsburg vs stm
  misc_feature: MA Experiment 108435 PARAMETER Experiment Name: At_stm_Mutants_cDNA_P Parameter: Tissue Value: Shoot Apical Meristem Region
  misc_feature: MA Experiment ID: 108488 Result: Down-regulated in Transcription
  misc_feature: MA Experiment ID: 108574 Result: Up-regulated in Transcription
  misc_feature: MA Experiment 108574 PARAMETER Experiment Name: At_Wounding__cDNA_P Parameter: Timepoint (hr) Value: 1
  misc_feature: MA Experiment 108574 PARAMETER Experiment Name: At_Wounding__cDNA_P Parameter: Tissue Value: Aerial
  misc_feature: MA Experiment 108574 PARAMETER Experiment Name: At_Wounding__cDNA_P Parameter: Treatment Value: Wounding vs. No Wounding
  misc_feature: MA Experiment ID: 108579 Result: Up-regulated in Transcription
  misc_feature: MA Experiment 108579 PARAMETER Experiment Name: At_4deg_Cold_cDNA_P Parameter: Temperature (deg C) Value: 4 vs. 22
  misc_feature: MA Experiment 108579 PARAMETER Experiment Name: At_4deg_Cold_cDNA_P Parameter: Timepoint (hr) Value: 6
  misc_feature: MA Experiment 108579 PARAMETER Experiment Name: At_4deg_Cold_cDNA_P Parameter: Tissue Value: Aerial
  misc_feature: MA Experiment ID: 108585 Result: Up-regulated in Transcription
  misc_feature: MA Experiment 108585 PARAMETER Experiment Name: At_5mM_NaNP_cDNA_P Parameter: Timepoint (hr) Value: 6
  misc_feature: MA Experiment 108585 PARAMETER Experiment Name: At_5mM_NaNP_cDNA_P Parameter: Tissue Value: Aerial
  misc_feature: MA Experiment 108585 PARAMETER Experiment Name: At_5mM_NaNP_cDNA_P Parameter: Treatment Value: null
  misc_feature: MA Experiment ID: 108608 Result: Up-regulated in Transcription
  misc_feature: MA Experiment 108608 PARAMETER Experiment Name: At_100uM_ABA_cDNA_P Parameter: Timepoint (hr) Value: 1
  misc_feature: MA Experiment 108608 PARAMETER Experiment Name: At_100uM_ABA_cDNA_P Parameter: Tissue Value: Aerial
  misc_feature: MA Experiment 108608 PARAMETER Experiment Name: At_100uM_ABA_cDNA_P Parameter: Treatment Value: 100uM ABA vs. No Treatment
  misc_feature: MA Experiment ID: 108668 Result: Up-regulated in Transcription
  misc_feature: MA Experiment 108668 PARAMETER Experiment Name: At_2mM_SA_cDNA_P Parameter: Plant Line Value: WS
  misc_feature: MA Experiment 108668 PARAMETER Experiment Name: At_2mM_SA_cDNA_P Parameter: Timepoint (hr) Value: 6
  misc_feature: MA Experiment 108668 PARAMETER Experiment Name: At_2mM_SA_cDNA_P Parameter: Treatment Value: 2mM SA vs. No Treatment
  misc_feature: MA Experiment ID: 20000069 Result: Up-regulated in Transcription
  misc_feature: MA Experiment 20000069 PARAMETER Experiment Name: At_100uM_ABA_Mutants_cDNA_P Parameter: Plant Line Value: CS23
  misc_feature: MA Experiment 20000069 PARAMETER Experiment Name: At_100uM_ABA_Mutants_cDNA_P Parameter: Timepoint (hr) Value: 6
  misc_feature: MA Experiment 20000069 PARAMETER Experiment Name: At_100uM_ABA_Mutants_cDNA_P Parameter: Tissue Value: Aerial
  misc_feature: MA Experiment 20000069 PARAMETER Experiment Name: At_100uM_ABA_Mutants_cDNA_P Parameter: Treatment Value: 100uM ABA vs. No Treatment
  misc_feature: MA Experiment ID: 20000070 Result: Up-regulated in Transcription
  misc_feature: MA Experiment 20000070 PARAMETER Experiment Name: At_100uM_ABA_Mutants_cDNA_P Parameter: Plant Line Value: CS24
  misc_feature: MA Experiment 20000070 PARAMETER Experiment Name: At_100uM_ABA_Mutants_cDNA_P Parameter: Timepoint (hr) Value: 6
  misc_feature: MA Experiment 20000070 PARAMETER Experiment Name: At_100uM_ABA_Mutants_cDNA_P Parameter: Tissue Value: Aerial
  misc_feature: MA Experiment 20000070 PARAMETER Experiment Name: At_100uM_ABA_Mutants_cDNA_P Parameter: Treatment Value: 100uM ABA vs. No Treatment
  misc_feature: MA Experiment ID: 20000071 Result: Up-regulated in Transcription
  misc_feature: MA Experiment 20000071 PARAMETER Experiment Name: At_100uM_ABA_Mutants_cDNA_P Parameter: Plant Line Value: CS8104
  misc_feature: MA Experiment 20000071 PARAMETER Experiment Name: At_100uM_ABA_Mutants_cDNA_P Parameter: Timepoint (hr) Value: 6
  misc_feature: MA Experiment 20000071 PARAMETER Experiment Name: At_100uM_ABA_Mutants_cDNA_P Parameter: Tissue Value: Aerial
  misc_feature: MA Experiment 20000071 PARAMETER Experiment Name: At_100uM_ABA_Mutants_cDNA_P Parameter: Treatment Value: 100uM ABA vs. No Treatment
  misc_feature: MA Experiment ID: 20000072 Result: Up-regulated in Transcription
  misc_feature: MA Experiment 20000072 PARAMETER Experiment Name: At_100uM_ABA_Mutants_cDNA_P Parameter: Plant Line Value: CS8105
  misc_feature: MA Experiment 20000072 PARAMETER Experiment Name: At_100uM_ABA_Mutants_cDNA_P Parameter: Timepoint (hr) Value: 6
  misc_feature: MA Experiment 20000072 PARAMETER Experiment Name: At_100uM_ABA_Mutants_cDNA_P Parameter: Tissue Value: Aerial
  misc_feature: MA Experiment 20000072 PARAMETER Experiment Name: At_100uM_ABA_Mutants_cDNA_P Parameter: Treatment Value: 100uM ABA vs. No Treatment
  misc_feature: MA Experiment ID: 20000086 Result: Up-regulated in Transcription
  misc_feature: MA Experiment 20000086 PARAMETER Experiment Name: At_100uM_ABA_Mutants_cDNA_P Parameter: Plant Line Value: CS22
  misc_feature: MA Experiment 20000086 PARAMETER Experiment Name: At_100uM_ABA_Mutants_cDNA_P Parameter: Timepoint (hr) Value: 6
  misc_feature: MA Experiment 20000086 PARAMETER Experiment Name: At_100uM_ABA_Mutants_cDNA_P Parameter: Tissue Value: Aerial
  misc_feature: MA Experiment 20000086 PARAMETER Experiment Name: At_100uM_ABA_Mutants_cDNA_P Parameter: Treatment Value: 100uM ABA vs. No Treatment
  misc_feature: MA Experiment ID: 20000087 Result: Up-regulated in Transcription
  misc_feature: MA Experiment 20000087 PARAMETER Experiment Name: At_100uM_ABA_Mutants_cDNA_P Parameter: Plant Line Value: WS
  misc_feature: MA Experiment 20000087 PARAMETER Experiment Name: At_100uM_ABA_Mutants_cDNA_P Parameter: Timepoint (hr) Value: 6
  misc_feature: MA Experiment 20000087 PARAMETER Experiment Name: At_100uM_ABA_Mutants_cDNA_P Parameter: Tissue Value: Aerial
  misc_feature: MA Experiment 20000087 PARAMETER Experiment Name: At_100uM_ABA_Mutants_cDNA_P Parameter: Treatment Value: 100uM ABA vs. No Treatment
  misc_feature: MA Experiment ID: 20000088 Result: Up-regulated in Transcription
  misc_feature: MA Experiment 20000088 PARAMETER Experiment Name: At_100uM_ABA_Mutants_cDNA_P Parameter: Plant Line Value: Landsberg
  misc_feature: MA Experiment 20000088 PARAMETER Experiment Name: At_100uM_ABA_Mutants_cDNA_P Parameter: Timepoint (hr) Value: 6
  misc_feature: MA Experiment 20000088 PARAMETER Experiment Name: At_100uM_ABA_Mutants_cDNA_P Parameter: Tissue Value: Aerial
  misc_feature: MA Experiment 20000088 PARAMETER Experiment Name: At_100uM_ABA_Mutants_cDNA_P Parameter: Treatment Value: 100uM ABA vs. No Treatment
  misc_feature: MA Experiment ID: 20000089 Result: Up-regulated in Transcription
  misc_feature: MA Experiment ID: 20000090 Result: Up-regulated in Transcription
  misc_feature: MA Experiment ID: 20000117 Result: Up-regulated in Transcription
  misc_feature: MA Experiment 20000117 PARAMETER Experiment Name: At_100uM_ABA_Mutants_cDNA_P Parameter: Plant Line Value: Columbia
  misc_feature: MA Experiment 20000117 PARAMETER Experiment Name: At_100uM_ABA_Mutants_cDNA_P Parameter: Timepoint (hr) Value: 6
  misc_feature: MA Experiment 20000117 PARAMETER Experiment Name: At_100uM_ABA_Mutants_cDNA_P Parameter: Tissue Value: Aerial
  misc_feature: MA Experiment 20000117 PARAMETER Experiment Name: At_100uM_ABA_Mutants_cDNA_P Parameter: Treatment Value: 100uM ABA vs. No Treatment
  misc_feature: MA Experiment ID: 20000166 Result: Up-regulated in Transcription
  misc_feature: MA Experiment 20000166 PARAMETER Experiment Name: At_100uM_ABA_P Parameter: Age (day) Value: 14
  misc_feature: MA Experiment 20000166 PARAMETER Experiment Name: At_100uM_ABA_P Parameter: Organism Value: A. thaliana
  misc_feature: MA Experiment 20000166 PARAMETER Experiment Name: At_100uM_ABA_P Parameter: Plant Line Value: WS
  misc_feature: MA Experiment 20000166 PARAMETER Experiment Name: At_100uM_ABA_P Parameter: Timepoint (hr) Value: 1
  misc_feature: MA Experiment 20000166 PARAMETER Experiment Name: At_100uM_ABA_P Parameter: Tissue Value: Aerial
  misc_feature: MA Experiment 20000166 PARAMETER Experiment Name: At_100uM_ABA_P Parameter: Treatment Value: 100uM ABA vs. No Treatment
  misc_feature: MA Experiment ID: 20000182 Result: Up-regulated in Transcription
  misc_feature: MA Experiment 20000182 PARAMETER Experiment Name: At_2mM_SA_P Parameter: Age (day) Value: 14
  misc_feature: MA Experiment 20000182 PARAMETER Experiment Name: At_2mM_SA_P Parameter: Organism Value: A. thaliana
  misc_feature: MA Experiment 20000182 PARAMETER Experiment Name: At_2mM_SA_P Parameter: Plant Line Value: WS
  misc_feature: MA Experiment 20000182 PARAMETER Experiment Name: At_2mM_SA_P Parameter: Timepoint (hr) Value: 6
  misc_feature: MA Experiment 20000182 PARAMETER Experiment Name: At_2mM_SA_P Parameter: Tissue Value: Aerial
  misc_feature: MA Experiment 20000182 PARAMETER Experiment Name: At_2mM_SA_P Parameter: Treatment Value: 2mM SA vs. No Treatment
  misc_feature: MA Experiment ID: 20000184 Result: Down-regulated in Transcription
  misc_feature: MA Experiment 20000184 PARAMETER Experiment Name: At_Shoots__P Parameter: Age (day) Value: 7
  misc_feature: MA Experiment 20000184 PARAMETER Experiment Name: At_Shoots__P Parameter: Tissue Value: Shoots vs. Whole Plant
  misc_feature: MA Experiment ID: 20000213 Result: Up-regulated in Transcription
  misc_feature: MA Experiment 20000213 PARAMETER Experiment Name: At_4deg_Cold_P Parameter: Timepoint (hr) Value: 2
  misc_feature: MA Experiment ID: 20000264 Result: Up-regulated in Transcription
  misc_feature: MA Experiment 20000264 PARAMETER Experiment Name: At_Open_Flower_P Parameter: Age (day) Value: 21
  misc_feature: MA Experiment 20000264 PARAMETER Experiment Name: At_Open_Flower_P Parameter: Plant Line Value: WS
  misc_feature: MA Experiment 20000264 PARAMETER Experiment Name: At_Open_Flower_P Parameter: Tissue Value: Open Flower vs. Whole Plant
  misc_feature: MA Experiment ID: 20000437 Result: Up-regulated in Transcription
  misc_feature: MA Experiment 20000437 PARAMETER Experiment Name: At_Drought_P Parameter: Age (day) Value: 8
  misc_feature: MA Experiment 20000437 PARAMETER Experiment Name: At_Drought_P Parameter: Organism Value: A. thaliana
  misc_feature: MA Experiment 20000437 PARAMETER Experiment Name: At_Drought_P Parameter: Plant Line Value: WS
  misc_feature: MA Experiment 20000437 PARAMETER Experiment Name: At_Drought_P Parameter: Timepoint (hr) Value: 24
  misc_feature: MA Experiment 20000437 PARAMETER Experiment Name: At_Drought_P Parameter: Tissue Value: Whole Plant
  misc_feature: MA Experiment 20000437 PARAMETER Experiment Name: At_Drought_P Parameter: Treatment Value: Drought vs. No Drought
  misc_feature: MA Experiment ID: 20000439 Result: Up-regulated in Transcription
  misc_feature: MA Experiment 20000439 PARAMETER Experiment Name: At_Roots__P Parameter: Age (day) Value: 14 vs. 21
  misc_feature: MA Experiment 20000439 PARAMETER Experiment Name: At_Roots__P Parameter: Organism Value: A. thaliana
  misc_feature: MA Experiment 20000439 PARAMETER Experiment Name: At_Roots__P Parameter: Tissue Value: Roots vs. Whole Plant
  misc_feature: MA Experiment ID: 20000794 Result: Up-regulated in Transcription
  misc_feature: MA Experiment 20000794 PARAMETER Experiment Name: At_Petals_P Parameter: Age (day) Value: 23-25 days
  misc_feature: MA Experiment 20000794 PARAMETER Experiment Name: At_Petals_P Parameter: Plant Line Value: WS
  misc_feature: MA Experiment 20000794 PARAMETER Experiment Name: At_Petals_P Parameter: Tissue Value: Petals vs. Whole plant
  misc_feature: MA Experiment ID: 20001450 Result: Down-regulated in Transcription
  misc_feature: MA Experiment 20001450 PARAMETER Experiment Name: At_Far-red-induction_P Parameter: Age (day) Value: 7
  misc_feature: MA Experiment 20001450 PARAMETER Experiment Name: At_Far-red-induction_P Parameter: Light Value: Far-red vs. White
  misc_feature: MA Experiment 20001450 PARAMETER Experiment Name: At_Far-red-induction_P Parameter: Organism Value: A. thaliana
  misc_feature: MA Experiment 20001450 PARAMETER Experiment Name: At_Far-red-induction_P Parameter: Plant Line Value: Columbia
  misc_feature: MA Experiment 20001450 PARAMETER Experiment Name: At_Far-red-induction_P Parameter: Timepoint (hr) Value: 8
  misc_feature: MA Experiment 20001450 PARAMETER Experiment Name: At_Far-red-induction_P Parameter: Tissue Value: Whole Plant
  misc_feature: MA Experiment ID: 20001451 Result: Down-regulated in Transcription
  misc_feature: MA Experiment 20001451 PARAMETER Experiment Name: At_Far-red-induction_P Parameter: Age (day) Value: 7
  misc_feature: MA Experiment 20001451 PARAMETER Experiment Name: At_Far-red-induction_P Parameter: Light Value: Far-red vs. White
  misc_feature: MA Experiment 20001451 PARAMETER Experiment Name: At_Far-red-induction_P Parameter: Organism Value: A. thaliana
  misc_feature: MA Experiment 20001451 PARAMETER Experiment Name: At_Far-red-induction_P Parameter: Plant Line Value: Columbia
  misc_feature: MA Experiment 20001451 PARAMETER Experiment Name: At_Far-red-induction_P Parameter: Timepoint (hr) Value: 24
  misc_feature: MA Experiment 20001451 PARAMETER Experiment Name: At_Far-red-induction_P Parameter: Tissue Value: Whole Plant

SEQ ID NO: 32283 - protein, 232 aa, Arabidopsis thaliana; identical to SEQ ID NO: 28693
  peptide (1)..(232): Ceres Seq. ID no. 12711794
  misc_feature (72)..(181): Pfam Name: Glutathione peroxidase Pfam Description: Glutathione peroxidase
  misc_feature (64)..(231): Homolog of NCBI NO: 20138384 NR Description: Probable phospholipid hydroperoxide glutathione
  misc_feature (64)..(228): Homolog of NCBI NO: 6179604 NR Description: glutathione peroxidase-like protein GPX54Hv
  misc_feature (64)..(229): Homolog of NCBI NO: 21360380 NR Description: glutathione peroxidase 1 [Oryza sativa]
  misc_feature (64)..(229): Homolog of NCBI NO: 34334012 NR Description: cytosolic glutathione peroxidase [Triticum
  misc_feature (66)..(230): Homolog of NCBI NO: 20138151 NR Description: Probable phospholipid hydroperoxide glutathione
  misc_feature (64)..(229): Homolog of NCBI NO: 22268405 NR Description: putative glutathione peroxidase [Zea mays]
  misc_feature (65)..(228): Homolog of NCBI NO: 27544804 NR Description: phospholipid hydroperoxide glutathione
  misc_feature (54)..(228): Homolog of NCBI NO: 6179600 NR Description: GPX12Hv, glutathione peroxidase-like protein
  misc_feature (64)..(232): Homolog of NCBI NO: 20138157 NR Description: Probable phospholipid hydroperoxide glutathione
  misc_feature (1)..(232): Homolog of NCBI NO: 30681827 NR Description: glutathione peroxidase, putative [Arabidopsis

SEQ ID NO: 32284 - protein, 169 aa, Arabidopsis thaliana; identical to SEQ ID NO: 28163
  peptide (1)..(169): Ceres Seq. ID no. 12711795
  misc_feature (9)..(118): Pfam Name: Glutathione peroxidase Pfam Description: Glutathione peroxidase
  misc_feature (1)..(168): Homolog of NCBI NO: 20138384 NR Description: Probable phospholipid hydroperoxide glutathione
  misc_feature (1)..(165): Homolog of NCBI NO: 6179604 NR Description: glutathione peroxidase-like protein GPX54Hv
  misc_feature (1)..(166): Homolog of NCBI NO: 21360380 NR Description: glutathione peroxidase 1 [Oryza sativa]
  misc_feature (1)..(166): Homolog of NCBI NO: 34334012 NR Description: cytosolic glutathione peroxidase [Triticum
  misc_feature (3)..(167): Homolog of NCBI NO: 20138151 NR Description: Probable phospholipid hydroperoxide glutathione
  misc_feature (1)..(166): Homolog of NCBI NO: 22268405 NR Description: putative glutathione peroxidase [Zea mays]
  misc_feature (2)..(165): Homolog of NCBI NO: 27544804 NR Description: phospholipid hydroperoxide glutathione
  misc_feature (1)..(165): Homolog of NCBI NO: 6179600 NR Description: GPX12Hv, glutathione peroxidase-like protein
  misc_feature (1)..(169): Homolog of NCBI NO: 20138157 NR Description: Probable phospholipid hydroperoxide glutathione
  misc_feature (1)..(169): Homolog of NCBI NO: 30681827 NR Description: glutathione peroxidase, putative [Arabidopsis

SEQ ID NO: 32285 - DNA, 1645 bp, Arabidopsis thaliana; identical to SEQ ID NO: 28695
  misc_feature (1)..(1645): Ceres Seq. ID no. 12343397
  misc_feature: MA Experiment ID: 108462 Result: Down-regulated in Transcription
  misc_feature: MA Experiment 108462 PARAMETER Experiment Name: At_Germinating_Seeds_cDNA_P Parameter: Age (day) Value: 2 vs. 0
  misc_feature: MA Experiment 108462 PARAMETER Experiment Name: At_Germinating_Seeds_cDNA_P Parameter: Tissue Value: Germinating Seeds
  misc_feature: MA Experiment ID: 108463 Result: Down-regulated in Transcription
  misc_feature: MA Experiment 108463 PARAMETER Experiment Name: At_Germinating_Seeds_cDNA_P Parameter: Age (day) Value: 3 vs. 0
  misc_feature: MA Experiment 108463 PARAMETER Experiment Name: At_Germinating_Seeds_cDNA_P Parameter: Tissue Value: Germinating Seeds
  misc_feature: MA Experiment ID: 108573 Result: Up-regulated in Transcription
  misc_feature: MA Experiment 108573 PARAMETER Experiment Name: At_Drought_cDNA_P Parameter: Timepoint (hr) Value: 6
  misc_feature: MA Experiment 108573 PARAMETER Experiment Name: At_Drought_cDNA_P Parameter: Tissue Value: Aerial
  misc_feature: MA Experiment 108573 PARAMETER Experiment Name: At_Drought_cDNA_P Parameter: Treatment Value: Drought vs. No Drought
  misc_feature: MA Experiment ID: 108577 Result: Up-regulated in Transcription
  misc_feature: MA Experiment 108577 PARAMETER Experiment Name: At_42deg_Heat_cDNA_P Parameter: Temperature (deg C) Value: 42 vs. 22
  misc_feature: MA Experiment 108577 PARAMETER Experiment Name: At_42deg_Heat_cDNA_P Parameter: Timepoint (hr) Value: 6
  misc_feature: MA Experiment 108577 PARAMETER Experiment Name: At_42deg_Heat_cDNA_P Parameter: Tissue Value: Aerial
  misc_feature: MA Experiment ID: 20000087 Result: Down-regulated in Transcription
  misc_feature: MA Experiment 20000087 PARAMETER Experiment Name: At_100uM_ABA_Mutants_cDNA_P Parameter: Plant Line Value: WS
  misc_feature: MA Experiment 20000087 PARAMETER Experiment Name: At_100uM_ABA_Mutants_cDNA_P Parameter: Timepoint (hr) Value: 6
  misc_feature: MA Experiment 20000087 PARAMETER Experiment Name: At_100uM_ABA_Mutants_cDNA_P Parameter: Tissue Value: Aerial
  misc_feature: MA Experiment 20000087 PARAMETER Experiment Name: At_100uM_ABA_Mutants_cDNA_P Parameter: Treatment Value: 100uM ABA vs. No Treatment
  misc_feature: MA Experiment ID: 20000111 Result: Up-regulated in Transcription
  misc_feature: MA Experiment 20000111 PARAMETER Experiment Name: At_42deg_Heat_cDNA_P Parameter: Temperature (deg C) Value: 42 vs. 22
  misc_feature: MA Experiment 20000111 PARAMETER Experiment Name: At_42deg_Heat_cDNA_P Parameter: Timepoint (hr) Value: 6
  misc_feature: MA Experiment 20000111 PARAMETER Experiment Name: At_42deg_Heat_cDNA_P Parameter: Tissue Value: Aerial
  misc_feature: MA Experiment ID: 20000113 Result: Up-regulated in Transcription
  misc_feature: MA Experiment 20000113 PARAMETER Experiment Name: At_42deg_Heat_cDNA_P Parameter: Temperature (deg C) Value: 42 vs. 22
  misc_feature: MA Experiment 20000113 PARAMETER Experiment Name: At_42deg_Heat_cDNA_P Parameter: Timepoint (hr) Value: 8
  misc_feature: MA Experiment 20000113 PARAMETER Experiment Name: At_42deg_Heat_cDNA_P Parameter: Tissue Value: Aerial
  misc_feature: MA Experiment ID: 20000173 Result: Up-regulated in Transcription
  misc_feature: MA Experiment 20000173 PARAMETER Experiment Name: At_42deg_Heat_P Parameter: Age (day) Value: 14
  misc_feature: MA Experiment 20000173 PARAMETER Experiment Name: At_42deg_Heat_P Parameter: Organism Value: A. thaliana
  misc_feature: MA Experiment 20000173 PARAMETER Experiment Name: At_42deg_Heat_P Parameter: Plant Line Value: WS
  misc_feature: MA Experiment 20000173 PARAMETER Experiment Name: At_42deg_Heat_P Parameter: Temperature (deg C) Value: 42 vs. 22
  misc_feature: MA Experiment 20000173 PARAMETER Experiment Name: At_42deg_Heat_P Parameter: Timepoint (hr) Value: 6
  misc_feature: MA Experiment 20000173 PARAMETER Experiment Name: At_42deg_Heat_P Parameter: Tissue Value: Aerial
  misc_feature: MA Experiment ID: 20000179 Result: Down-regulated in Transcription
  misc_feature: MA Experiment 20000179 PARAMETER Experiment Name: At_Germinating_Seeds_P Parameter: Age (hr) Value: 6 vs. 0
  misc_feature: MA Experiment 20000179 PARAMETER Experiment Name: At_Germinating_Seeds_P Parameter: Tissue Value: Germinating Seeds
  misc_feature: MA Experiment ID: 20000180 Result: Down-regulated in Transcription
  misc_feature: MA Experiment 20000180 PARAMETER Experiment Name: At_Germinating_Seeds_P Parameter: Age (hr) Value: 24 vs. 0
  misc_feature: MA Experiment 20000180 PARAMETER Experiment Name: At_Germinating_Seeds_P Parameter: Tissue Value: Germinating Seeds
  misc_feature: MA Experiment ID: 20001557 Result: Up-regulated in Transcription
  misc_feature: MA Experiment 20001557 PARAMETER Experiment Name: At_Drought_Soil_Dry_P Parameter: Age (day) Value: 27
  misc_feature: MA Experiment 20001557 PARAMETER Experiment Name: At_Drought_Soil_Dry_P Parameter: Organism Value: A. thaliana
  misc_feature: MA Experiment 20001557 PARAMETER Experiment Name: At_Drought_Soil_Dry_P Parameter: Plant Line Value: WS
  misc_feature: MA Experiment 20001557 PARAMETER Experiment Name: At_Drought_Soil_Dry_P Parameter: Post Timepoint (hr) Value: 3
  misc_feature: MA Experiment 20001557 PARAMETER Experiment Name: At_Drought_Soil_Dry_P Parameter: Post-Treatment Value: Re-Water vs. No Drought
  misc_feature: MA Experiment 20001557 PARAMETER Experiment Name: At_Drought_Soil_Dry_P Parameter: Timepoint (day) Value: 13
  misc_feature: MA Experiment 20001557 PARAMETER Experiment Name: At_Drought_Soil_Dry_P Parameter: Treatment Value: Drought vs. No Drought

SEQ ID NO: 32286 - protein, 408 aa, Arabidopsis thaliana; identical to SEQ ID NO: 28696
  peptide (1)..(408): Ceres Seq. ID no. 12343398
  misc_feature (48)..(251): Pfam Name: DEAD/DEAH box helicase Pfam Description: DEAD/DEAH box helicase
  misc_feature (14)..(408): Homolog of NCBI NO: 29612461 NR Description: Similar to eukaryotic translation initiation
  misc_feature (19)..(408): Homolog of NCBI NO: 28277876 NR Description: Unknown (protein for MGC:56139) [Danio rerio]
  misc_feature (12)..(408): Homolog of NCBI NO: 19528517 NR Description: RE50350p [Drosophila melanogaster]
  misc_feature (12)..(408): Homolog of NCBI NO: 24645031 NR Description: CG7483-PA [Drosophila melanogaster]
  misc_feature (13)..(408): Homolog of NCBI NO: 7443503 NR Description: translation initiation factor - garden pea
  misc_feature (18)..(408): Homolog of NCBI NO: 1170507 NR Description: Eukaryotic initiation factor 4A-3 (eIF-4A-3)
  misc_feature (12)..(408): Homolog of NCBI NO: 34896594 NR Description: putative translation initiation factor [Oryza
  misc_feature (18)..(408): Homolog of NCBI NO: 11277760 NR Description: RNA helicase RH2 [imported] - Arabidopsis
  misc_feature (1)..(408): Homolog of NCBI NO: 15215678 NR Description: AT3g19760/MMB12_21 [Arabidopsis thaliana]
  misc_feature (1)..(408): Homolog of NCBI NO: 15230945 NR Description: eukaryotic translation initiation factor 4A

SEQ ID NO: 32287 - protein, 391 aa, Arabidopsis thaliana; identical to SEQ ID NO: 28697
  peptide (1)..(391): Ceres Seq. ID no. 12343399
  misc_feature (31)..(234): Pfam Name: DEAD/DEAH box helicase Pfam Description: DEAD/DEAH box helicase
  misc_feature (1)..(391): Homolog of NCBI NO: 29612461 NR Description: Similar to eukaryotic translation initiation
  misc_feature (2)..(391): Homolog of NCBI NO: 28277876 NR Description: Unknown (protein for MGC:56139) [Danio rerio]
  misc_feature (1)..(391): Homolog of NCBI NO: 19528517 NR Description: RE50350p [Drosophila melanogaster]
  misc_feature (1)..(391): Homolog of NCBI NO: 24645031 NR Description: CG7483-PA [Drosophila melanogaster]
  misc_feature (1)..(391): Homolog of NCBI NO: 7443503 NR Description: translation initiation factor - garden pea
  misc_feature (1)..(391): Homolog of NCBI NO: 1170507 NR Description: Eukaryotic initiation factor 4A-3 (eIF-4A-3)
  misc_feature (1)..(391): Homolog of NCBI NO: 34896594 NR Description: putative translation initiation factor [Oryza
  misc_feature (1)..(391): Homolog of NCBI NO: 11277760 NR Description: RNA helicase RH2 [imported] - Arabidopsis
  misc_feature (1)..(391): Homolog of NCBI NO: 15215678 NR Description: AT3g19760/MMB12_21 [Arabidopsis thaliana]
  misc_feature (1)..(391): Homolog of NCBI NO: 15230945 NR Description: eukaryotic translation initiation factor 4A

SEQ ID NO: 32288 - protein, 369 aa, Arabidopsis thaliana; identical to SEQ ID NO: 28698
  peptide (1)..(369): Ceres Seq. ID no. 12343400
  misc_feature (9)..(212): Pfam Name: DEAD/DEAH box helicase Pfam Description: DEAD/DEAH box helicase
  misc_feature (1)..(369): Homolog of NCBI NO: 29612461 NR Description: Similar to eukaryotic translation initiation
  misc_feature (1)..(369): Homolog of NCBI NO: 28277876 NR Description: Unknown (protein for MGC:56139) [Danio rerio]
  misc_feature (1)..(369): Homolog of NCBI NO: 19528517 NR Description: RE50350p [Drosophila melanogaster]
  misc_feature (1)..(369): Homolog of NCBI NO: 24645031 NR Description: CG7483-PA [Drosophila melanogaster]
  misc_feature (1)..(369): Homolog of NCBI NO: 7443503 NR Description: translation initiation factor - garden pea
  misc_feature (1)..(369): Homolog of NCBI NO: 1170507 NR Description: Eukaryotic initiation factor 4A-3 (eIF-4A-3)
  misc_feature (1)..(369): Homolog of NCBI NO: 34896594 NR Description: putative translation initiation factor [Oryza
  misc_feature (1)..(369): Homolog of NCBI NO: 11277760 NR Description: RNA helicase RH2 [imported] - Arabidopsis
  misc_feature (1)..(369): Homolog of NCBI NO: 15215678 NR Description: AT3g19760/MMB12_21 [Arabidopsis thaliana]
  misc_feature (1)..(369): Homolog of NCBI NO: 15230945 NR Description: eukaryotic translation initiation factor 4A

SEQ ID NO: 32289 - DNA, 1047 bp, Arabidopsis thaliana; identical to SEQ ID NO: 28699
  misc_feature (1)..(1047): Ceres Seq. ID no. 12333793
  misc_feature: MA Experiment ID: 20000171 Result: Down-regulated in Transcription
  misc_feature: MA Experiment 20000171 PARAMETER Experiment Name: At_42deg_Heat_P Parameter: Age (day) Value: 14
  misc_feature: MA Experiment 20000171 PARAMETER Experiment Name: At_42deg_Heat_P Parameter: Organism Value: A. thaliana
  misc_feature: MA Experiment 20000171 PARAMETER Experiment Name: At_42deg_Heat_P Parameter: Plant Line Value: WS
  misc_feature: MA Experiment 20000171 PARAMETER Experiment Name: At_42deg_Heat_P Parameter: Temperature (deg C) Value: 42 vs. 22
  misc_feature: MA Experiment 20000171 PARAMETER Experiment Name: At_42deg_Heat_P Parameter: Timepoint (hr) Value: 1
  misc_feature: MA Experiment 20000171 PARAMETER Experiment Name: At_42deg_Heat_P Parameter: Tissue Value: Aerial
  misc_feature: MA Experiment ID: 20000173 Result: Down-regulated in Transcription
  misc_feature: MA Experiment 20000173 PARAMETER Experiment Name: At_42deg_Heat_P Parameter: Age (day) Value: 14
  misc_feature: MA Experiment 20000173 PARAMETER Experiment Name: At_42deg_Heat_P Parameter: Organism Value: A. thaliana
  misc_feature: MA Experiment 20000173 PARAMETER Experiment Name: At_42deg_Heat_P Parameter: Plant Line Value: WS
  misc_feature: MA Experiment 20000173 PARAMETER Experiment Name: At_42deg_Heat_P Parameter: Temperature (deg C) Value: 42 vs. 22
  misc_feature: MA Experiment 20000173 PARAMETER Experiment Name: At_42deg_Heat_P Parameter: Timepoint (hr) Value: 6
  misc_feature: MA Experiment 20000173 PARAMETER Experiment Name: At_42deg_Heat_P Parameter: Tissue Value: Aerial
  misc_feature: MA Experiment ID: 20000182 Result: Up-regulated in Transcription
  misc_feature: MA Experiment 20000182 PARAMETER Experiment Name: At_2mM_SA_P Parameter: Age (day) Value: 14
  misc_feature: MA Experiment 20000182 PARAMETER Experiment Name: At_2mM_SA_P Parameter: Organism Value: A. thaliana
  misc_feature: MA Experiment 20000182 PARAMETER Experiment Name: At_2mM_SA_P Parameter: Plant Line Value: WS
  misc_feature: MA Experiment 20000182 PARAMETER Experiment Name: At_2mM_SA_P Parameter: Timepoint (hr) Value: 6
  misc_feature: MA Experiment 20000182 PARAMETER Experiment Name: At_2mM_SA_P Parameter: Tissue Value: Aerial
  misc_feature: MA Experiment 20000182 PARAMETER Experiment Name: At_2mM_SA_P Parameter: Treatment Value: 2mM SA vs. No Treatment
  misc_feature: MA Experiment ID: 20000185 Result: Down-regulated in Transcription
  misc_feature: MA Experiment 20000185 PARAMETER Experiment Name: At_Roots__P Parameter: Age (day) Value: 7 vs. 21
  misc_feature: MA Experiment 20000185 PARAMETER Experiment Name: At_Roots__P Parameter: Organism Value: A. thaliana
  misc_feature: MA Experiment 20000185 PARAMETER Experiment Name: At_Roots__P Parameter: Tissue Value: Roots vs. Whole Plant
  misc_feature: MA Experiment ID: 20000234 Result: Down-regulated in Transcription
  misc_feature: MA Experiment 20000234 PARAMETER Experiment Name: At_Siliques_P Parameter: Age (day) Value: 21
  misc_feature: MA Experiment 20000234 PARAMETER Experiment Name: At_Siliques_P Parameter: Organism Value: A. thaliana
  misc_feature: MA Experiment 20000234 PARAMETER Experiment Name: At_Siliques_P Parameter: Plant Line Value: WS
  misc_feature: MA Experiment 20000234 PARAMETER Experiment Name: At_Siliques_P Parameter: Tissue Value: Less Than 5mm Siliques vs. Whole Plant
  misc_feature: MA Experiment ID: 20000264 Result: Down-regulated in Transcription
  misc_feature: MA Experiment 20000264 PARAMETER Experiment Name: At_Open_Flower_P Parameter: Age (day) Value: 21
  misc_feature: MA Experiment 20000264 PARAMETER Experiment Name: At_Open_Flower_P Parameter: Plant Line Value: WS
  misc_feature: MA Experiment 20000264 PARAMETER Experiment Name: At_Open_Flower_P Parameter: Tissue Value: Open Flower vs. Whole Plant
  misc_feature: MA Experiment ID: 20000265 Result: Down-regulated in Transcription
  misc_feature: MA Experiment 20000265 PARAMETER Experiment Name: At_Open_Flower_P Parameter: Age (day) Value: 21
  misc_feature: MA Experiment 20000265 PARAMETER Experiment Name: At_Open_Flower_P Parameter: Plant Line Value: WS
  misc_feature: MA Experiment 20000265 PARAMETER Experiment Name: At_Open_Flower_P Parameter: Tissue Value: Closed Flower vs. Whole Plant
  misc_feature: MA Experiment ID: 20000267 Result: Up-regulated in Transcription
  misc_feature: MA Experiment 20000267 PARAMETER Experiment Name: At_Drought_P Parameter: Age (day) Value: 7
  misc_feature: MA Experiment 20000267 PARAMETER Experiment Name: At_Drought_P Parameter: Organism Value: A. thaliana
  misc_feature: MA Experiment 20000267 PARAMETER Experiment Name: At_Drought_P Parameter: Plant Line Value: WS
  misc_feature: MA Experiment 20000267 PARAMETER Experiment Name: At_Drought_P Parameter: Timepoint (hr) Value: 6
  misc_feature: MA Experiment 20000267 PARAMETER Experiment Name: At_Drought_P Parameter: Tissue Value: Whole Plant
  misc_feature: MA Experiment 20000267 PARAMETER Experiment Name: At_Drought_P Parameter: Treatment Value: Drought vs. No Drought
  misc_feature: MA Experiment ID: 20000286 Result: Down-regulated in Transcription
  misc_feature: MA Experiment 20000286 PARAMETER Experiment Name: At_Open_Flower_P Parameter: Age (day) Value: 21
  misc_feature: MA Experiment 20000286 PARAMETER Experiment Name: At_Open_Flower_P Parameter: Plant Line Value: WS
  misc_feature: MA Experiment 20000286 PARAMETER Experiment Name: At_Open_Flower_P Parameter: Tissue Value: Half Open vs. Whole Plant
  misc_feature: MA Experiment ID: 20000436 Result: Up-regulated in Transcription
  misc_feature: MA Experiment 20000436 PARAMETER Experiment Name: At_Drought_P Parameter: Age (day) Value: 7
  misc_feature: MA Experiment 20000436 PARAMETER Experiment Name: At_Drought_P Parameter: Organism Value: A. thaliana
  misc_feature: MA Experiment 20000436 PARAMETER Experiment Name: At_Drought_P Parameter: Plant Line Value: WS
  misc_feature: MA Experiment 20000436 PARAMETER Experiment Name: At_Drought_P Parameter: Timepoint (hr) Value: 12
  misc_feature: MA Experiment 20000436 PARAMETER Experiment Name: At_Drought_P Parameter: Tissue Value: Whole Plant
  misc_feature: MA Experiment 20000436 PARAMETER Experiment Name: At_Drought_P Parameter: Treatment Value: Drought vs. No Drought
  misc_feature: MA Experiment ID: 20000438 Result: Down-regulated in Transcription
  misc_feature: MA Experiment 20000438 PARAMETER Experiment Name: At_Shoots__P Parameter: Age (day) Value: 14
  misc_feature: MA Experiment 20000438 PARAMETER Experiment Name: At_Shoots__P Parameter: Tissue Value: Shoots vs. Whole Plant
  misc_feature: MA Experiment ID: 20000439 Result: Down-regulated in Transcription
  misc_feature: MA Experiment 20000439 PARAMETER Experiment Name: At_Roots__P Parameter: Age (day) Value: 14 vs. 21
  misc_feature: MA Experiment 20000439 PARAMETER Experiment Name: At_Roots__P Parameter: Organism Value: A. thaliana
  misc_feature: MA Experiment 20000439 PARAMETER Experiment Name: At_Roots__P Parameter: Tissue Value: Roots vs. Whole Plant
  misc_feature: MA Experiment ID: 20000441 Result: Up-regulated in Transcription
  misc_feature: MA Experiment 20000441 PARAMETER Experiment Name: At_1uM_BR-BRZ__P Parameter: Tissue Value: Shoot Apices
  misc_feature: MA Experiment 20000441 PARAMETER Experiment Name: At_1uM_BR-BRZ__P Parameter: Treatment Value: 1uM BR vs. No Treatment
  misc_feature: MA Experiment ID: 20000443 Result: Up-regulated in Transcription
  misc_feature: MA Experiment 20000443 PARAMETER Experiment Name: At_1uM_BR-BRZ__P Parameter: Tissue Value: Shoot Apices
  misc_feature: MA Experiment 20000443 PARAMETER Experiment Name: At_1uM_BR-BRZ__P Parameter: Treatment Value: 1uM BRZ vs. No Treatment
  misc_feature: MA Experiment ID: 20000453 Result: Up-regulated in Transcription
  misc_feature: MA Experiment 20000453 PARAMETER Experiment Name: At_100uM_ABA_P Parameter: Age (day) Value: 15
  misc_feature: MA Experiment 20000453 PARAMETER Experiment Name: At_100uM_ABA_P Parameter: Organism Value: A. thaliana
  misc_feature: MA Experiment 20000453 PARAMETER Experiment Name: At_100uM_ABA_P Parameter: Plant Line Value: WS
  misc_feature: MA Experiment 20000453 PARAMETER Experiment Name: At_100uM_ABA_P Parameter: Timepoint (hr) Value: 24
  misc_feature: MA Experiment 20000453 PARAMETER Experiment Name: At_100uM_ABA_P Parameter: Tissue Value: Aerial
  misc_feature: MA Experiment 20000453 PARAMETER Experiment Name: At_100uM_ABA_P Parameter: Treatment Value: 100uM ABA vs. No Treatment
  misc_feature: MA Experiment ID: 20001554 Result: Up-regulated in Transcription
  misc_feature: MA Experiment 20001554 PARAMETER Experiment Name: At_Drought_Soil_Dry_P Parameter: Age (day) Value: 21
  misc_feature: MA Experiment 20001554 PARAMETER Experiment Name: At_Drought_Soil_Dry_P Parameter: Organism Value: A. thaliana
  misc_feature: MA Experiment 20001554 PARAMETER Experiment Name: At_Drought_Soil_Dry_P Parameter: Plant Line Value: WS
  misc_feature: MA Experiment 20001554 PARAMETER Experiment Name: At_Drought_Soil_Dry_P Parameter: Post Timepoint (hr) Value: None
  misc_feature: MA Experiment 20001554 PARAMETER Experiment Name: At_Drought_Soil_Dry_P Parameter: Post-Treatment Value: None
  misc_feature: MA Experiment 20001554 PARAMETER Experiment Name: At_Drought_Soil_Dry_P Parameter: Timepoint (day) Value: 7
  misc_feature: MA Experiment 20001554 PARAMETER Experiment Name: At_Drought_Soil_Dry_P Parameter: Treatment Value: Drought vs. No Drought
  misc_feature: MA Experiment ID: 20001555 Result: Up-regulated in Transcription
  misc_feature: MA Experiment 20001555 PARAMETER Experiment Name: At_Drought_Soil_Dry_P Parameter: Age (day) Value: 24
  misc_feature: MA Experiment 20001555 PARAMETER Experiment Name: At_Drought_Soil_Dry_P Parameter: Organism Value: A. thaliana
  misc_feature: MA Experiment 20001555 PARAMETER Experiment Name: At_Drought_Soil_Dry_P Parameter: Plant Line Value: WS
  misc_feature: MA Experiment 20001555 PARAMETER Experiment Name: At_Drought_Soil_Dry_P Parameter: Post Timepoint (hr) Value: None
  misc_feature: MA Experiment 20001555 PARAMETER Experiment Name: At_Drought_Soil_Dry_P Parameter: Post-Treatment Value: None
  misc_feature: MA Experiment 20001555 PARAMETER Experiment Name: At_Drought_Soil_Dry_P Parameter: Timepoint (day) Value: 10
  misc_feature: MA Experiment 20001555 PARAMETER Experiment Name: At_Drought_Soil_Dry_P Parameter: Treatment Value: Drought vs. No Drought
  misc_feature: MA Experiment ID: 20001557 Result: Up-regulated in Transcription
  misc_feature: MA Experiment 20001557 PARAMETER Experiment Name: At_Drought_Soil_Dry_P Parameter: Age (day) Value: 27
  misc_feature: MA Experiment 20001557 PARAMETER Experiment Name: At_Drought_Soil_Dry_P Parameter: Organism Value: A. thaliana
  misc_feature: MA Experiment 20001557 PARAMETER Experiment Name: At_Drought_Soil_Dry_P Parameter: Plant Line Value: WS
  misc_feature: MA Experiment 20001557 PARAMETER Experiment Name: At_Drought_Soil_Dry_P Parameter: Post Timepoint (hr) Value: 3
  misc_feature: MA Experiment 20001557 PARAMETER Experiment Name: At_Drought_Soil_Dry_P Parameter: Post-Treatment Value: Re-Water vs. No Drought
  misc_feature: MA Experiment 20001557 PARAMETER Experiment Name: At_Drought_Soil_Dry_P Parameter: Timepoint (day) Value: 13
  misc_feature: MA Experiment 20001557 PARAMETER Experiment Name: At_Drought_Soil_Dry_P Parameter: Treatment Value: Drought vs. No Drought
  misc_feature: MA Experiment ID: 20001757 Result: Down-regulated in Transcription
  misc_feature: MA Experiment 20001757 PARAMETER Experiment Name: At_50mM_NH4NO3_L-to-H_P Parameter: Timepoint (hr) Value: 6
  misc_feature: MA Experiment 20001757 PARAMETER Experiment Name: At_50mM_NH4NO3_L-to-H_P Parameter: Tissue Value: Leaf
  misc_feature: MA Experiment 20001757 PARAMETER Experiment Name: At_50mM_NH4NO3_L-to-H_P Parameter: Treatment Value: 50mM NH4NO3 vs 100mM Mannitol

SEQ ID NO: 32290 - protein, 265 aa, Arabidopsis thaliana; identical to SEQ ID NO: 28700
  peptide (1)..(265): Ceres Seq. ID no. 12333794
  misc_feature (115)..(257): Homolog of NCBI NO: 14625425 NR Description: calmodulin NtCaM13 [Nicotiana tabacum]
  misc_feature (119)..(256): Homolog of NCBI NO: 34895640 NR Description: OSJNBa0083M16.33 [Oryza sativa (japonica
  misc_feature (119)..(257): Homolog of NCBI NO: 18408502 NR Description: calmodulin-related protein
  misc_feature (119)..(257): Homolog of NCBI NO: 21618074 NR Description: calmodulin-related protein [Arabidopsis thaliana]
  misc_feature (84)..(256): Homolog of NCBI NO: 15221781 NR Description: putative calmodulin; protein id: At1g24620.1
  misc_feature (119)..(256): Homolog of NCBI NO: 19386815 NR Description: B1147A04.10 [Oryza sativa (japonica
  misc_feature (50)..(256): Homolog of NCBI NO: 15228219 NR Description: calmodulin-like protein; protein id: At3g10190.1
  misc_feature (50)..(265): Homolog of NCBI NO: 322474 NR Description: calmodulin-related protein (clone PM129) -
  misc_feature (50)..(265): Homolog of NCBI NO: 21536925 NR Description: calmodulin-like protein [Arabidopsis thaliana]
  misc_feature (50)..(265): Homolog of NCBI NO: 15227349 NR Description: calmodulin-like protein

SEQ ID NO: 32291 - protein, 216 aa, Arabidopsis thaliana; identical to SEQ ID NO: 28701
  peptide (1)..(216): Ceres Seq. ID no. 12333795
  misc_feature (66)..(208): Homolog of NCBI NO: 14625425 NR Description: calmodulin NtCaM13 [Nicotiana tabacum]
  misc_feature (70)..(207): Homolog of NCBI NO: 34895640 NR Description: OSJNBa0083M16.33 [Oryza sativa (japonica
  misc_feature (70)..(208): Homolog of NCBI NO: 18408502 NR Description: calmodulin-related protein
  misc_feature (70)..(208): Homolog of NCBI NO: 21618074 NR Description: calmodulin-related protein [Arabidopsis thaliana]
  misc_feature (35)..(207): Homolog of NCBI NO: 15221781 NR Description: putative calmodulin; protein id: At1g24620.1
  misc_feature (70)..(207): Homolog of NCBI NO: 19386815 NR Description: B1147A04.10 [Oryza sativa (japonica
  misc_feature (1)..(207): Homolog of NCBI NO: 15228219 NR Description: calmodulin-like protein; protein id: At3g10190.1
  misc_feature (1)..(216): Homolog of NCBI NO: 322474 NR Description: calmodulin-related protein (clone PM129) -
  misc_feature (1)..(216): Homolog of NCBI NO: 21536925 NR Description: calmodulin-like protein [Arabidopsis thaliana]
  misc_feature (1)..(216): Homolog of NCBI NO: 15227349 NR Description: calmodulin-like protein

SEQ ID NO: 32292 - DNA, 1351 bp, Arabidopsis thaliana; identical to SEQ ID NO: 24717
  misc_feature (1)..(1351): Ceres Seq. ID no. 12334222
  misc_feature: MA Experiment ID: 108433 Result: Down-regulated in Transcription
  misc_feature: MA Experiment 108433 PARAMETER Experiment Name: At_rhl_Mutant2_cDNA_P Parameter: Age (day) Value: 7
  misc_feature: MA Experiment 108433 PARAMETER Experiment Name: At_rhl_Mutant2_cDNA_P Parameter: Organism Value: A. thaliana
  misc_feature: MA Experiment 108433 PARAMETER Experiment Name: At_rhl_Mutant2_cDNA_P Parameter: Plant Line Value: rhl Mutant vs. wt landsburg
  misc_feature: MA Experiment 108433 PARAMETER Experiment Name: At_rhl_Mutant2_cDNA_P Parameter: Tissue Value: Roots
  misc_feature: MA Experiment ID: 108434 Result: Up-regulated in Transcription
  misc_feature: MA Experiment 108434 PARAMETER Experiment Name: At_Root_Tips_cDNA_P Parameter: Tissue Value: Root Tips
  misc_feature: MA Experiment ID: 108462 Result: Down-regulated in Transcription
  misc_feature: MA Experiment 108462 PARAMETER Experiment Name: At_Germinating_Seeds_cDNA_P Parameter: Age (day) Value: 2 vs. 0
  misc_feature: MA Experiment 108462 PARAMETER Experiment Name: At_Germinating_Seeds_cDNA_P Parameter: Tissue Value: Germinating Seeds
  misc_feature: MA Experiment ID: 108463 Result: Down-regulated in Transcription
  misc_feature: MA Experiment 108463 PARAMETER Experiment Name: At_Germinating_Seeds_cDNA_P Parameter: Age (day) Value: 3 vs. 0
  misc_feature: MA Experiment 108463 PARAMETER Experiment Name: At_Germinating_Seeds_cDNA_P Parameter: Tissue Value: Germinating Seeds
  misc_feature: MA Experiment ID: 108489 Result: Up-regulated in Transcription
  misc_feature: MA Experiment ID: 108573 Result: Down-regulated in Transcription
  misc_feature: MA Experiment 108573 PARAMETER Experiment Name: At_Drought_cDNA_P Parameter: Timepoint (hr) Value: 6
  misc_feature: MA Experiment 108573 PARAMETER Experiment Name: At_Drought_cDNA_P Parameter: Tissue Value: Aerial
  misc_feature: MA Experiment 108573 PARAMETER Experiment Name: At_Drought_cDNA_P Parameter: Treatment Value: Drought vs. No Drought
  misc_feature: MA Experiment ID: 20001557 Result: Up-regulated in Transcription
  misc_feature: MA Experiment 20001557 PARAMETER Experiment Name: At_Drought_Soil_Dry_P Parameter: Age (day) Value: 27
  misc_feature: MA Experiment 20001557 PARAMETER Experiment Name: At_Drought_Soil_Dry_P Parameter: Organism Value: A. thaliana
  misc_feature: MA Experiment 20001557 PARAMETER Experiment Name: At_Drought_Soil_Dry_P Parameter: Plant Line Value: WS
  misc_feature: MA Experiment 20001557 PARAMETER Experiment Name: At_Drought_Soil_Dry_P Parameter: Post Timepoint (hr) Value: 3
  misc_feature: MA Experiment 20001557 PARAMETER Experiment Name: At_Drought_Soil_Dry_P Parameter: Post-Treatment Value: Re-Water vs. No Drought
  misc_feature: MA Experiment 20001557 PARAMETER Experiment Name: At_Drought_Soil_Dry_P Parameter: Timepoint (day) Value: 13
  misc_feature: MA Experiment 20001557 PARAMETER Experiment Name: At_Drought_Soil_Dry_P Parameter: Treatment Value: Drought vs. No Drought
  misc_feature: MA Experiment ID: 20001558 Result: Up-regulated in Transcription
  misc_feature: MA Experiment 20001558 PARAMETER Experiment Name: At_Drought_Soil_Dry_P Parameter: Age (day) Value: 27
  misc_feature: MA Experiment 20001558 PARAMETER Experiment Name: At_Drought_Soil_Dry_P Parameter: Organism Value: A. thaliana
  misc_feature: MA Experiment 20001558 PARAMETER Experiment Name: At_Drought_Soil_Dry_P Parameter: Plant Line Value: WS
  misc_feature: MA Experiment 20001558 PARAMETER Experiment Name: At_Drought_Soil_Dry_P Parameter: Post Timepoint (hr) Value: 6
  misc_feature: MA Experiment 20001558 PARAMETER Experiment Name: At_Drought_Soil_Dry_P Parameter: Post-Treatment Value: Re-Water vs. No Drought
  misc_feature: MA Experiment 20001558 PARAMETER Experiment Name: At_Drought_Soil_Dry_P Parameter: Timepoint (day) Value: 13
  misc_feature: MA Experiment 20001558 PARAMETER Experiment Name: At_Drought_Soil_Dry_P Parameter: Treatment Value: Drought vs. No Drought
  misc_feature: MA Experiment ID: 20001560 Result: Up-regulated in Transcription
  misc_feature: MA Experiment 20001560 PARAMETER Experiment Name: At_Drought_Soil_Dry_P Parameter: Age (day) Value: 28
  misc_feature: MA Experiment 20001560 PARAMETER Experiment Name: At_Drought_Soil_Dry_P Parameter: Organism Value: A. thaliana
  misc_feature: MA Experiment 20001560 PARAMETER Experiment Name: At_Drought_Soil_Dry_P Parameter: Plant Line Value: WS
  misc_feature: MA Experiment 20001560 PARAMETER Experiment Name: At_Drought_Soil_Dry_P Parameter: Post Timepoint (hr) Value: None
  misc_feature: MA Experiment 20001560 PARAMETER Experiment Name: At_Drought_Soil_Dry_P Parameter: Post-Treatment Value: None
  misc_feature: MA Experiment 20001560 PARAMETER Experiment Name: At_Drought_Soil_Dry_P Parameter: Timepoint (day) Value: 14
  misc_feature: MA Experiment 20001560 PARAMETER Experiment Name: At_Drought_Soil_Dry_P Parameter: Treatment Value: Drought vs. No Drought
  misc_feature: MA Experiment ID: 20001757 Result: Up-regulated in Transcription
  misc_feature: MA Experiment 20001757 PARAMETER Experiment Name: At_50mM_NH4NO3_L-to-H_P Parameter: Timepoint (hr) Value: 6
  misc_feature: MA Experiment 20001757 PARAMETER Experiment Name: At_50mM_NH4NO3_L-to-H_P Parameter: Tissue Value: Leaf
  misc_feature: MA Experiment 20001757 PARAMETER Experiment Name: At_50mM_NH4NO3_L-to-H_P Parameter: Treatment Value: 50mM NH4NO3 vs 100mM Mannitol

SEQ ID NO: 32293 - protein, 309 aa, Arabidopsis thaliana; identical to SEQ ID NO: 24718
  peptide (1)..(309): Ceres Seq. ID no. 12334223
  misc_feature (30)..(303): Pfam Name: Eukaryotic porin Pfam Description: Eukaryotic porin
  misc_feature (30)..(303): Pfam Name: Eukaryotic porin Pfam Description: Eukaryotic porin
  misc_feature (213)..(309): Homolog of NCBI NO: 34903264 NR Description: unnamed protein product [Oryza sativa (japonica
  misc_feature (218)..(309): Homolog of NCBI NO: 2982293 NR Description: ISP42-like protein [Picea mariana]
  misc_feature (73)..(105): Homolog of NCBI NO: 25405370 NR Description: hypothetical protein F14I3.2 [imported] -
  misc_feature (137)..(306): Homolog of NCBI NO: 25405370 NR Description: hypothetical protein F14I3.2 [imported] -
  misc_feature (1)..(105): Homolog of NCBI NO: 13162531 NR Description: Hypothetical protein [Arabidopsis thaliana]
  misc_feature (213)..(309): Homolog of NCBI NO: 34903264 NR Description: unnamed protein product [Oryza sativa (japonica
  misc_feature (73)..(105): Homolog of NCBI NO: 25405370 NR Description: hypothetical protein F14I3.2 [imported] -
  misc_feature (1)..(105): Homolog of NCBI NO: 13162531 NR Description: Hypothetical protein [Arabidopsis thaliana]
  misc_feature (1)..(309): Homolog of NCBI NO: 15231008 NR Description: membrane import protein, putative
  misc_feature (137)..(309): Homolog of NCBI NO: 11994775 NR Description: membrane import protein-like [Arabidopsis
  misc_feature (1)..(105): Homolog of NCBI NO: 11994775 NR Description: membrane import protein-like [Arabidopsis
  misc_feature (1)..(306): Homolog of NCBI NO: 15222963 NR Description: hypothetical protein; protein id: At1g50400.1
  misc_feature (137)..(306): Homolog of NCBI NO: 13162531 NR Description: Hypothetical protein [Arabidopsis thaliana]
  misc_feature (137)..(306): Homolog of NCBI NO: 25405370 NR Description: hypothetical protein F14I3.2 [imported] -
  misc_feature (218)..(309): Homolog of NCBI NO: 2982293 NR Description: ISP42-like protein [Picea mariana]
  misc_feature (137)..(306): Homolog of NCBI NO: 13162531 NR Description: Hypothetical protein [Arabidopsis thaliana]
  misc_feature (1)..(306): Homolog of NCBI NO: 15222963 NR Description: hypothetical protein; protein id: At1g50400.1
  misc_feature (1)..(105): Homolog of NCBI NO: 11994775 NR Description: membrane import protein-like [Arabidopsis
  misc_feature (137)..(309): Homolog of NCBI NO: 11994775 NR Description: membrane import protein-like [Arabidopsis
  misc_feature (1)..(309): Homolog of NCBI NO: 15231008 NR Description: membrane import protein, putative

SEQ ID NO: 32294 - protein, 267 aa, Arabidopsis thaliana; identical to SEQ ID NO: 24719
  peptide (1)..(267): Ceres Seq. ID no. 12334224
  misc_feature (1)..(261): Pfam Name: Eukaryotic porin Pfam Description: Eukaryotic porin
  misc_feature (1)..(261): Pfam Name: Eukaryotic porin Pfam Description: Eukaryotic porin
  misc_feature (171)..(267): Homolog of NCBI NO: 34903264 NR Description: unnamed protein product [Oryza sativa (japonica
  misc_feature (176)..(267): Homolog of NCBI NO: 2982293 NR Description: ISP42-like protein [Picea mariana]
  misc_feature (31)..(63): Homolog of NCBI NO: 25405370 NR Description: hypothetical protein F14I3.2 [imported] -
  misc_feature (95)..(264): Homolog of NCBI NO: 25405370 NR Description: hypothetical protein F14I3.2 [imported] -
  misc_feature (1)..(63): Homolog of NCBI NO: 13162531 NR Description: Hypothetical protein [Arabidopsis thaliana]
  misc_feature (171)..(267): Homolog of NCBI NO: 34903264 NR Description: unnamed protein product [Oryza sativa (japonica
  misc_feature (31)..(63): Homolog of NCBI NO: 25405370 NR Description: hypothetical protein F14I3.2 [imported] -
  misc_feature (1)..(63): Homolog of NCBI NO: 13162531 NR Description: Hypothetical protein [Arabidopsis thaliana]
  misc_feature (1)..(267): Homolog of NCBI NO: 15231008 NR Description: membrane import protein, putative
  misc_feature (95)..(267): Homolog of NCBI NO: 11994775 NR Description: membrane import protein-like [Arabidopsis
  misc_feature (1)..(63): Homolog of NCBI NO: 11994775 NR Description: membrane import protein-like [Arabidopsis
  misc_feature (1)..(264): Homolog of NCBI NO: 15222963 NR Description: hypothetical protein; protein id: At1g50400.1
  misc_feature (95)..(264): Homolog of NCBI NO: 13162531 NR Description: Hypothetical protein [Arabidopsis thaliana]
  misc_feature (95)..(264): Homolog of NCBI NO: 25405370 NR Description: hypothetical protein F14I3.2 [imported] -
  misc_feature (176)..(267): Homolog of NCBI NO: 2982293 NR Description: ISP42-like protein [Picea mariana]
  misc_feature (95)..(264): Homolog of NCBI NO: 13162531 NR Description: Hypothetical protein [Arabidopsis thaliana]
  misc_feature (1)..(264): Homolog of NCBI NO: 15222963 NR Description: hypothetical protein; protein id: At1g50400.1
  misc_feature (1)..(63): Homolog of NCBI NO: 11994775 NR Description: membrane import protein-like [Arabidopsis
  misc_feature (95)..(267): Homolog of NCBI NO: 11994775 NR Description: membrane import protein-like [Arabidopsis
  misc_feature (1)..(267): Homolog of NCBI NO: 15231008 NR Description: membrane import protein, putative

SEQ ID NO: 32295 - protein, 238 aa, Arabidopsis thaliana; identical to SEQ ID NO: 24720
  peptide (1)..(238): Ceres Seq. ID no. 12334225
  misc_feature (1)..(232): Pfam Name: Eukaryotic porin Pfam Description: Eukaryotic porin
  misc_feature (1)..(232): Pfam Name: Eukaryotic porin Pfam Description: Eukaryotic porin
  misc_feature (142)..(238): Homolog of NCBI NO: 34903264 NR Description: unnamed protein product [Oryza sativa (japonica
  misc_feature (147)..(238): Homolog of NCBI NO: 2982293 NR Description: ISP42-like protein [Picea mariana]
  misc_feature (2)..(34): Homolog of NCBI NO: 25405370 NR Description: hypothetical protein F14I3.2 [imported] -
  misc_feature (66)..(235): Homolog of NCBI NO: 25405370 NR Description: hypothetical protein F14I3.2 [imported] -
  misc_feature (1)..(34): Homolog of NCBI NO: 13162531 NR Description: Hypothetical protein [Arabidopsis thaliana]
  misc_feature (142)..(238): Homolog of NCBI NO: 34903264 NR Description: unnamed protein product [Oryza sativa (japonica
  misc_feature (2)..(34): Homolog of NCBI NO: 25405370 NR Description: hypothetical protein F14I3.2 [imported] -
  misc_feature (1)..(34): Homolog of NCBI NO: 13162531 NR Description: Hypothetical protein [Arabidopsis thaliana]
  misc_feature (1)..(238): Homolog of NCBI NO: 15231008 NR Description: membrane import protein, putative
  misc_feature (66)..(238): Homolog of NCBI NO: 11994775 NR Description: membrane import protein-like [Arabidopsis
  misc_feature (1)..(34): Homolog of NCBI NO: 11994775 NR Description: membrane import protein-like [Arabidopsis
  misc_feature (1)..(235): Homolog of NCBI NO: 15222963 NR Description: hypothetical protein; protein id: At1g50400.1
  misc_feature (66)..(235): Homolog of NCBI NO: 13162531 NR Description: Hypothetical protein [Arabidopsis thaliana]
  misc_feature (66)..(235): Homolog of NCBI NO: 25405370 NR Description: hypothetical protein F14I3.2 [imported] -
  misc_feature (147)..(238): Homolog of NCBI NO: 2982293 NR Description: ISP42-like protein [Picea mariana]
  misc_feature (66)..(235): Homolog of NCBI NO: 13162531 NR Description: Hypothetical protein [Arabidopsis thaliana]
  misc_feature (1)..(235): Homolog of NCBI NO: 15222963 NR Description: hypothetical protein; protein id: At1g50400.1
  misc_feature (1)..(34): Homolog of NCBI NO: 11994775 NR Description: membrane import protein-like [Arabidopsis
  misc_feature (66)..(238): Homolog of NCBI NO: 11994775 NR Description: membrane import protein-like [Arabidopsis
  misc_feature (1)..(238): Homolog of NCBI NO: 15231008 NR Description: membrane import protein, putative

SEQ ID NO: 32296 - DNA, 1511 bp, Arabidopsis thaliana; identical to SEQ ID NO: 28706
  misc_feature (1)..(1511): Ceres Seq. ID no. 12394381
  misc_feature: MA Experiment ID: 108434 Result: Down-regulated in Transcription
  misc_feature: MA Experiment 108434 PARAMETER Experiment Name: At_Root_Tips_cDNA_P Parameter: Tissue Value: Root Tips
  misc_feature: MA Experiment ID: 108488 Result: Up-regulated in Transcription
  misc_feature: MA Experiment ID: 108489 Result: Up-regulated in Transcription
  misc_feature: MA Experiment ID: 108561 Result: Down-regulated in Transcription
  misc_feature: MA Experiment 108561 PARAMETER Experiment Name: At_100uM_ABA_cDNA_P Parameter: Timepoint (hr) Value: 6
  misc_feature: MA Experiment 108561 PARAMETER Experiment Name: At_100uM_ABA_cDNA_P Parameter: Tissue Value: Aerial
  misc_feature: MA Experiment 108561 PARAMETER Experiment Name: At_100uM_ABA_cDNA_P Parameter: Treatment Value: 100uM ABA vs. No Treatment
  misc_feature: MA Experiment ID: 108573 Result: Down-regulated in Transcription
  misc_feature: MA Experiment 108573 PARAMETER Experiment Name: At_Drought_cDNA_P Parameter: Timepoint (hr) Value: 6
  misc_feature: MA Experiment 108573 PARAMETER Experiment Name: At_Drought_cDNA_P Parameter: Tissue Value: Aerial
  misc_feature: MA Experiment 108573 PARAMETER Experiment Name: At_Drought_cDNA_P Parameter: Treatment Value: Drought vs. No Drought
  misc_feature: MA Experiment ID: 108595 Result: Down-regulated in Transcription
  misc_feature: MA Experiment 108595 PARAMETER Experiment Name: At_Ler-pi_Ovule_cDNA_P Parameter: Plant Line Value: null
  misc_feature: MA Experiment ID: 108607 Result: Down-regulated in Transcription
  misc_feature: MA Experiment 108607 PARAMETER Experiment Name: At_100uM_ABA_cDNA_P Parameter: Timepoint (hr) Value: 4
  misc_feature: MA Experiment 108607 PARAMETER Experiment Name: At_100uM_ABA_cDNA_P Parameter: Tissue Value: Aerial
  misc_feature: MA Experiment 108607 PARAMETER Experiment Name: At_100uM_ABA_cDNA_P Parameter: Treatment Value: 100uM ABA vs. No Treatment
  misc_feature: MA Experiment ID: 20000069 Result: Down-regulated in Transcription
  misc_feature: MA Experiment 20000069 PARAMETER Experiment Name: At_100uM_ABA_Mutants_cDNA_P Parameter: Plant Line Value: CS23
  misc_feature: MA Experiment 20000069 PARAMETER Experiment Name: At_100uM_ABA_Mutants_cDNA_P Parameter: Timepoint (hr) Value: 6
  misc_feature: MA Experiment 20000069 PARAMETER Experiment Name: At_100uM_ABA_Mutants_cDNA_P Parameter: Tissue Value: Aerial
  misc_feature: MA Experiment 20000069 PARAMETER Experiment Name: At_100uM_ABA_Mutants_cDNA_P Parameter: Treatment Value: 100uM ABA vs. No Treatment
  misc_feature: MA Experiment ID: 20000070 Result: Down-regulated in Transcription
  misc_feature: MA Experiment 20000070 PARAMETER Experiment Name: At_100uM_ABA_Mutants_cDNA_P Parameter: Plant Line Value: CS24
  misc_feature: MA Experiment 20000070 PARAMETER Experiment Name: At_100uM_ABA_Mutants_cDNA_P Parameter: Timepoint (hr) Value: 6
  misc_feature: MA Experiment 20000070 PARAMETER Experiment Name: At_100uM_ABA_Mutants_cDNA_P Parameter: Tissue Value: Aerial
  misc_feature: MA Experiment 20000070 PARAMETER Experiment Name: At_100uM_ABA_Mutants_cDNA_P Parameter: Treatment Value: 100uM ABA vs. No Treatment
  misc_feature: MA Experiment ID: 20000071 Result: Down-regulated in Transcription
  misc_feature: MA Experiment 20000071 PARAMETER Experiment Name: At_100uM_ABA_Mutants_cDNA_P Parameter: Plant Line Value: CS8104
  misc_feature: MA Experiment 20000071 PARAMETER Experiment Name: At_100uM_ABA_Mutants_cDNA_P Parameter: Timepoint (hr) Value: 6
  misc_feature: MA Experiment 20000071 PARAMETER Experiment Name: At_100uM_ABA_Mutants_cDNA_P Parameter: Tissue Value: Aerial
  misc_feature: MA Experiment 20000071 PARAMETER Experiment Name: At_100uM_ABA_Mutants_cDNA_P Parameter: Treatment Value: 100uM ABA vs. No Treatment
  misc_feature: MA Experiment ID: 20000072 Result: Down-regulated in Transcription
  misc_feature: MA Experiment 20000072 PARAMETER Experiment Name: At_100uM_ABA_Mutants_cDNA_P Parameter: Plant Line Value: CS8105
  misc_feature: MA Experiment 20000072 PARAMETER Experiment Name: At_100uM_ABA_Mutants_cDNA_P Parameter: Timepoint (hr) Value: 6
  misc_feature: MA Experiment 20000072 PARAMETER Experiment Name: At_100uM_ABA_Mutants_cDNA_P Parameter: Tissue Value: Aerial
  misc_feature: MA Experiment 20000072 PARAMETER Experiment Name: At_100uM_ABA_Mutants_cDNA_P Parameter: Treatment Value: 100uM ABA vs. No Treatment
  misc_feature: MA Experiment ID: 20000086 Result: Down-regulated in Transcription
  misc_feature: MA Experiment 20000086 PARAMETER Experiment Name: At_100uM_ABA_Mutants_cDNA_P Parameter: Plant Line Value: CS22
  misc_feature: MA Experiment 20000086 PARAMETER Experiment Name: At_100uM_ABA_Mutants_cDNA_P Parameter: Timepoint (hr) Value: 6
  misc_feature: MA Experiment 20000086 PARAMETER Experiment Name: At_100uM_ABA_Mutants_cDNA_P Parameter: Tissue Value: Aerial
  misc_feature: MA Experiment 20000086 PARAMETER Experiment Name: At_100uM_ABA_Mutants_cDNA_P Parameter: Treatment Value: 100uM ABA vs. No Treatment
  misc_feature: MA Experiment ID: 20000088 Result: Down-regulated in Transcription
  misc_feature: MA Experiment 20000088 PARAMETER Experiment Name: At_100uM_ABA_Mutants_cDNA_P Parameter: Plant Line Value: Landsberg
  misc_feature: MA Experiment 20000088 PARAMETER Experiment Name: At_100uM_ABA_Mutants_cDNA_P Parameter: Timepoint (hr) Value: 6
  misc_feature: MA Experiment 20000088 PARAMETER Experiment Name: At_100uM_ABA_Mutants_cDNA_P Parameter: Tissue Value: Aerial
  misc_feature: MA Experiment 20000088 PARAMETER Experiment Name: At_100uM_ABA_Mutants_cDNA_P Parameter: Treatment Value: 100uM ABA vs. No Treatment
  misc_feature: MA Experiment ID: 20000090 Result: Down-regulated in Transcription
  misc_feature: MA Experiment ID: 20000117 Result: Down-regulated in Transcription
  misc_feature: MA Experiment 20000117 PARAMETER Experiment Name: At_100uM_ABA_Mutants_cDNA_P Parameter: Plant Line Value: Columbia
  misc_feature: MA Experiment 20000117 PARAMETER Experiment Name: At_100uM_ABA_Mutants_cDNA_P Parameter: Timepoint (hr) Value: 6
  misc_feature: MA Experiment 20000117 PARAMETER Experiment Name: At_100uM_ABA_Mutants_cDNA_P Parameter: Tissue Value: Aerial
  misc_feature: MA Experiment 20000117 PARAMETER Experiment Name: At_100uM_ABA_Mutants_cDNA_P Parameter: Treatment Value: 100uM ABA vs. No Treatment
  misc_feature: MA Experiment ID: 20000169 Result: Down-regulated in Transcription
  misc_feature: MA Experiment 20000169 PARAMETER Experiment Name: At_100uM_ABA_P Parameter: Age (day) Value: 14
  misc_feature: MA Experiment 20000169 PARAMETER Experiment Name: At_100uM_ABA_P Parameter: Organism Value: A. thaliana
  misc_feature: MA Experiment 20000169 PARAMETER Experiment Name: At_100uM_ABA_P Parameter: Plant Line Value: WS
  misc_feature: MA Experiment 20000169 PARAMETER Experiment Name: At_100uM_ABA_P Parameter: Timepoint (hr) Value: 6
  misc_feature: MA Experiment 20000169 PARAMETER Experiment Name: At_100uM_ABA_P Parameter: Tissue Value: Aerial
  misc_feature: MA Experiment 20000169 PARAMETER Experiment Name: At_100uM_ABA_P Parameter: Treatment Value: 100uM ABA vs. No Treatment
  misc_feature: MA Experiment ID: 20000184 Result: Up-regulated in Transcription
  misc_feature: MA Experiment 20000184 PARAMETER Experiment Name: At_Shoots__P Parameter: Age (day) Value: 7
  misc_feature: MA Experiment 20000184 PARAMETER Experiment Name: At_Shoots__P Parameter: Tissue Value: Shoots vs. Whole Plant
  misc_feature: MA Experiment ID: 20000185 Result: Down-regulated in Transcription
  misc_feature: MA Experiment 20000185 PARAMETER Experiment Name: At_Roots__P Parameter: Age (day) Value: 7 vs. 21
  misc_feature: MA Experiment 20000185 PARAMETER Experiment Name: At_Roots__P Parameter: Organism Value: A. thaliana
  misc_feature: MA Experiment 20000185 PARAMETER Experiment Name: At_Roots__P Parameter: Tissue Value: Roots vs. Whole Plant
  misc_feature: MA Experiment ID: 20000214 Result: Up-regulated in Transcription
  misc_feature: MA Experiment 20000214 PARAMETER Experiment Name: At_4deg_Cold_P Parameter: Timepoint (hr) Value: 6
  misc_feature: MA Experiment ID: 20000227 Result: Down-regulated in Transcription
  misc_feature: MA Experiment 20000227 PARAMETER Experiment Name: At_Root-Tips-vs-Tops_P Parameter: Tissue Value: Root Tips vs. Root Tops
  misc_feature: MA Experiment ID: 20000267 Result: Down-regulated in Transcription
  misc_feature: MA Experiment 20000267 PARAMETER Experiment Name: At_Drought_P Parameter: Age (day) Value: 7
  misc_feature: MA Experiment 20000267 PARAMETER Experiment Name: At_Drought_P Parameter: Organism Value: A. thaliana
  misc_feature: MA Experiment 20000267 PARAMETER Experiment Name: At_Drought_P Parameter: Plant Line Value: WS
  misc_feature: MA Experiment 20000267 PARAMETER Experiment Name: At_Drought_P Parameter: Timepoint (hr) Value: 6
  misc_feature: MA Experiment 20000267 PARAMETER Experiment Name: At_Drought_P Parameter: Tissue Value: Whole Plant
  misc_feature: MA Experiment 20000267 PARAMETER Experiment Name: At_Drought_P Parameter: Treatment Value: Drought vs. No Drought
  misc_feature: MA Experiment ID: 20000268 Result: Down-regulated in Transcription
  misc_feature: MA Experiment 20000268 PARAMETER Experiment Name: At_100mM_NaCl__P Parameter: Age (day) Value: 14
  misc_feature: MA Experiment 20000268 PARAMETER Experiment Name: At_100mM_NaCl__P Parameter: Organism Value: A. thaliana
  misc_feature: MA Experiment 20000268 PARAMETER Experiment Name: At_100mM_NaCl__P Parameter: Plant Line Value: WS
  misc_feature: MA Experiment 20000268 PARAMETER Experiment Name: At_100mM_NaCl__P Parameter: Timepoint (hr) Value: 6
  misc_feature: MA Experiment 20000268 PARAMETER Experiment Name: At_100mM_NaCl__P Parameter: Tissue Value: Whole Plant
  misc_feature: MA Experiment 20000268 PARAMETER Experiment Name: At_100mM_NaCl__P Parameter: Treatment Value: 100mM NaCl vs. No Treatment
  misc_feature: MA Experiment ID: 20000269 Result: Down-regulated in Transcription
  misc_feature: MA Experiment 20000269 PARAMETER Experiment Name: At_1mM_KNO3_L-vs-H_Roots_P Parameter: Age (day) Value: 7,10,12
  misc_feature: MA Experiment 20000269 PARAMETER Experiment Name: At_1mM_KNO3_L-vs-H_Roots_P Parameter: Organism Value: A. thaliana
  misc_feature: MA Experiment 20000269 PARAMETER Experiment Name: At_1mM_KNO3_L-vs-H_Roots_P Parameter: Plant Line Value: WS
  misc_feature: MA Experiment 20000269 PARAMETER Experiment Name: At_1mM_KNO3_L-vs-H_Roots_P Parameter: Timepoint (day) Value: 7,10,12
  misc_feature: MA Experiment 20000269 PARAMETER Experiment Name: At_1mM_KNO3_L-vs-H_Roots_P Parameter: Tissue Value: Roots
  misc_feature: MA Experiment 20000269 PARAMETER Experiment Name: At_1mM_KNO3_L-vs-H_Roots_P Parameter: Treatment Value: 1mM KNO3 vs. 50mM KNO3
  misc_feature: MA Experiment ID: 20000436 Result: Down-regulated in Transcription
  misc_feature: MA Experiment 20000436 PARAMETER Experiment Name: At_Drought_P Parameter: Age (day) Value: 7
  misc_feature: MA Experiment 20000436 PARAMETER Experiment Name: At_Drought_P Parameter: Organism Value: A. thaliana
  misc_feature: MA Experiment 20000436 PARAMETER Experiment Name: At_Drought_P Parameter: Plant Line Value: WS
  misc_feature: MA Experiment 20000436 PARAMETER Experiment Name: At_Drought_P Parameter: Timepoint (hr) Value: 12
  misc_feature: MA Experiment 20000436 PARAMETER Experiment Name: At_Drought_P Parameter: Tissue Value: Whole Plant
  misc_feature: MA Experiment 20000436 PARAMETER Experiment Name: At_Drought_P Parameter: Treatment Value: Drought vs. No Drought
  misc_feature: MA Experiment ID: 20000437 Result: Down-regulated in Transcription
  misc_feature: MA Experiment 20000437 PARAMETER Experiment Name: At_Drought_P Parameter: Age (day) Value: 8
  misc_feature: MA Experiment 20000437 PARAMETER Experiment Name: At_Drought_P Parameter: Organism Value: A. thaliana
  misc_feature: MA Experiment 20000437 PARAMETER Experiment Name: At_Drought_P Parameter: Plant Line Value: WS
  misc_feature: MA Experiment 20000437 PARAMETER Experiment Name: At_Drought_P Parameter: Timepoint (hr) Value: 24
  misc_feature: MA Experiment 20000437 PARAMETER Experiment Name: At_Drought_P Parameter: Tissue Value: Whole Plant
  misc_feature: MA Experiment 20000437 PARAMETER Experiment Name: At_Drought_P Parameter: Treatment Value: Drought vs. No Drought
  misc_feature: MA Experiment ID: 20000438 Result: Up-regulated in Transcription
  misc_feature: MA Experiment 20000438 PARAMETER Experiment Name: At_Shoots__P Parameter: Age (day) Value: 14
  misc_feature: MA Experiment 20000438 PARAMETER Experiment Name: At_Shoots__P Parameter: Tissue Value: Shoots vs. Whole Plant
  misc_feature: MA Experiment ID: 20000439 Result: Down-regulated in Transcription
  misc_feature: MA Experiment 20000439 PARAMETER Experiment Name: At_Roots__P Parameter: Age (day) Value: 14 vs. 21
  misc_feature: MA Experiment 20000439 PARAMETER Experiment Name: At_Roots__P Parameter: Organism Value: A. thaliana
  misc_feature: MA Experiment 20000439 PARAMETER Experiment Name: At_Roots__P Parameter: Tissue Value: Roots vs. Whole Plant
  misc_feature: MA Experiment ID: 20000453 Result: Down-regulated in Transcription
  misc_feature: MA Experiment 20000453 PARAMETER Experiment Name: At_100uM_ABA_P Parameter: Age (day) Value: 15
  misc_feature: MA Experiment 20000453 PARAMETER Experiment Name: At_100uM_ABA_P Parameter: Organism Value: A. thaliana
  misc_feature: MA Experiment 20000453 PARAMETER Experiment Name: At_100uM_ABA_P Parameter: Plant Line Value: WS
  misc_feature: MA Experiment 20000453 PARAMETER Experiment Name: At_100uM_ABA_P Parameter: Timepoint (hr) Value: 24
  misc_feature: MA Experiment 20000453 PARAMETER Experiment Name: At_100uM_ABA_P Parameter: Tissue Value: Aerial
  misc_feature: MA Experiment 20000453 PARAMETER Experiment Name: At_100uM_ABA_P Parameter: Treatment Value: 100uM ABA vs. No Treatment
  misc_feature: MA Experiment ID: 20000709 Result: Up-regulated in Transcription
  misc_feature: MA Experiment 20000709 PARAMETER Experiment Name: At_15mM_NH4NO3_L-to-H_P Parameter: Age (hr) Value: 14
  misc_feature: MA Experiment 20000709 PARAMETER Experiment Name: At_15mM_NH4NO3_L-to-H_P Parameter: Organism Value: A. thaliana
  misc_feature: MA Experiment 20000709 PARAMETER Experiment Name: At_15mM_NH4NO3_L-to-H_P Parameter: Plant Line Value: WS
  misc_feature: MA Experiment 20000709 PARAMETER Experiment Name: At_15mM_NH4NO3_L-to-H_P Parameter: Timepoint (hr) Value: 4
  misc_feature: MA Experiment 20000709 PARAMETER Experiment Name: At_15mM_NH4NO3_L-to-H_P Parameter: Tissue Value: Aerial
  misc_feature: MA Experiment 20000709 PARAMETER Experiment Name: At_15mM_NH4NO3_L-to-H_P Parameter: Treatment Value: 15mM NH4NO3 vs. 30mM Mannitol
  misc_feature: MA Experiment ID: 20000794 Result: Down-regulated in Transcription
  misc_feature: MA Experiment 20000794 PARAMETER Experiment Name: At_Petals_P Parameter: Age (day) Value: 23-25 days
  misc_feature: MA Experiment 20000794 PARAMETER Experiment Name: At_Petals_P Parameter: Plant Line Value: WS
  misc_feature: MA Experiment 20000794 PARAMETER Experiment Name: At_Petals_P Parameter: Tissue Value: Petals vs. Whole plant
  misc_feature: MA Experiment ID: 20001248 Result: Down-regulated in Transcription
  misc_feature: MA Experiment 20001248 PARAMETER Experiment Name: At_Far-red-induction_P Parameter: Age (day) Value: 7
  misc_feature: MA Experiment 20001248 PARAMETER Experiment Name: At_Far-red-induction_P Parameter: Light Value: Far-red vs. White
  misc_feature: MA Experiment 20001248 PARAMETER Experiment Name: At_Far-red-induction_P Parameter: Organism Value: A. thaliana
  misc_feature: MA Experiment 20001248 PARAMETER Experiment Name: At_Far-red-induction_P Parameter: Plant Line Value: Columbia
  misc_feature: MA Experiment 20001248 PARAMETER Experiment Name: At_Far-red-induction_P Parameter: Timepoint (hr) Value: 4
  misc_feature: MA Experiment 20001248 PARAMETER Experiment Name: At_Far-red-induction_P Parameter: Tissue Value: Whole Plant
  misc_feature: MA Experiment ID: 20001450 Result: Down-regulated in Transcription
  misc_feature: MA Experiment 20001450 PARAMETER Experiment Name: At_Far-red-induction_P Parameter: Age (day) Value: 7
  misc_feature: MA Experiment 20001450 PARAMETER Experiment Name: At_Far-red-induction_P Parameter: Light Value: Far-red vs. White
  misc_feature: MA Experiment 20001450 PARAMETER Experiment Name: At_Far-red-induction_P Parameter: Organism Value: A. thaliana
  misc_feature: MA Experiment 20001450 PARAMETER Experiment Name: At_Far-red-induction_P Parameter: Plant Line Value: Columbia
  misc_feature: MA Experiment 20001450 PARAMETER Experiment Name: At_Far-red-induction_P Parameter: Timepoint (hr) Value: 8
  misc_feature: MA Experiment 20001450 PARAMETER Experiment Name: At_Far-red-induction_P Parameter: Tissue Value: Whole Plant
  misc_feature: MA Experiment ID: 20001554 Result: Down-regulated in Transcription
  misc_feature: MA Experiment 20001554 PARAMETER Experiment Name: At_Drought_Soil_Dry_P Parameter: Age (day) Value: 21
  misc_feature: MA Experiment 20001554 PARAMETER Experiment Name: At_Drought_Soil_Dry_P Parameter: Organism Value: A. thaliana
  misc_feature: MA Experiment 20001554 PARAMETER Experiment Name: At_Drought_Soil_Dry_P Parameter: Plant Line Value: WS
  misc_feature: MA Experiment 20001554 PARAMETER Experiment Name: At_Drought_Soil_Dry_P Parameter: Post Timepoint (hr) Value: None
  misc_feature: MA Experiment 20001554 PARAMETER Experiment Name: At_Drought_Soil_Dry_P Parameter: Post-Treatment Value: None
  misc_feature: MA Experiment 20001554 PARAMETER Experiment Name: At_Drought_Soil_Dry_P Parameter: Timepoint (day) Value: 7
  misc_feature: MA Experiment 20001554 PARAMETER Experiment Name: At_Drought_Soil_Dry_P Parameter: Treatment Value: Drought vs. No Drought
  misc_feature: MA Experiment ID: 20001555 Result: Down-regulated in Transcription
  misc_feature: MA Experiment 20001555 PARAMETER Experiment Name: At_Drought_Soil_Dry_P Parameter: Age (day) Value: 24
  misc_feature: MA Experiment 20001555 PARAMETER Experiment Name: At_Drought_Soil_Dry_P Parameter: Organism Value: A. thaliana
  misc_feature: MA Experiment 20001555 PARAMETER Experiment Name: At_Drought_Soil_Dry_P Parameter: Plant Line Value: WS
  misc_feature: MA Experiment 20001555 PARAMETER Experiment Name: At_Drought_Soil_Dry_P Parameter: Post Timepoint (hr) Value: None
  misc_feature: MA Experiment 20001555 PARAMETER Experiment Name: At_Drought_Soil_Dry_P Parameter: Post-Treatment Value: None
  misc_feature: MA Experiment 20001555 PARAMETER Experiment Name: At_Drought_Soil_Dry_P Parameter: Timepoint (day) Value: 10
  misc_feature: MA Experiment 20001555 PARAMETER Experiment Name: At_Drought_Soil_Dry_P Parameter: Treatment Value: Drought vs. No Drought
  misc_feature: MA Experiment ID: 20001558 Result: Up-regulated in Transcription
  misc_feature: MA Experiment 20001558 PARAMETER Experiment Name: At_Drought_Soil_Dry_P Parameter: Age (day) Value: 27
  misc_feature: MA Experiment 20001558 PARAMETER Experiment Name: At_Drought_Soil_Dry_P Parameter: Organism Value: A. thaliana
  misc_feature: MA Experiment 20001558 PARAMETER Experiment Name: At_Drought_Soil_Dry_P Parameter: Plant Line Value: WS
  misc_feature: MA Experiment 20001558 PARAMETER Experiment Name: At_Drought_Soil_Dry_P Parameter: Post Timepoint (hr) Value: 6
  misc_feature: MA Experiment 20001558 PARAMETER Experiment Name: At_Drought_Soil_Dry_P Parameter: Post-Treatment Value: Re-Water vs. No Drought
  misc_feature: MA Experiment 20001558 PARAMETER Experiment Name: At_Drought_Soil_Dry_P Parameter: Timepoint (day) Value: 13
  misc_feature: MA Experiment 20001558 PARAMETER Experiment Name: At_Drought_Soil_Dry_P Parameter: Treatment Value: Drought vs. No Drought
  misc_feature: MA Experiment ID: 20001559 Result: Down-regulated in Transcription
  misc_feature: MA Experiment 20001559 PARAMETER Experiment Name: At_Drought_Soil_Dry_P Parameter: Age (day) Value: 28
  misc_feature: MA Experiment 20001559 PARAMETER Experiment Name: At_Drought_Soil_Dry_P Parameter: Organism Value: A. thaliana
  misc_feature: MA Experiment 20001559 PARAMETER Experiment Name: At_Drought_Soil_Dry_P Parameter: Plant Line Value: WS
  misc_feature: MA Experiment 20001559 PARAMETER Experiment Name: At_Drought_Soil_Dry_P Parameter: Post Timepoint (hr) Value: 29
  misc_feature: MA Experiment 20001559 PARAMETER Experiment Name: At_Drought_Soil_Dry_P Parameter: Post-Treatment Value: Re-Water vs. No Drought
  misc_feature: MA Experiment 20001559 PARAMETER Experiment Name: At_Drought_Soil_Dry_P Parameter: Timepoint (day) Value: 14
  misc_feature: MA Experiment 20001559 PARAMETER Experiment Name: At_Drought_Soil_Dry_P Parameter: Treatment Value: Drought vs. No Drought
  misc_feature: MA Experiment ID: 20001757 Result: Up-regulated in Transcription
  misc_feature: MA Experiment 20001757 PARAMETER Experiment Name: At_50mM_NH4NO3_L-to-H_P Parameter: Timepoint (hr) Value: 6
  misc_feature: MA Experiment 20001757 PARAMETER Experiment Name: At_50mM_NH4NO3_L-to-H_P Parameter: Tissue Value: Leaf
  misc_feature: MA Experiment 20001757 PARAMETER Experiment Name: At_50mM_NH4NO3_L-to-H_P Parameter: Treatment Value: 50mM NH4NO3 vs 100mM Mannitol
  misc_feature: MA Experiment ID: 20001906 Result: Down-regulated in Transcription
  misc_feature: MA Experiment 20001906 PARAMETER Experiment Name: At_Drought_Reproduction_P Parameter: Age (day) Value: 35
  misc_feature: MA Experiment 20001906 PARAMETER Experiment Name: At_Drought_Reproduction_P Parameter: Organism Value: A. thaliana
  misc_feature: MA Experiment 20001906 PARAMETER Experiment Name: At_Drought_Reproduction_P Parameter: Plant Line Value: WS
  misc_feature: MA Experiment 20001906 PARAMETER Experiment Name: At_Drought_Reproduction_P Parameter: Timepoint (day) Value: 5
  misc_feature: MA Experiment 20001906 PARAMETER Experiment Name: At_Drought_Reproduction_P Parameter: Tissue Value: Siliques
  misc_feature: MA Experiment 20001906 PARAMETER Experiment Name: At_Drought_Reproduction_P Parameter: Treatment Value: Drought vs. No Drought
  misc_feature: MA Experiment ID: 20001908 Result: Down-regulated in Transcription
  misc_feature: MA Experiment 20001908 PARAMETER Experiment Name: At_Drought_Reproduction_P Parameter: Age (day) Value: 40
  misc_feature: MA Experiment 20001908 PARAMETER Experiment Name: At_Drought_Reproduction_P Parameter: Organism Value: A. thaliana
  misc_feature: MA Experiment 20001908 PARAMETER Experiment Name: At_Drought_Reproduction_P Parameter: Plant Line Value: WS
  misc_feature: MA Experiment 20001908 PARAMETER Experiment Name: At_Drought_Reproduction_P Parameter: Timepoint (day) Value: 10
  misc_feature: MA Experiment 20001908 PARAMETER Experiment Name: At_Drought_Reproduction_P Parameter: Tissue Value: Siliques
  misc_feature: MA Experiment 20001908 PARAMETER Experiment Name: At_Drought_Reproduction_P Parameter: Treatment Value: Drought vs. No Drought
  misc_feature: MA Experiment ID: 20001911 Result: Down-regulated in Transcription
  misc_feature: MA Experiment 20001911 PARAMETER Experiment Name: At_Drought_Reproduction_P Parameter: Age (day) Value: 40
  misc_feature: MA Experiment 20001911 PARAMETER Experiment Name: At_Drought_Reproduction_P Parameter: Organism Value: A. thaliana
  misc_feature: MA Experiment 20001911 PARAMETER Experiment Name: At_Drought_Reproduction_P Parameter: Plant Line Value: WS
  misc_feature: MA Experiment 20001911 PARAMETER Experiment Name: At_Drought_Reproduction_P Parameter: Timepoint (day) Value: 10
  misc_feature: MA Experiment 20001911 PARAMETER Experiment Name: At_Drought_Reproduction_P Parameter: Tissue Value: Flowers
  misc_feature: MA Experiment 20001911 PARAMETER Experiment Name: At_Drought_Reproduction_P Parameter: Treatment Value: Drought vs. No Drought

SEQ ID NO: 32297 - protein, 174 aa, Arabidopsis thaliana; identical to SEQ ID NO: 28707
  peptide (1)..(174): Ceres Seq. ID no. 12394382
  misc_feature (94)..(161): Pfam Name: Phosphopantetheine attachment site Pfam Description: Phosphopantetheine attachment site
  misc_feature (38)..(168): Homolog of NCBI NO: 113166 NR Description: Acyl carrier protein I, chloroplast precursor
  misc_feature (38)..(168): Homolog of NCBI NO: 72413 NR Description: acyl carrier protein I precursor - spinach
  misc_feature (81)..(170): Homolog of NCBI NO: 37515400 NR Description: acyl carrier protein 1 [Cicer arietinum]
  misc_feature (55)..(170): Homolog of NCBI NO: 2465010 NR Description: acyl carrier protein [Fragaria vesca]
  misc_feature (38)..(168): Homolog of NCBI NO: 20137323 NR Description: Acyl carrier protein 1, chloroplast precursor
  misc_feature (38)..(168): Homolog of NCBI NO: 4457219 NR Description: acyl carrier protein [Capsicum chinense]
  misc_feature (38)..(168): Homolog of NCBI NO: 5669599 NR Description: acyl carrier protein [Coriandrum sativum]
  misc_feature (38)..(168): Homolog of NCBI NO: 113170 NR Description: Acyl carrier protein II, chloroplast precursor
  misc_feature (38)..(168): Homolog of NCBI NO: 16518983 NR Description: acyl carrier protein [Olea europaea]
  misc_feature (38)..(174): Homolog of NCBI NO: 15234875 NR Description: acyl carrier - like protein

SEQ ID NO: 32298 - protein, 137 aa, Arabidopsis thaliana; identical to SEQ ID NO: 28708
  peptide (1)..(137): Ceres Seq. ID no. 12394383
  misc_feature (57)..(124): Pfam Name: Phosphopantetheine attachment site Pfam Description: Phosphopantetheine attachment site
  misc_feature (1)..(131): Homolog of NCBI NO: 113166 NR Description: Acyl carrier protein I, chloroplast precursor
  misc_feature (1)..(131): Homolog of NCBI NO: 72413 NR Description: acyl carrier protein I precursor - spinach
  misc_feature (44)..(133): Homolog of NCBI NO: 37515400 NR Description: acyl carrier protein 1 [Cicer arietinum]
  misc_feature (18)..(133): Homolog of NCBI NO: 2465010 NR Description: acyl carrier protein [Fragaria vesca]
  misc_feature (1)..(131): Homolog of NCBI NO: 20137323 NR Description: Acyl carrier protein 1, chloroplast precursor
  misc_feature (1)..(131): Homolog of NCBI NO: 4457219 NR Description: acyl carrier protein [Capsicum chinense]
  misc_feature (1)..(131): Homolog of NCBI NO: 5669599 NR Description: acyl carrier protein [Coriandrum sativum]
  misc_feature (1)..(131): Homolog of NCBI NO: 113170 NR Description: Acyl carrier protein II, chloroplast precursor
  misc_feature (1)..(131): Homolog of NCBI NO: 16518983 NR Description: acyl carrier protein [Olea europaea]
  misc_feature (1)..(137): Homolog of NCBI NO: 15234875 NR Description: acyl carrier - like protein

SEQ ID NO: 32299 - DNA, 873 bp, Arabidopsis thaliana; identical to SEQ ID NO: 28709
  misc_feature (1)..(873): Ceres Seq. ID no. 12602545
  misc_feature: MA Experiment ID: 20000307 Result: Up-regulated in Transcription
  misc_feature: MA Experiment 20000307 PARAMETER Experiment Name: At_Germinating_Seeds_Sub_P Parameter: Age (hr) Value: 24 vs. 0
  misc_feature: MA Experiment 20000307 PARAMETER Experiment Name: At_Germinating_Seeds_Sub_P Parameter: Organism Value: A. thaliana
  misc_feature: MA Experiment 20000307 PARAMETER Experiment Name: At_Germinating_Seeds_Sub_P Parameter: Plant Line Value: WS
  misc_feature: MA Experiment 20000307 PARAMETER Experiment Name: At_Germinating_Seeds_Sub_P Parameter: Tissue Value: Germinating Seeds
  misc_feature: MA Experiment ID: 20000315 Result: Down-regulated in Transcription
  misc_feature: MA Experiment 20000315 PARAMETER Experiment Name: At_14day_Shoots-Roots_Sub_P Parameter: Age (day) Value: 14
  misc_feature: MA Experiment 20000315 PARAMETER Experiment Name: At_14day_Shoots-Roots_Sub_P Parameter: Organism Value: A. thaliana
  misc_feature: MA Experiment 20000315 PARAMETER Experiment Name: At_14day_Shoots-Roots_Sub_P Parameter: Plant Line Value: WS
  misc_feature: MA Experiment 20000315 PARAMETER Experiment Name: At_14day_Shoots-Roots_Sub_P Parameter: Tissue Value: Shoots vs. Whole Plant

SEQ ID NO: 32300 - protein, 206 aa, Arabidopsis thaliana; identical to SEQ ID NO: 28710
  peptide (1)..(206): Ceres Seq. ID no. 12602546
  misc_feature (10)..(178): Pfam Name: Ras family Pfam Description: Ras family
  misc_feature (1)..(204): Homolog of NCBI NO: 29293694 NR Description: small GTP binding protein [Oryza sativa (indica
  misc_feature (1)..(206): Homolog of NCBI NO: 1370186 NR Description: RAB7C [Lotus japonicus]
  misc_feature (1)..(206): Homolog of NCBI NO: 34484308 NR Description: putative GTP-binding protein [Cucumis sativus]
  misc_feature (1)..(204): Homolog of NCBI NO: 3914557 NR Description: RAS-RELATED PROTEIN RAB7 (POSSIBLE
  misc_feature (1)..(205): Homolog of NCBI NO: 7438407 NR Description: GTP-binding protein Rab7a - common tobacco
  misc_feature (1)..(206): Homolog of NCBI NO: 3914550 NR Description: RAS-RELATED PROTEIN RAB7
  misc_feature (1)..(206): Homolog of NCBI NO: 1370188 NR Description: RAB7D [Lotus japonicus]
  misc_feature (1)..(206): Homolog of NCBI NO: 7388049 NR Description: Ras-related protein Rab7
  misc_feature (1)..(206): Homolog of NCBI NO: 15233284 NR Description: GTP-binding protein, putative
  misc_feature (1)..(206): Homolog of NCBI NO: 15218194 NR Description: GTP-binding protein, putative

SEQ ID NO: 32301 - protein, 182 aa, Arabidopsis thaliana; identical to SEQ ID NO: 28711
  peptide (1)..(182): Ceres Seq. ID no. 12602547
  misc_feature (1)..(154): Pfam Name: Ras family Pfam Description: Ras family
  misc_feature (1)..(180): Homolog of NCBI NO: 29293694 NR Description: small GTP binding protein [Oryza sativa (indica
  misc_feature (1)..(182): Homolog of NCBI NO: 1370186 NR Description: RAB7C [Lotus japonicus]
  misc_feature (1)..(182): Homolog of NCBI NO: 34484308 NR Description: putative GTP-binding protein [Cucumis sativus]
  misc_feature (1)..(180): Homolog of NCBI NO: 3914557 NR Description: RAS-RELATED PROTEIN RAB7 (POSSIBLE
  misc_feature (1)..(181): Homolog of NCBI NO: 7438407 NR Description: GTP-binding protein Rab7a - common tobacco
  misc_feature (1)..(182): Homolog of NCBI NO: 3914550 NR Description: RAS-RELATED PROTEIN RAB7
  misc_feature (1)..(182): Homolog of NCBI NO: 1370188 NR Description: RAB7D [Lotus japonicus]
  misc_feature (1)..(182): Homolog of NCBI NO: 7388049 NR Description: Ras-related protein Rab7
  misc_feature (1)..(182): Homolog of NCBI NO: 15233284 NR Description: GTP-binding protein, putative
  misc_feature (1)..(182): Homolog of NCBI NO: 15218194 NR Description: GTP-binding protein, putative

SEQ ID NO: 32302 - protein, 114 aa, Arabidopsis thaliana; identical to SEQ ID NO: 28712
  peptide (1)..(114): Ceres Seq. ID no. 12602548
  misc_feature (1)..(86): Pfam Name: Ras family Pfam Description: Ras family
  misc_feature (1)..(112): Homolog of NCBI NO: 29293694 NR Description: small GTP binding protein [Oryza sativa (indica
  misc_feature (1)..(114): Homolog of NCBI NO: 1370186 NR Description: RAB7C [Lotus japonicus]
  misc_feature (1)..(114): Homolog of NCBI NO: 34484308 NR Description: putative GTP-binding protein [Cucumis sativus]
  misc_feature (1)..(112): Homolog of NCBI NO: 3914557 NR Description: RAS-RELATED PROTEIN RAB7 (POSSIBLE
  misc_feature (1)..(113): Homolog of NCBI NO: 7438407 NR Description: GTP-binding protein Rab7a - common tobacco
  misc_feature (1)..(114): Homolog of NCBI NO: 3914550 NR Description: RAS-RELATED PROTEIN RAB7
  misc_feature (1)..(114): Homolog of NCBI NO: 1370188 NR Description: RAB7D [Lotus japonicus]
  misc_feature (1)..(114): Homolog of NCBI NO: 7388049 NR Description: Ras-related protein Rab7
  misc_feature (1)..(114): Homolog of NCBI NO: 15233284 NR Description: GTP-binding protein, putative
  misc_feature (1)..(114): Homolog of NCBI NO: 15218194 NR Description: GTP-binding protein, putative

SEQ ID NO: 32303 - DNA, 908 bp, Arabidopsis thaliana; identical to SEQ ID NO: 28713
  misc_feature (1)..(908): Ceres Seq. ID no. 12332602
  misc_feature: MA Experiment ID: 108435 Result: Down-regulated in Transcription
  misc_feature: MA Experiment 108435 PARAMETER Experiment Name: At_stm_Mutants_cDNA_P Parameter: Plant Line Value: wt Landsburg vs stm
  misc_feature: MA Experiment 108435 PARAMETER Experiment Name: At_stm_Mutants_cDNA_P Parameter: Tissue Value: Shoot Apical Meristem Region
  misc_feature: MA Experiment ID: 108461 Result: Up-regulated in Transcription
  misc_feature: MA Experiment 108461 PARAMETER Experiment Name: At_Germinating_Seeds_cDNA_P Parameter: Age (day) Value: 1 vs. 0
  misc_feature: MA Experiment 108461 PARAMETER Experiment Name: At_Germinating_Seeds_cDNA_P Parameter: Tissue Value: Germinating Seeds
  misc_feature: MA Experiment ID: 108462 Result: Up-regulated in Transcription
  misc_feature: MA Experiment 108462 PARAMETER Experiment Name: At_Germinating_Seeds_cDNA_P Parameter: Age (day) Value: 2 vs. 0
  misc_feature: MA Experiment 108462 PARAMETER Experiment Name: At_Germinating_Seeds_cDNA_P Parameter: Tissue Value: Germinating Seeds
  misc_feature: MA Experiment ID: 108463 Result: Up-regulated in Transcription
  misc_feature: MA Experiment 108463 PARAMETER Experiment Name: At_Germinating_Seeds_cDNA_P Parameter: Age (day) Value: 3 vs. 0
  misc_feature: MA Experiment 108463 PARAMETER Experiment Name: At_Germinating_Seeds_cDNA_P Parameter: Tissue Value: Germinating Seeds
  misc_feature: MA Experiment ID: 108464 Result: Up-regulated in Transcription
  misc_feature: MA Experiment 108464 PARAMETER Experiment Name: At_Germinating_Seeds_cDNA_P Parameter: Age (day) Value: 4 vs. 0
  misc_feature: MA Experiment 108464 PARAMETER Experiment Name: At_Germinating_Seeds_cDNA_P Parameter: Tissue Value: Germinating Seeds
  misc_feature: MA Experiment ID: 108594 Result: Up-regulated in Transcription
  misc_feature: MA Experiment 108594 PARAMETER Experiment Name: At_Ler-rhl_Root_cDNA_P Parameter: Plant Line Value: null
  misc_feature: MA Experiment ID: 20000180 Result: Up-regulated in Transcription
  misc_feature: MA Experiment 20000180 PARAMETER Experiment Name: At_Germinating_Seeds_P Parameter: Age (hr) Value: 24 vs. 0
  misc_feature: MA Experiment 20000180 PARAMETER Experiment Name: At_Germinating_Seeds_P Parameter: Tissue Value: Germinating Seeds
  misc_feature: MA Experiment ID: 20000264 Result: Down-regulated in Transcription
  misc_feature: MA Experiment 20000264 PARAMETER Experiment Name: At_Open_Flower_P Parameter: Age (day) Value: 21
  misc_feature: MA Experiment 20000264 PARAMETER Experiment Name: At_Open_Flower_P Parameter: Plant Line Value: WS
  misc_feature: MA Experiment 20000264 PARAMETER Experiment Name: At_Open_Flower_P Parameter: Tissue Value: Open Flower vs. Whole Plant
  misc_feature: MA Experiment ID: 20000265 Result: Down-regulated in Transcription
  misc_feature: MA Experiment 20000265 PARAMETER Experiment Name: At_Open_Flower_P Parameter: Age (day) Value: 21
  misc_feature: MA Experiment 20000265 PARAMETER Experiment Name: At_Open_Flower_P Parameter: Plant Line Value: WS
  misc_feature: MA Experiment 20000265 PARAMETER Experiment Name: At_Open_Flower_P Parameter: Tissue Value: Closed Flower vs. Whole Plant

SEQ ID NO: 32304 - protein, 278 aa, Arabidopsis thaliana; identical to SEQ ID NO: 28714
  peptide (1)..(278): Ceres Seq. ID no. 12332603
  misc_feature (150)..(245): Pfam Name: Acetyltransferase (GNAT) family Pfam Description: Acetyltransferase (GNAT) family
  misc_feature (106)..(266): Homolog of NCBI NO: 23041456 NR Description: hypothetical protein [Trichodesmium erythraeum
  misc_feature (172)..(276): Homolog of NCBI NO: 16329719 NR Description: unknown protein [Synechocystis sp. PCC 6803]
  misc_feature (62)..(245): Homolog of NCBI NO: 30678254 NR Description: GCN5-related N-acetyltransferase (GNAT) family
  misc_feature (189)..(266): Homolog of NCBI NO: 17232456 NR Description: hypothetical protein [Nostoc sp. PCC 7120]
  misc_feature (182)..(266): Homolog of NCBI NO: 23126552 NR Description: hypothetical protein [Nostoc punctiforme]
  misc_feature (5)..(97): Homolog of NCBI NO: 7486953 NR Description: hypothetical protein T13J8.140 - Arabidopsis
  misc_feature (64)..(270): Homolog of NCBI NO: 28812153 NR Description: B1015H11.33 [Oryza sativa (japonica
  misc_feature (5)..(278): Homolog of NCBI NO: 21536955 NR Description: unknown [Arabidopsis thaliana]
  misc_feature (5)..(278): Homolog of NCBI NO: 18417112 NR Description: putative protein

SEQ ID NO: 32305 - protein, 274 aa, Arabidopsis thaliana; identical to SEQ ID NO: 28715
  peptide (1)..(274): Ceres Seq. ID no. 12332604
  misc_feature (146)..(241): Pfam Name: Acetyltransferase (GNAT) family Pfam Description: Acetyltransferase (GNAT) family
  misc_feature (102)..(262): Homolog of NCBI NO: 23041456 NR Description: hypothetical protein [Trichodesmium erythraeum
  misc_feature (168)..(272): Homolog of NCBI NO: 16329719 NR Description: unknown protein [Synechocystis sp. PCC 6803]
  misc_feature (58)..(241): Homolog of NCBI NO: 30678254 NR Description: GCN5-related N-acetyltransferase (GNAT) family
  misc_feature (185)..(262): Homolog of NCBI NO: 17232456 NR Description: hypothetical protein [Nostoc sp. PCC 7120]
  misc_feature (178)..(262): Homolog of NCBI NO: 23126552 NR Description: hypothetical protein [Nostoc punctiforme]
  misc_feature (1)..(93): Homolog of NCBI NO: 7486953 NR Description: hypothetical protein T13J8.140 - Arabidopsis
  misc_feature (60)..(266): Homolog of NCBI NO: 28812153 NR Description: B1015H11.33 [Oryza sativa (japonica
  misc_feature (1)..(274): Homolog of NCBI NO: 21536955 NR Description: unknown [Arabidopsis thaliana]
  misc_feature (1)..(274): Homolog of NCBI NO: 18417112 NR Description: putative protein

SEQ ID NO: 32306 - DNA, 933 bp, Arabidopsis thaliana; identical to SEQ ID NO: 28716
  misc_feature (1)..(933): Ceres Seq. ID no. 13487208
  misc_feature: MA Experiment ID: 108435 Result: Down-regulated in Transcription
  misc_feature: MA Experiment 108435 PARAMETER Experiment Name: At_stm_Mutants_cDNA_P Parameter: Plant Line Value: wt Landsburg vs stm
  misc_feature: MA Experiment 108435 PARAMETER Experiment Name: At_stm_Mutants_cDNA_P Parameter: Tissue Value: Shoot Apical Meristem Region
  misc_feature: MA Experiment ID: 108464 Result: Up-regulated in Transcription
  misc_feature: MA Experiment 108464 PARAMETER Experiment Name: At_Germinating_Seeds_cDNA_P Parameter: Age (day) Value: 4 vs. 0
  misc_feature: MA Experiment 108464 PARAMETER Experiment Name: At_Germinating_Seeds_cDNA_P Parameter: Tissue Value: Germinating Seeds
  misc_feature: MA Experiment ID: 108488 Result: Down-regulated in Transcription
  misc_feature: MA Experiment ID: 108572 Result: Down-regulated in Transcription
  misc_feature: MA Experiment 108572 PARAMETER Experiment Name: At_Drought_cDNA_P Parameter: Timepoint (hr) Value: 1
  misc_feature: MA Experiment 108572 PARAMETER Experiment Name: At_Drought_cDNA_P Parameter: Tissue Value: Aerial
  misc_feature: MA Experiment 108572 PARAMETER Experiment Name: At_Drought_cDNA_P Parameter: Treatment Value: Drought vs. No Drought
  misc_feature: MA Experiment ID: 108573 Result: Down-regulated in Transcription
  misc_feature: MA Experiment 108573 PARAMETER Experiment Name: At_Drought_cDNA_P Parameter: Timepoint (hr) Value: 6
  misc_feature: MA Experiment 108573 PARAMETER Experiment Name: At_Drought_cDNA_P Parameter: Tissue Value: Aerial
  misc_feature: MA Experiment 108573 PARAMETER Experiment Name: At_Drought_cDNA_P Parameter: Treatment Value: Drought vs. No Drought
  misc_feature: MA Experiment ID: 108574 Result: Down-regulated in Transcription
  misc_feature: MA Experiment 108574 PARAMETER Experiment Name: At_Wounding__cDNA_P Parameter: Timepoint (hr) Value: 1
  misc_feature: MA Experiment 108574 PARAMETER Experiment Name: At_Wounding__cDNA_P Parameter: Tissue Value: Aerial
  misc_feature: MA Experiment 108574 PARAMETER Experiment Name: At_Wounding__cDNA_P Parameter: Treatment Value: Wounding vs. No Wounding
  misc_feature: MA Experiment ID: 108576 Result: Down-regulated in Transcription
  misc_feature: MA Experiment 108576 PARAMETER Experiment Name: At_42deg_Heat_cDNA_P Parameter: Temperature (deg C) Value: 42 vs. 22
  misc_feature: MA Experiment 108576 PARAMETER Experiment Name: At_42deg_Heat_cDNA_P Parameter: Timepoint (hr) Value: 1
  misc_feature: MA Experiment 108576 PARAMETER Experiment Name: At_42deg_Heat_cDNA_P Parameter: Tissue Value: Aerial
  misc_feature: MA Experiment ID: 108577 Result: Down-regulated in Transcription
  misc_feature: MA Experiment 108577 PARAMETER Experiment Name: At_42deg_Heat_cDNA_P Parameter: Temperature (deg C) Value: 42 vs. 22
  misc_feature: MA Experiment 108577 PARAMETER Experiment Name: At_42deg_Heat_cDNA_P Parameter: Timepoint (hr) Value: 6
  misc_feature: MA Experiment 108577 PARAMETER Experiment Name: At_42deg_Heat_cDNA_P Parameter: Tissue Value: Aerial
  misc_feature: MA Experiment ID: 108595 Result: Up-regulated in Transcription
  misc_feature: MA Experiment 108595 PARAMETER Experiment Name: At_Ler-pi_Ovule_cDNA_P Parameter: Plant Line Value: null
  misc_feature: MA Experiment ID: 20000069 Result: Up-regulated in Transcription
  misc_feature: MA Experiment 20000069 PARAMETER Experiment Name: At_100uM_ABA_Mutants_cDNA_P Parameter: Plant Line Value: CS23
  misc_feature: MA Experiment 20000069 PARAMETER Experiment Name: At_100uM_ABA_Mutants_cDNA_P Parameter: Timepoint (hr) Value: 6
  misc_feature: MA Experiment 20000069 PARAMETER Experiment Name: At_100uM_ABA_Mutants_cDNA_P Parameter: Tissue Value: Aerial
  misc_feature: MA Experiment 20000069 PARAMETER Experiment Name: At_100uM_ABA_Mutants_cDNA_P Parameter: Treatment Value: 100uM ABA vs. No Treatment
  misc_feature: MA Experiment ID: 20000070 Result: Up-regulated in Transcription
  misc_feature: MA Experiment 20000070 PARAMETER Experiment Name: At_100uM_ABA_Mutants_cDNA_P Parameter: Plant Line Value: CS24
  misc_feature: MA Experiment 20000070 PARAMETER Experiment Name: At_100uM_ABA_Mutants_cDNA_P Parameter: Timepoint (hr) Value: 6
  misc_feature: MA Experiment 20000070 PARAMETER Experiment Name: At_100uM_ABA_Mutants_cDNA_P Parameter: Tissue Value: Aerial
  misc_feature: MA Experiment 20000070 PARAMETER Experiment Name: At_100uM_ABA_Mutants_cDNA_P Parameter: Treatment Value: 100uM ABA vs. No Treatment
  misc_feature: MA Experiment ID: 20000071 Result: Up-regulated in Transcription
  misc_feature: MA Experiment 20000071 PARAMETER Experiment Name: At_100uM_ABA_Mutants_cDNA_P Parameter: Plant Line Value: CS8104
  misc_feature: MA Experiment 20000071 PARAMETER Experiment Name: At_100uM_ABA_Mutants_cDNA_P Parameter: Timepoint (hr) Value: 6
  misc_feature: MA Experiment 20000071 PARAMETER Experiment Name: At_100uM_ABA_Mutants_cDNA_P Parameter: Tissue Value: Aerial
  misc_feature: MA Experiment 20000071 PARAMETER Experiment Name: At_100uM_ABA_Mutants_cDNA_P Parameter: Treatment Value: 100uM ABA vs. No Treatment
  misc_feature: MA Experiment ID: 20000086 Result: Up-regulated in Transcription
  misc_feature: MA Experiment 20000086 PARAMETER Experiment Name: At_100uM_ABA_Mutants_cDNA_P Parameter: Plant Line Value: CS22
  misc_feature: MA Experiment 20000086 PARAMETER Experiment Name: At_100uM_ABA_Mutants_cDNA_P Parameter: Timepoint (hr) Value: 6
  misc_feature: MA Experiment 20000086 PARAMETER Experiment Name: At_100uM_ABA_Mutants_cDNA_P Parameter: Tissue Value: Aerial
  misc_feature: MA Experiment 20000086 PARAMETER Experiment Name: At_100uM_ABA_Mutants_cDNA_P Parameter: Treatment Value: 100uM ABA vs. No Treatment
  misc_feature: MA Experiment ID: 20000087 Result: Up-regulated in Transcription
  misc_feature: MA Experiment 20000087 PARAMETER Experiment Name: At_100uM_ABA_Mutants_cDNA_P Parameter: Plant Line Value: WS
  misc_feature: MA Experiment 20000087 PARAMETER Experiment Name: At_100uM_ABA_Mutants_cDNA_P Parameter: Timepoint (hr) Value: 6
  misc_feature: MA Experiment 20000087 PARAMETER Experiment Name: At_100uM_ABA_Mutants_cDNA_P Parameter: Tissue Value: Aerial
  misc_feature: MA Experiment 20000087 PARAMETER Experiment Name: At_100uM_ABA_Mutants_cDNA_P Parameter: Treatment Value: 100uM ABA vs. No Treatment
  misc_feature: MA Experiment ID: 20000088 Result: Up-regulated in Transcription
  misc_feature: MA Experiment 20000088 PARAMETER Experiment Name: At_100uM_ABA_Mutants_cDNA_P Parameter: Plant Line Value: Landsberg
  misc_feature: MA Experiment 20000088 PARAMETER Experiment Name: At_100uM_ABA_Mutants_cDNA_P Parameter: Timepoint (hr) Value: 6
  misc_feature: MA Experiment 20000088 PARAMETER Experiment Name: At_100uM_ABA_Mutants_cDNA_P Parameter: Tissue Value: Aerial
  misc_feature: MA Experiment 20000088 PARAMETER Experiment Name: At_100uM_ABA_Mutants_cDNA_P Parameter: Treatment Value: 100uM ABA vs. No Treatment
  misc_feature: MA Experiment ID: 20000089 Result: Up-regulated in Transcription
  misc_feature: MA Experiment ID: 20000090 Result: Up-regulated in Transcription
  misc_feature: MA Experiment ID: 20000112 Result: Down-regulated in Transcription
  misc_feature: MA Experiment 20000112 PARAMETER Experiment Name: At_42deg_Heat_cDNA_P Parameter: Temperature (deg C) Value: 42 vs. 22
  misc_feature: MA Experiment 20000112 PARAMETER Experiment Name: At_42deg_Heat_cDNA_P Parameter: Timepoint (hr) Value: 2
  misc_feature: MA Experiment 20000112 PARAMETER Experiment Name: At_42deg_Heat_cDNA_P Parameter: Tissue Value: Aerial
  misc_feature: MA Experiment ID: 20000113 Result: Down-regulated in Transcription
  misc_feature: MA Experiment 20000113 PARAMETER Experiment Name: At_42deg_Heat_cDNA_P Parameter: Temperature (deg C) Value: 42 vs. 22
  misc_feature: MA Experiment 20000113 PARAMETER Experiment Name: At_42deg_Heat_cDNA_P Parameter: Timepoint (hr) Value: 8
  misc_feature: MA Experiment 20000113 PARAMETER Experiment Name: At_42deg_Heat_cDNA_P Parameter: Tissue Value: Aerial
  misc_feature: MA Experiment ID: 20000117 Result: Up-regulated in Transcription
  misc_feature: MA Experiment 20000117 PARAMETER Experiment Name: At_100uM_ABA_Mutants_cDNA_P Parameter: Plant Line Value: Columbia
  misc_feature: MA Experiment 20000117 PARAMETER Experiment Name: At_100uM_ABA_Mutants_cDNA_P Parameter: Timepoint (hr) Value: 6
  misc_feature: MA Experiment 20000117 PARAMETER Experiment Name: At_100uM_ABA_Mutants_cDNA_P Parameter: Tissue Value: Aerial
  misc_feature: MA Experiment 20000117 PARAMETER Experiment Name: At_100uM_ABA_Mutants_cDNA_P Parameter: Treatment Value: 100uM ABA vs. No Treatment
  misc_feature: MA Experiment ID: 20000144 Result: Down-regulated in Transcription
  misc_feature: MA Experiment 20000144 PARAMETER Experiment Name: At_42deg_Heat_cDNA_P Parameter: Temperature (deg C) Value: 42 vs. 22
  misc_feature: MA Experiment 20000144 PARAMETER Experiment Name: At_42deg_Heat_cDNA_P Parameter: Timepoint (hr) Value: 1
  misc_feature: MA Experiment 20000144 PARAMETER Experiment Name: At_42deg_Heat_cDNA_P Parameter: Tissue Value: Aerial
  misc_feature: MA Experiment ID: 20000173 Result: Down-regulated in Transcription
  misc_feature: MA Experiment 20000173 PARAMETER Experiment Name: At_42deg_Heat_P Parameter: Age (day) Value: 14
  misc_feature: MA Experiment 20000173 PARAMETER Experiment Name: At_42deg_Heat_P Parameter: Organism Value: A. thaliana
  misc_feature: MA Experiment 20000173 PARAMETER Experiment Name: At_42deg_Heat_P Parameter: Plant Line Value: WS
  misc_feature: MA Experiment 20000173 PARAMETER Experiment Name: At_42deg_Heat_P Parameter: Temperature (deg C) Value: 42 vs. 22
  misc_feature: MA Experiment 20000173 PARAMETER Experiment Name: At_42deg_Heat_P Parameter: Timepoint (hr) Value: 6
  misc_feature: MA Experiment 20000173 PARAMETER Experiment Name: At_42deg_Heat_P Parameter: Tissue Value: Aerial
  misc_feature: MA Experiment ID: 20000180 Result: Down-regulated in Transcription
  misc_feature: MA Experiment 20000180 PARAMETER Experiment Name: At_Germinating_Seeds_P Parameter: Age (hr) Value: 24 vs. 0
  misc_feature: MA Experiment 20000180 PARAMETER Experiment Name: At_Germinating_Seeds_P Parameter: Tissue Value: Germinating Seeds
  misc_feature: MA Experiment ID: 20000184 Result: Down-regulated in Transcription
  misc_feature: MA Experiment 20000184 PARAMETER Experiment Name: At_Shoots__P Parameter: Age (day) Value: 7
  misc_feature: MA Experiment 20000184 PARAMETER Experiment Name: At_Shoots__P Parameter: Tissue Value: Shoots vs. Whole Plant
  misc_feature: MA Experiment ID: 20000235 Result: Down-regulated in Transcription
  misc_feature: MA Experiment 20000235 PARAMETER Experiment Name: At_Siliques_P Parameter: Age (day) Value: 21
  misc_feature: MA Experiment 20000235 PARAMETER Experiment Name: At_Siliques_P Parameter: Organism Value: A. thaliana
  misc_feature: MA Experiment 20000235 PARAMETER Experiment Name: At_Siliques_P Parameter: Plant Line Value: WS
  misc_feature: MA Experiment 20000235 PARAMETER Experiment Name: At_Siliques_P Parameter: Tissue Value: 5-10mm Siliques vs. Whole Plant
  misc_feature: MA Experiment ID: 20000443 Result: Down-regulated in Transcription
  misc_feature: MA Experiment 20000443 PARAMETER Experiment Name: At_1uM_BR-BRZ__P Parameter: Tissue Value: Shoot Apices
  misc_feature: MA Experiment 20000443 PARAMETER Experiment Name: At_1uM_BR-BRZ__P Parameter: Treatment Value: 1uM BRZ vs. No Treatment
  misc_feature: MA Experiment ID: 20001248 Result: Up-regulated in Transcription
  misc_feature: MA Experiment 20001248 PARAMETER Experiment Name: At_Far-red-induction_P Parameter: Age (day) Value: 7
  misc_feature: MA Experiment 20001248 PARAMETER Experiment Name: At_Far-red-induction_P Parameter: Light Value: Far-red vs. White
  misc_feature: MA Experiment 20001248 PARAMETER Experiment Name: At_Far-red-induction_P Parameter: Organism Value: A. thaliana
  misc_feature: MA Experiment 20001248 PARAMETER Experiment Name: At_Far-red-induction_P Parameter: Plant Line Value: Columbia
  misc_feature: MA Experiment 20001248 PARAMETER Experiment Name: At_Far-red-induction_P Parameter: Timepoint (hr) Value: 4
  misc_feature: MA Experiment 20001248 PARAMETER Experiment Name: At_Far-red-induction_P Parameter: Tissue Value: Whole Plant
  misc_feature: MA Experiment ID: 20001450 Result: Up-regulated in Transcription
  misc_feature: MA Experiment 20001450 PARAMETER Experiment Name: At_Far-red-induction_P Parameter: Age (day) Value: 7
  misc_feature: MA Experiment 20001450 PARAMETER Experiment Name: At_Far-red-induction_P Parameter: Light Value: Far-red vs. White
  misc_feature: MA Experiment 20001450 PARAMETER Experiment Name: At_Far-red-induction_P Parameter: Organism Value: A. thaliana
  misc_feature: MA Experiment 20001450 PARAMETER Experiment Name: At_Far-red-induction_P Parameter: Plant Line Value: Columbia
  misc_feature: MA Experiment 20001450 PARAMETER Experiment Name: At_Far-red-induction_P Parameter: Timepoint (hr) Value: 8
  misc_feature: MA Experiment 20001450 PARAMETER Experiment Name: At_Far-red-induction_P Parameter: Tissue Value: Whole Plant
  misc_feature: MA Experiment ID: 20001451 Result: Up-regulated in Transcription
  misc_feature: MA Experiment 20001451 PARAMETER Experiment Name: At_Far-red-induction_P Parameter: Age (day) Value: 7
  misc_feature: MA Experiment 20001451 PARAMETER Experiment Name: At_Far-red-induction_P Parameter: Light Value: Far-red vs. White
  misc_feature: MA Experiment 20001451 PARAMETER Experiment Name: At_Far-red-induction_P Parameter: Organism Value: A. thaliana
  misc_feature: MA Experiment 20001451 PARAMETER Experiment Name: At_Far-red-induction_P Parameter: Plant Line Value: Columbia
  misc_feature: MA Experiment 20001451 PARAMETER Experiment Name: At_Far-red-induction_P Parameter: Timepoint (hr) Value: 24
  misc_feature: MA Experiment 20001451 PARAMETER Experiment Name: At_Far-red-induction_P Parameter: Tissue Value: Whole Plant
  misc_feature: MA Experiment ID: 20001560 Result: Down-regulated in Transcription
  misc_feature: MA Experiment 20001560 PARAMETER Experiment Name: At_Drought_Soil_Dry_P Parameter: Age (day) Value: 28
  misc_feature: MA Experiment 20001560 PARAMETER Experiment Name: At_Drought_Soil_Dry_P Parameter: Organism Value: A. thaliana
  misc_feature: MA Experiment 20001560 PARAMETER Experiment Name: At_Drought_Soil_Dry_P Parameter: Plant Line Value: WS
  misc_feature: MA Experiment 20001560 PARAMETER Experiment Name: At_Drought_Soil_Dry_P Parameter: Post Timepoint (hr) Value: None
  misc_feature: MA Experiment 20001560 PARAMETER Experiment Name: At_Drought_Soil_Dry_P Parameter: Post-Treatment Value: None
  misc_feature: MA Experiment 20001560 PARAMETER Experiment Name: At_Drought_Soil_Dry_P Parameter: Timepoint (day) Value: 14
  misc_feature: MA Experiment 20001560 PARAMETER Experiment Name: At_Drought_Soil_Dry_P Parameter: Treatment Value: Drought vs. No Drought
  misc_feature: MA Experiment ID: 20001905 Result: Down-regulated in Transcription
  misc_feature: MA Experiment 20001905 PARAMETER Experiment Name: At_Drought_Reproduction_P Parameter: Age (day) Value: 40
  misc_feature: MA Experiment 20001905 PARAMETER Experiment Name: At_Drought_Reproduction_P Parameter: Organism Value: A. thaliana
  misc_feature: MA Experiment 20001905 PARAMETER Experiment Name: At_Drought_Reproduction_P Parameter: Plant Line Value: WS
  misc_feature: MA Experiment 20001905 PARAMETER Experiment Name: At_Drought_Reproduction_P Parameter: Timepoint (day) Value: 10
  misc_feature: MA Experiment 20001905 PARAMETER Experiment Name: At_Drought_Reproduction_P Parameter: Tissue Value: Rosettes
  misc_feature: MA Experiment 20001905 PARAMETER Experiment Name: At_Drought_Reproduction_P Parameter: Treatment Value: Drought vs. No Drought

SEQ ID NO: 32307 - protein, 144 aa, Arabidopsis thaliana; identical to SEQ ID NO: 28717
  peptide (1)..(144): Ceres Seq. ID no. 13487209
  misc_feature (38)..(107): Pfam Name: HMG (high mobility group) box Pfam Description: HMG (high mobility group) box
  misc_feature (1)..(144): Homolog of NCBI NO: 18394900 NR Description: expressed protein [Arabidopsis thaliana]
  misc_feature (1)..(144): Homolog of NCBI NO: 25402921 NR Description: protein F2D10.18 [imported] - Arabidopsis
  misc_feature (1)..(139): Homolog of NCBI NO: 25402921 NR Description: protein F2D10.18 [imported] - Arabidopsis
  misc_feature (1)..(144): Homolog of NCBI NO: 18394898 NR Description: expressed protein [Arabidopsis thaliana]

SEQ ID NO: 32308 - protein, 96 aa, Arabidopsis thaliana; identical to SEQ ID NO: 28718
  peptide (1)..(96): Ceres Seq. ID no. 13487210
  misc_feature (1)..(59): Pfam Name: HMG (high mobility group) box Pfam Description: HMG (high mobility group) box
  misc_feature (1)..(96): Homolog of NCBI NO: 18394900 NR Description: expressed protein [Arabidopsis thaliana]
  misc_feature (1)..(96): Homolog of NCBI NO: 25402921 NR Description: protein F2D10.18 [imported] - Arabidopsis
  misc_feature (1)..(91): Homolog of NCBI NO: 25402921 NR Description: protein F2D10.18 [imported] - Arabidopsis
  misc_feature (1)..(96): Homolog of NCBI NO: 18394898 NR Description: expressed protein [Arabidopsis thaliana]

SEQ ID NO: 32309 - protein, 79 aa, Arabidopsis thaliana; identical to SEQ ID NO: 28719
  peptide (1)..(79): Ceres Seq. ID no. 13487211

SEQ ID NO: 32310 - DNA, 651 bp, Arabidopsis thaliana; identical to SEQ ID NO: 28720
  misc_feature (1)..(651): Ceres Seq. ID no. 12776716
  misc_feature: MA Experiment ID: 108461 Result: Up-regulated in Transcription
  misc_feature: MA Experiment 108461 PARAMETER Experiment Name: At_Germinating_Seeds_cDNA_P Parameter: Age (day) Value: 1 vs. 0
  misc_feature: MA Experiment 108461 PARAMETER Experiment Name: At_Germinating_Seeds_cDNA_P Parameter: Tissue Value: Germinating Seeds
  misc_feature: MA Experiment ID: 108462 Result: Up-regulated in Transcription
  misc_feature: MA Experiment 108462 PARAMETER Experiment Name: At_Germinating_Seeds_cDNA_P Parameter: Age (day) Value: 2 vs. 0
  misc_feature: MA Experiment 108462 PARAMETER Experiment Name: At_Germinating_Seeds_cDNA_P Parameter: Tissue Value: Germinating Seeds
  misc_feature: MA Experiment ID: 108464 Result: Up-regulated in Transcription
  misc_feature: MA Experiment 108464 PARAMETER Experiment Name: At_Germinating_Seeds_cDNA_P Parameter: Age (day) Value: 4 vs. 0
  misc_feature: MA Experiment 108464 PARAMETER Experiment Name: At_Germinating_Seeds_cDNA_P Parameter: Tissue Value: Germinating Seeds
  misc_feature: MA Experiment ID: 108561 Result: Down-regulated in Transcription
  misc_feature: MA Experiment 108561 PARAMETER Experiment Name: At_100uM_ABA_cDNA_P Parameter: Timepoint (hr) Value: 6
  misc_feature: MA Experiment 108561 PARAMETER Experiment Name: At_100uM_ABA_cDNA_P Parameter: Tissue Value: Aerial
  misc_feature: MA Experiment 108561 PARAMETER Experiment Name: At_100uM_ABA_cDNA_P Parameter: Treatment Value: 100uM ABA vs. No Treatment
  misc_feature: MA Experiment ID: 108572 Result: Down-regulated in Transcription
  misc_feature: MA Experiment 108572 PARAMETER Experiment Name: At_Drought_cDNA_P Parameter: Timepoint (hr) Value: 1
  misc_feature: MA Experiment 108572 PARAMETER Experiment Name: At_Drought_cDNA_P Parameter: Tissue Value: Aerial
  misc_feature: MA Experiment 108572 PARAMETER Experiment Name: At_Drought_cDNA_P Parameter: Treatment Value: Drought vs. No Drought
  misc_feature: MA Experiment ID: 108573 Result: Down-regulated in Transcription
  misc_feature: MA Experiment 108573 PARAMETER Experiment Name: At_Drought_cDNA_P Parameter: Timepoint (hr) Value: 6
  misc_feature: MA Experiment 108573 PARAMETER Experiment Name: At_Drought_cDNA_P Parameter: Tissue Value: Aerial
  misc_feature: MA Experiment 108573 PARAMETER Experiment Name: At_Drought_cDNA_P Parameter: Treatment Value: Drought vs. No Drought
  misc_feature: MA Experiment ID: 108585 Result: Down-regulated in Transcription
  misc_feature: MA Experiment 108585 PARAMETER Experiment Name: At_5mM_NaNP_cDNA_P Parameter: Timepoint (hr) Value: 6
  misc_feature: MA Experiment 108585 PARAMETER Experiment Name: At_5mM_NaNP_cDNA_P Parameter: Tissue Value: Aerial
  misc_feature: MA Experiment 108585 PARAMETER Experiment Name: At_5mM_NaNP_cDNA_P Parameter: Treatment Value: null
  misc_feature: MA Experiment ID: 108668 Result: Down-regulated in Transcription
  misc_feature: MA Experiment 108668 PARAMETER Experiment Name: At_2mM_SA_cDNA_P Parameter: Plant Line Value: WS
  misc_feature: MA Experiment 108668 PARAMETER Experiment Name: At_2mM_SA_cDNA_P Parameter: Timepoint (hr) Value: 6
  misc_feature: MA Experiment 108668 PARAMETER Experiment Name: At_2mM_SA_cDNA_P Parameter: Treatment Value: 2mM SA vs. No Treatment
  misc_feature: MA Experiment ID: 20000070 Result: Down-regulated in Transcription
  misc_feature: MA Experiment 20000070 PARAMETER Experiment Name: At_100uM_ABA_Mutants_cDNA_P Parameter: Plant Line Value: CS24
  misc_feature: MA Experiment 20000070 PARAMETER Experiment Name: At_100uM_ABA_Mutants_cDNA_P Parameter: Timepoint (hr) Value: 6
  misc_feature: MA Experiment 20000070 PARAMETER Experiment Name: At_100uM_ABA_Mutants_cDNA_P Parameter: Tissue Value: Aerial
  misc_feature: MA Experiment 20000070 PARAMETER Experiment Name: At_100uM_ABA_Mutants_cDNA_P Parameter: Treatment Value: 100uM ABA vs. No Treatment
  misc_feature: MA Experiment ID: 20000071 Result: Down-regulated in Transcription
  misc_feature: MA Experiment 20000071 PARAMETER Experiment Name: At_100uM_ABA_Mutants_cDNA_P Parameter: Plant Line Value: CS8104
  misc_feature: MA Experiment 20000071 PARAMETER Experiment Name: At_100uM_ABA_Mutants_cDNA_P Parameter: Timepoint (hr) Value: 6
  misc_feature: MA Experiment 20000071 PARAMETER Experiment Name: At_100uM_ABA_Mutants_cDNA_P Parameter: Tissue Value: Aerial
  misc_feature: MA Experiment 20000071 PARAMETER Experiment Name: At_100uM_ABA_Mutants_cDNA_P Parameter: Treatment Value: 100uM ABA vs. No Treatment
  misc_feature: MA Experiment ID: 20000072 Result: Down-regulated in Transcription
  misc_feature: MA Experiment 20000072 PARAMETER Experiment Name: At_100uM_ABA_Mutants_cDNA_P Parameter: Plant Line Value: CS8105
  misc_feature: MA Experiment 20000072 PARAMETER Experiment Name: At_100uM_ABA_Mutants_cDNA_P Parameter: Timepoint (hr) Value: 6
  misc_feature: MA Experiment 20000072 PARAMETER Experiment Name: At_100uM_ABA_Mutants_cDNA_P Parameter: Tissue Value: Aerial
  misc_feature: MA Experiment 20000072 PARAMETER Experiment Name: At_100uM_ABA_Mutants_cDNA_P Parameter: Treatment Value: 100uM ABA vs. No Treatment
  misc_feature: MA Experiment ID: 20000087 Result: Down-regulated in Transcription
  misc_feature: MA Experiment 20000087 PARAMETER Experiment Name: At_100uM_ABA_Mutants_cDNA_P Parameter: Plant Line Value: WS
  misc_feature: MA Experiment 20000087 PARAMETER Experiment Name: At_100uM_ABA_Mutants_cDNA_P Parameter: Timepoint (hr) Value: 6
  misc_feature: MA Experiment 20000087 PARAMETER Experiment Name: At_100uM_ABA_Mutants_cDNA_P Parameter: Tissue Value: Aerial
  misc_feature: MA Experiment 20000087 PARAMETER Experiment Name: At_100uM_ABA_Mutants_cDNA_P Parameter: Treatment Value: 100uM ABA vs. No Treatment
  misc_feature: MA Experiment ID: 20000088 Result: Down-regulated in Transcription
  misc_feature: MA Experiment 20000088 PARAMETER Experiment Name: At_100uM_ABA_Mutants_cDNA_P Parameter: Plant Line Value: Landsberg
  misc_feature: MA Experiment 20000088 PARAMETER Experiment Name: At_100uM_ABA_Mutants_cDNA_P Parameter: Timepoint (hr) Value: 6
  misc_feature: MA Experiment 20000088 PARAMETER Experiment Name: At_100uM_ABA_Mutants_cDNA_P Parameter: Tissue Value: Aerial
  misc_feature: MA Experiment 20000088 PARAMETER Experiment Name: At_100uM_ABA_Mutants_cDNA_P Parameter: Treatment Value: 100uM ABA vs. No Treatment
  misc_feature: MA Experiment ID: 20000090 Result: Down-regulated in Transcription
  misc_feature: MA Experiment ID: 20000117 Result: Down-regulated in Transcription
  misc_feature: MA Experiment 20000117 PARAMETER Experiment Name: At_100uM_ABA_Mutants_cDNA_P Parameter: Plant Line Value: Columbia
  misc_feature: MA Experiment 20000117 PARAMETER Experiment Name: At_100uM_ABA_Mutants_cDNA_P Parameter: Timepoint (hr) Value: 6
  misc_feature: MA Experiment 20000117 PARAMETER Experiment Name: At_100uM_ABA_Mutants_cDNA_P Parameter: Tissue Value: Aerial
  misc_feature: MA Experiment 20000117 PARAMETER Experiment Name: At_100uM_ABA_Mutants_cDNA_P Parameter: Treatment Value: 100uM ABA vs. No Treatment
  misc_feature: MA Experiment ID: 20000179 Result: Up-regulated in Transcription
  misc_feature: MA Experiment 20000179 PARAMETER Experiment Name: At_Germinating_Seeds_P Parameter: Age (hr) Value: 6 vs. 0
  misc_feature: MA Experiment 20000179 PARAMETER Experiment Name: At_Germinating_Seeds_P Parameter: Tissue Value: Germinating Seeds
  misc_feature: MA Experiment ID: 20000180 Result: Up-regulated in Transcription
  misc_feature: MA Experiment 20000180 PARAMETER Experiment Name: At_Germinating_Seeds_P Parameter: Age (hr) Value: 24 vs. 0
  misc_feature: MA Experiment 20000180 PARAMETER Experiment Name: At_Germinating_Seeds_P Parameter: Tissue Value: Germinating Seeds
  misc_feature: MA Experiment ID: 20000182 Result: Down-regulated in Transcription
  misc_feature: MA Experiment 20000182 PARAMETER Experiment Name: At_2mM_SA_P Parameter: Age (day) Value: 14
  misc_feature: MA Experiment 20000182 PARAMETER Experiment Name: At_2mM_SA_P Parameter: Organism Value: A. thaliana
  misc_feature: MA Experiment 20000182 PARAMETER Experiment Name: At_2mM_SA_P Parameter: Plant Line Value: WS
  misc_feature: MA Experiment 20000182 PARAMETER Experiment Name: At_2mM_SA_P Parameter: Timepoint (hr) Value: 6
  misc_feature: MA Experiment 20000182 PARAMETER Experiment Name: At_2mM_SA_P Parameter: Tissue Value: Aerial
  misc_feature: MA Experiment 20000182 PARAMETER Experiment Name: At_2mM_SA_P Parameter: Treatment Value: 2mM SA vs. No Treatment
  misc_feature: MA Experiment ID: 20000184 Result: Up-regulated in Transcription
  misc_feature: MA Experiment 20000184 PARAMETER Experiment Name: At_Shoots__P Parameter: Age (day) Value: 7
  misc_feature: MA Experiment 20000184 PARAMETER Experiment Name: At_Shoots__P Parameter: Tissue Value: Shoots vs. Whole Plant
  misc_feature: MA Experiment ID: 20000185 Result: Down-regulated in Transcription
  misc_feature: MA Experiment 20000185 PARAMETER Experiment Name: At_Roots__P Parameter: Age (day) Value: 7 vs. 21
  misc_feature: MA Experiment 20000185 PARAMETER Experiment Name: At_Roots__P Parameter: Organism Value: A. thaliana
  misc_feature: MA Experiment 20000185 PARAMETER Experiment Name: At_Roots__P Parameter: Tissue Value: Roots vs. Whole Plant
  misc_feature: MA Experiment ID: 20000227 Result: Up-regulated in Transcription
  misc_feature: MA Experiment 20000227 PARAMETER Experiment Name: At_Root-Tips-vs-Tops_P Parameter: Tissue Value: Root Tips vs. Root Tops
  misc_feature: MA Experiment ID: 20000437 Result: Down-regulated in Transcription
  misc_feature: MA Experiment 20000437 PARAMETER Experiment Name: At_Drought_P Parameter: Age (day) Value: 8
  misc_feature: MA Experiment 20000437 PARAMETER Experiment Name: At_Drought_P Parameter: Organism Value: A. thaliana
  misc_feature: MA Experiment 20000437 PARAMETER Experiment Name: At_Drought_P Parameter: Plant Line Value: WS
  misc_feature: MA Experiment 20000437 PARAMETER Experiment Name: At_Drought_P Parameter: Timepoint (hr) Value: 24
  misc_feature: MA Experiment 20000437 PARAMETER Experiment Name: At_Drought_P Parameter: Tissue Value: Whole Plant
  misc_feature: MA Experiment 20000437 PARAMETER Experiment Name: At_Drought_P Parameter: Treatment Value: Drought vs. No Drought
  misc_feature: MA Experiment ID: 20000439 Result: Down-regulated in Transcription
  misc_feature: MA Experiment 20000439 PARAMETER Experiment Name: At_Roots__P Parameter: Age (day) Value: 14 vs. 21
  misc_feature: MA Experiment 20000439 PARAMETER Experiment Name: At_Roots__P Parameter: Organism Value: A. thaliana
  misc_feature: MA Experiment 20000439 PARAMETER Experiment Name: At_Roots__P Parameter: Tissue Value: Roots vs. Whole Plant
  misc_feature: MA Experiment ID: 20000794 Result: Down-regulated in Transcription
  misc_feature: MA Experiment 20000794 PARAMETER Experiment Name: At_Petals_P Parameter: Age (day) Value: 23-25 days
  misc_feature: MA Experiment 20000794 PARAMETER Experiment Name: At_Petals_P Parameter: Plant Line Value: WS
  misc_feature: MA Experiment 20000794 PARAMETER Experiment Name: At_Petals_P Parameter: Tissue Value: Petals vs. Whole plant
  misc_feature: MA Experiment ID: 20001248 Result: Down-regulated in Transcription
  misc_feature: MA Experiment 20001248 PARAMETER Experiment Name: At_Far-red-induction_P Parameter: Age (day) Value: 7
  misc_feature: MA Experiment 20001248 PARAMETER Experiment Name: At_Far-red-induction_P Parameter: Light Value: Far-red vs. White
  misc_feature: MA Experiment 20001248 PARAMETER Experiment Name: At_Far-red-induction_P Parameter: Organism Value: A. thaliana
  misc_feature: MA Experiment 20001248 PARAMETER Experiment Name: At_Far-red-induction_P Parameter: Plant Line Value: Columbia
  misc_feature: MA Experiment 20001248 PARAMETER Experiment Name: At_Far-red-induction_P Parameter: Timepoint (hr) Value: 4
  misc_feature: MA Experiment 20001248 PARAMETER Experiment Name: At_Far-red-induction_P Parameter: Tissue Value: Whole Plant
  misc_feature: MA Experiment ID: 20001558 Result: Up-regulated in Transcription
  misc_feature: MA Experiment 20001558 PARAMETER Experiment Name: At_Drought_Soil_Dry_P Parameter: Age (day) Value: 27
  misc_feature: MA Experiment 20001558 PARAMETER Experiment Name: At_Drought_Soil_Dry_P Parameter: Organism Value: A. thaliana
  misc_feature: MA Experiment 20001558 PARAMETER Experiment Name: At_Drought_Soil_Dry_P Parameter: Plant Line Value: WS
  misc_feature: MA Experiment 20001558 PARAMETER Experiment Name: At_Drought_Soil_Dry_P Parameter: Post Timepoint (hr) Value: 6
  misc_feature: MA Experiment 20001558 PARAMETER Experiment Name: At_Drought_Soil_Dry_P Parameter: Post-Treatment Value: Re-Water vs. No Drought
  misc_feature: MA Experiment 20001558 PARAMETER Experiment Name: At_Drought_Soil_Dry_P Parameter: Timepoint (day) Value: 13
  misc_feature: MA Experiment 20001558 PARAMETER Experiment Name: At_Drought_Soil_Dry_P Parameter: Treatment Value: Drought vs. No Drought
  misc_feature: MA Experiment ID: 20001560 Result: Up-regulated in Transcription
  misc_feature: MA Experiment 20001560 PARAMETER Experiment Name: At_Drought_Soil_Dry_P Parameter: Age (day) Value: 28
  misc_feature: MA Experiment 20001560 PARAMETER Experiment Name: At_Drought_Soil_Dry_P Parameter: Organism Value: A. thaliana
  misc_feature: MA Experiment 20001560 PARAMETER Experiment Name: At_Drought_Soil_Dry_P Parameter: Plant Line Value: WS
  misc_feature: MA Experiment 20001560 PARAMETER Experiment Name: At_Drought_Soil_Dry_P Parameter: Post Timepoint (hr) Value: None
  misc_feature: MA Experiment 20001560 PARAMETER Experiment Name: At_Drought_Soil_Dry_P Parameter: Post-Treatment Value: None
  misc_feature: MA Experiment 20001560 PARAMETER Experiment Name: At_Drought_Soil_Dry_P Parameter: Timepoint (day) Value: 14
  misc_feature: MA Experiment 20001560 PARAMETER Experiment Name: At_Drought_Soil_Dry_P Parameter: Treatment Value: Drought vs. No Drought
  misc_feature: MA Experiment ID: 20001906 Result: Down-regulated in Transcription
  misc_feature: MA Experiment 20001906 PARAMETER Experiment Name: At_Drought_Reproduction_P Parameter: Age (day) Value: 35
  misc_feature: MA Experiment 20001906 PARAMETER Experiment Name: At_Drought_Reproduction_P Parameter: Organism Value: A. thaliana
  misc_feature: MA Experiment 20001906 PARAMETER Experiment Name: At_Drought_Reproduction_P Parameter: Plant Line Value: WS
  misc_feature: MA Experiment 20001906 PARAMETER Experiment Name: At_Drought_Reproduction_P Parameter: Timepoint (day) Value: 5
  misc_feature: MA Experiment 20001906 PARAMETER Experiment Name: At_Drought_Reproduction_P Parameter: Tissue Value: Siliques
  misc_feature: MA Experiment 20001906 PARAMETER Experiment Name: At_Drought_Reproduction_P Parameter: Treatment Value: Drought vs. No Drought
  misc_feature: MA Experiment ID: 20001908 Result: Down-regulated in Transcription
  misc_feature: MA Experiment 20001908 PARAMETER Experiment Name: At_Drought_Reproduction_P Parameter: Age (day) Value: 40
  misc_feature: MA Experiment 20001908 PARAMETER Experiment Name: At_Drought_Reproduction_P Parameter: Organism Value: A. thaliana
  misc_feature: MA Experiment 20001908 PARAMETER Experiment Name: At_Drought_Reproduction_P Parameter: Plant Line Value: WS
  misc_feature: MA Experiment 20001908 PARAMETER Experiment Name: At_Drought_Reproduction_P Parameter: Timepoint (day) Value: 10
  misc_feature: MA Experiment 20001908 PARAMETER Experiment Name: At_Drought_Reproduction_P Parameter: Tissue Value: Siliques
  misc_feature: MA Experiment 20001908 PARAMETER Experiment Name: At_Drought_Reproduction_P Parameter: Treatment Value: Drought vs. No Drought

SEQ ID NO: 32311 - protein, 67 aa, Arabidopsis thaliana; identical to SEQ ID NO: 28721
  peptide (1)..(67): Ceres Seq. ID no. 12776717
  misc_feature (1)..(60): Pfam Name: Rapid ALkalinization Factor (RALF) Pfam Description: Rapid ALkalinization Factor (RALF)
  misc_feature (1)..(58): Homolog of NCBI NO: 28628205 NR Description: rapid alkalinization factor 2 precursor
  misc_feature (1)..(63): Homolog of NCBI NO: 30685837 NR Description: expressed protein [Arabidopsis thaliana]
  misc_feature (1)..(58): Homolog of NCBI NO: 15218637 NR Description: hypothetical protein; protein id: At1g02900.1
  misc_feature (1)..(60): Homolog of NCBI NO: 18397246 NR Description: expressed protein
  misc_feature (1)..(60): Homolog of NCBI NO: 18414528 NR Description: Expressed protein
  misc_feature (1)..(60): Homolog of NCBI NO: 18401177 NR Description: expressed protein
  misc_feature (1)..(16): Homolog of NCBI NO: 7459901 NR Description: hypothetical protein DL3015C - Arabidopsis
  misc_feature (1)..(67): Homolog of NCBI NO: 18414108 NR Description: expressed protein
  misc_feature (1)..(67): Homolog of NCBI NO: 21553907 NR Description: unknown [Arabidopsis thaliana]
  misc_feature (1)..(67): Homolog of NCBI NO: 18403901 NR Description: Expressed protein

SEQ ID NO: 32312 - protein, 66 aa, Arabidopsis thaliana; identical to SEQ ID NO: 28722
  peptide (1)..(66): Ceres Seq. ID no. 12776718
  misc_feature (1)..(59): Pfam Name: Rapid ALkalinization Factor (RALF) Pfam Description: Rapid ALkalinization Factor (RALF)
  misc_feature (1)..(57): Homolog of NCBI NO: 28628205 NR Description: rapid alkalinization factor 2 precursor
  misc_feature (1)..(62): Homolog of NCBI NO: 30685837 NR Description: expressed protein [Arabidopsis thaliana]
  misc_feature (1)..(57): Homolog of NCBI NO: 15218637 NR Description: hypothetical protein; protein id: At1g02900.1
  misc_feature (1)..(59): Homolog of NCBI NO: 18397246 NR Description: expressed protein
  misc_feature (1)..(59): Homolog of NCBI NO: 18414528 NR Description: Expressed protein
  misc_feature (1)..(59): Homolog of NCBI NO: 18401177 NR Description: expressed protein
  misc_feature (1)..(15): Homolog of NCBI NO: 7459901 NR Description: hypothetical protein DL3015C - Arabidopsis
  misc_feature (1)..(66): Homolog of NCBI NO: 18414108 NR Description: expressed protein
  misc_feature (1)..(66): Homolog of NCBI NO: 21553907 NR Description: unknown [Arabidopsis thaliana]
  misc_feature (1)..(66): Homolog of NCBI NO: 18403901 NR Description: Expressed protein

SEQ ID NO: 32313 - protein, 57 aa, Arabidopsis thaliana; identical to SEQ ID NO: 28723
  peptide (1)..(57): Ceres Seq. ID no. 12776719
  misc_feature (1)..(50): Pfam Name: Rapid ALkalinization Factor (RALF) Pfam Description: Rapid ALkalinization Factor (RALF)
  misc_feature (1)..(48): Homolog of NCBI NO: 34902918 NR Description: unnamed protein product [Oryza sativa (japonica
  misc_feature (1)..(48): Homolog of NCBI NO: 28628205 NR Description: rapid alkalinization factor 2 precursor
  misc_feature (1)..(53): Homolog of NCBI NO: 30685837 NR Description: expressed protein [Arabidopsis thaliana]
  misc_feature (1)..(48): Homolog of NCBI NO: 15218637 NR Description: hypothetical protein; protein id: At1g02900.1
  misc_feature (1)..(50): Homolog of NCBI NO: 18397246 NR Description: expressed protein
  misc_feature (1)..(50): Homolog of NCBI NO: 18414528 NR Description: Expressed protein
  misc_feature (1)..(50): Homolog of NCBI NO: 18401177 NR Description: expressed protein
  misc_feature (1)..(57): Homolog of NCBI NO: 18414108 NR Description: expressed protein
  misc_feature (1)..(57): Homolog of NCBI NO: 21553907 NR Description: unknown [Arabidopsis thaliana]
  misc_feature (1)..(57): Homolog of NCBI NO: 18403901 NR Description: Expressed protein

SEQ ID NO: 32314 - DNA, 515 bp, Arabidopsis thaliana; identical to SEQ ID NO: 28724
  misc_feature (1)..(515): Ceres Seq. ID no. 12331831
  misc_feature: MA Experiment ID: 108434 Result: Up-regulated in Transcription
  misc_feature: MA Experiment 108434 PARAMETER Experiment Name: At_Root_Tips_cDNA_P Parameter: Tissue Value: Root Tips
  misc_feature: MA Experiment ID: 108462 Result: Down-regulated in Transcription
  misc_feature: MA Experiment 108462 PARAMETER Experiment Name: At_Germinating_Seeds_cDNA_P Parameter: Age (day) Value: 2 vs. 0
  misc_feature: MA Experiment 108462 PARAMETER Experiment Name: At_Germinating_Seeds_cDNA_P Parameter: Tissue Value: Germinating Seeds
  misc_feature: MA Experiment ID: 108463 Result: Down-regulated in Transcription
  misc_feature: MA Experiment 108463 PARAMETER Experiment Name: At_Germinating_Seeds_cDNA_P Parameter: Age (day) Value: 3 vs. 0
  misc_feature: MA Experiment 108463 PARAMETER Experiment Name: At_Germinating_Seeds_cDNA_P Parameter: Tissue Value: Germinating Seeds
  misc_feature: MA Experiment ID: 108464 Result: Down-regulated in Transcription
  misc_feature: MA Experiment 108464 PARAMETER Experiment Name: At_Germinating_Seeds_cDNA_P Parameter: Age (day) Value: 4 vs. 0
  misc_feature: MA Experiment 108464 PARAMETER Experiment Name: At_Germinating_Seeds_cDNA_P Parameter: Tissue Value: Germinating Seeds
  misc_feature: MA Experiment ID: 108595 Result: Up-regulated in Transcription
  misc_feature: MA Experiment 108595 PARAMETER Experiment Name: At_Ler-pi_Ovule_cDNA_P Parameter: Plant Line Value: null
  misc_feature: MA Experiment ID: 20000227 Result: Up-regulated in Transcription
  misc_feature: MA Experiment 20000227 PARAMETER Experiment Name: At_Root-Tips-vs-Tops_P Parameter: Tissue Value: Root Tips vs. Root Tops
  misc_feature: MA Experiment ID: 20000234 Result: Up-regulated in Transcription
  misc_feature: MA Experiment 20000234 PARAMETER Experiment Name: At_Siliques_P Parameter: Age (day) Value: 21
  misc_feature: MA Experiment 20000234 PARAMETER Experiment Name: At_Siliques_P Parameter: Organism Value: A. thaliana
  misc_feature: MA Experiment 20000234 PARAMETER Experiment Name: At_Siliques_P Parameter: Plant Line Value: WS
  misc_feature: MA Experiment 20000234 PARAMETER Experiment Name: At_Siliques_P Parameter: Tissue Value: Less Than 5mm Siliques vs. Whole Plant
  misc_feature: MA Experiment ID: 20000286 Result: Up-regulated in Transcription
  misc_feature: MA Experiment 20000286 PARAMETER Experiment Name: At_Open_Flower_P Parameter: Age (day) Value: 21
  misc_feature: MA Experiment 20000286 PARAMETER Experiment Name: At_Open_Flower_P Parameter: Plant Line Value: WS
  misc_feature: MA Experiment 20000286 PARAMETER Experiment Name: At_Open_Flower_P Parameter: Tissue Value: Half Open vs. Whole Plant
  misc_feature: MA Experiment ID: 20000495 Result: Up-regulated in Transcription
  misc_feature: MA Experiment 20000495 PARAMETER Experiment Name: At_Guard_Cells_P Parameter: Harvest Date Value: 8/2/2002
  misc_feature: MA Experiment 20000495 PARAMETER Experiment Name: At_Guard_Cells_P Parameter: Organism Value: A. thaliana
  misc_feature: MA Experiment 20000495 PARAMETER Experiment Name: At_Guard_Cells_P Parameter: Tissue Value: Guard Cells vs. Leaves
  misc_feature: MA Experiment ID: 20001558 Result: Up-regulated in Transcription
  misc_feature: MA Experiment 20001558 PARAMETER Experiment Name: At_Drought_Soil_Dry_P Parameter: Age (day) Value: 27
  misc_feature: MA Experiment 20001558 PARAMETER Experiment Name: At_Drought_Soil_Dry_P Parameter: Organism Value: A. thaliana
  misc_feature: MA Experiment 20001558 PARAMETER Experiment Name: At_Drought_Soil_Dry_P Parameter: Plant Line Value: WS
  misc_feature: MA Experiment 20001558 PARAMETER Experiment Name: At_Drought_Soil_Dry_P Parameter: Post Timepoint (hr) Value: 6
  misc_feature: MA Experiment 20001558 PARAMETER Experiment Name: At_Drought_Soil_Dry_P Parameter: Post-Treatment Value: Re-Water vs. No Drought
  misc_feature: MA Experiment 20001558 PARAMETER Experiment Name: At_Drought_Soil_Dry_P Parameter: Timepoint (day) Value: 13
  misc_feature: MA Experiment 20001558 PARAMETER Experiment Name: At_Drought_Soil_Dry_P Parameter: Treatment Value: Drought vs. No Drought

SEQ ID NO: 32315 - protein, 154 aa, Arabidopsis thaliana; identical to SEQ ID NO: 28725
  peptide (1)..(154): Ceres Seq. ID no. 12331832
  misc_feature (48)..(119): Pfam Name: RNA recognition motif. (a.k.a. RRM, RBD, or RNP domain) Pfam Description: RNA recognition motif. (a.k.a. RRM, RBD, or RNP
  misc_feature (13)..(128): Homolog of NCBI NO: 7439994 NR Description: glycine-rich RNA-binding protein - garden pea
  misc_feature (26)..(126): Homolog of NCBI NO: 15239958 NR Description: RRM-containing protein
  misc_feature (20)..(128): Homolog of NCBI NO: 7489099 NR Description: RNA-binding protein RGP-3 - wood tobacco
  misc_feature (23)..(127): Homolog of NCBI NO: 34906972 NR Description: putative glycine-rich RNA-binding protein 2
  misc_feature (20)..(128): Homolog of NCBI NO: 7439995 NR Description: RNA binding protein 3 - wood tobacco
  misc_feature (10)..(128): Homolog of NCBI NO: 38344030 NR Description: OJ991214_12.1 [Oryza sativa (japonica
  misc_feature (10)..(132): Homolog of NCBI NO: 34898598 NR Description: P0534A03.25 [Oryza sativa (japonica
  misc_feature (6)..(134): Homolog of NCBI NO: 15239676 NR Description: RRM-containing protein
  misc_feature (17)..(143): Homolog of NCBI NO: 38636774 NR Description: putative RNA recognition motif (RRM)-containing
  misc_feature (13)..(154): Homolog of NCBI NO: 15224298 NR Description: RRM-containing protein

SEQ ID NO: 32316 - protein, 142 aa, Arabidopsis thaliana; identical to SEQ ID NO: 28726
  peptide (1)..(142): Ceres Seq. ID no. 12331833
  misc_feature (36)..(107): Pfam Name: RNA recognition motif. (a.k.a. RRM, RBD, or RNP domain) Pfam Description: RNA recognition motif. (a.k.a. RRM, RBD, or RNP
  misc_feature (1)..(116): Homolog of NCBI NO: 7439994 NR Description: glycine-rich RNA-binding protein - garden pea
  misc_feature (14)..(114): Homolog of NCBI NO: 15239958 NR Description: RRM-containing protein
  misc_feature (8)..(116): Homolog of NCBI NO: 7489099 NR Description: RNA-binding protein RGP-3 - wood tobacco
  misc_feature (11)..(115): Homolog of NCBI NO: 34906972 NR Description: putative glycine-rich RNA-binding protein 2
  misc_feature (8)..(116): Homolog of NCBI NO: 7439995 NR Description: RNA binding protein 3 - wood tobacco
  misc_feature (1)..(116): Homolog of NCBI NO: 38344030 NR Description: OJ991214_12.1 [Oryza sativa (japonica
  misc_feature (1)..(120): Homolog of NCBI NO: 34898598 NR Description: P0534A03.25 [Oryza sativa (japonica
  misc_feature (1)..(122): Homolog of NCBI NO: 15239676 NR Description: RRM-containing protein
  misc_feature (5)..(131): Homolog of NCBI NO: 38636774 NR Description: putative RNA recognition motif (RRM)-containing
  misc_feature (1)..(142): Homolog of NCBI NO: 15224298 NR Description: RRM-containing protein

SEQ ID NO: 32317 - DNA, 1164 bp, Arabidopsis thaliana; identical to SEQ ID NO: 28727
  misc_feature (1)..(1164): Ceres Seq. ID no. 12420728
  misc_feature: MA Experiment ID: 108434 Result: Down-regulated in Transcription
  misc_feature: MA Experiment 108434 PARAMETER Experiment Name: At_Root_Tips_cDNA_P Parameter: Tissue Value: Root Tips
  misc_feature: MA Experiment ID: 108577 Result: Down-regulated in Transcription
  misc_feature: MA Experiment 108577 PARAMETER Experiment Name: At_42deg_Heat_cDNA_P Parameter: Temperature (deg C) Value: 42 vs. 22
  misc_feature: MA Experiment 108577 PARAMETER Experiment Name: At_42deg_Heat_cDNA_P Parameter: Timepoint (hr) Value: 6
  misc_feature: MA Experiment 108577 PARAMETER Experiment Name: At_42deg_Heat_cDNA_P Parameter: Tissue Value: Aerial
  misc_feature: MA Experiment ID: 108595 Result: Down-regulated in Transcription
  misc_feature: MA Experiment 108595 PARAMETER Experiment Name: At_Ler-pi_Ovule_cDNA_P Parameter: Plant Line Value: null
  misc_feature: MA Experiment ID: 20000111 Result: Down-regulated in Transcription
  misc_feature: MA Experiment 20000111 PARAMETER Experiment Name: At_42deg_Heat_cDNA_P Parameter: Temperature (deg C) Value: 42 vs. 22
  misc_feature: MA Experiment 20000111 PARAMETER Experiment Name: At_42deg_Heat_cDNA_P Parameter: Timepoint (hr) Value: 6
  misc_feature: MA Experiment 20000111 PARAMETER Experiment Name: At_42deg_Heat_cDNA_P Parameter: Tissue Value: Aerial

SEQ ID NO: 32318 - protein, 282 aa, Arabidopsis thaliana; identical to SEQ ID NO: 28728
  peptide (1)..(282): Ceres Seq. ID no. 12420729
  misc_feature (176)..(237): Pfam Name: Protein of unknown function, DUF623 Pfam Description: Protein of unknown function, DUF623
  misc_feature (143)..(233): Homolog of NCBI NO: 34912272 NR Description: P0710A02.17 [Oryza sativa (japonica
  misc_feature (121)..(242): Homolog of NCBI NO: 15220029 NR Description: hypothetical protein; protein id: At1g79960.1
  misc_feature (162)..(245): Homolog of NCBI NO: 22331750 NR Description: similar to similar to unknown protein
  misc_feature (112)..(272): Homolog of NCBI NO: 26452010 NR Description: unknown protein [Arabidopsis thaliana]
  misc_feature (77)..(282): Homolog of NCBI NO: 21618162 NR Description: unknown [Arabidopsis thaliana]
  misc_feature (77)..(282): Homolog of NCBI NO: 18409629 NR Description: expressed protein
  misc_feature (112)..(272): Homolog of NCBI NO: 18404030 NR Description: expressed protein
  misc_feature (93)..(264): Homolog of NCBI NO: 38637034 NR Description: hypothetical protein [Oryza sativa (japonica
  misc_feature (86)..(262): Homolog of NCBI NO: 34908538 NR Description: P0423B08.18 [Oryza sativa (japonica
  misc_feature (23)..(282): Homolog of NCBI NO: 15238336 NR Description: putative protein

SEQ ID NO: 32319 - protein, 260 aa, Arabidopsis thaliana; identical to SEQ ID NO: 28729
  peptide (1)..(260): Ceres Seq. ID no. 12420730
  misc_feature (154)..(215): Pfam Name: Protein of unknown function, DUF623 Pfam Description: Protein of unknown function, DUF623
  misc_feature (121)..(211): Homolog of NCBI NO: 34912272 NR Description: P0710A02.17 [Oryza sativa (japonica
  misc_feature (99)..(220): Homolog of NCBI NO: 15220029 NR Description: hypothetical protein; protein id: At1g79960.1
  misc_feature (140)..(223): Homolog of NCBI NO: 22331750 NR Description: similar to similar to unknown protein
  misc_feature (90)..(250): Homolog of NCBI NO: 26452010 NR Description: unknown protein [Arabidopsis thaliana]
  misc_feature (55)..(260): Homolog of NCBI NO: 21618162 NR Description: unknown [Arabidopsis thaliana]
  misc_feature (55)..(260): Homolog of NCBI NO: 18409629 NR Description: expressed protein
  misc_feature (90)..(250): Homolog of NCBI NO: 18404030 NR Description: expressed protein
  misc_feature (71)..(242): Homolog of NCBI NO: 38637034 NR Description: hypothetical protein [Oryza sativa (japonica
  misc_feature (64)..(240): Homolog of NCBI NO: 34908538 NR Description: P0423B08.18 [Oryza sativa (japonica
  misc_feature (1)..(260): Homolog of NCBI NO: 15238336 NR Description: putative protein

SEQ ID NO: 32320 - protein, 255 aa, Arabidopsis thaliana; identical to SEQ ID NO: 28730
  peptide (1)..(255): Ceres Seq. ID no. 12420731
  misc_feature (149)..(210): Pfam Name: Protein of unknown function, DUF623 Pfam Description: Protein of unknown function, DUF623
  misc_feature (116)..(206): Homolog of NCBI NO: 34912272 NR Description: P0710A02.17 [Oryza sativa (japonica
  misc_feature (94)..(215): Homolog of NCBI NO: 15220029 NR Description: hypothetical protein; protein id: At1g79960.1
  misc_feature (135)..(218): Homolog of NCBI NO: 22331750 NR Description: similar to similar to unknown protein
  misc_feature (85)..(245): Homolog of NCBI NO: 26452010 NR Description: unknown protein [Arabidopsis thaliana]
  misc_feature (50)..(255): Homolog of NCBI NO: 21618162 NR Description: unknown [Arabidopsis thaliana]
  misc_feature (50)..(255): Homolog of NCBI NO: 18409629 NR Description: expressed protein
  misc_feature (85)..(245): Homolog of NCBI NO: 18404030 NR Description: expressed protein
  misc_feature (66)..(237): Homolog of NCBI NO: 38637034 NR Description: hypothetical protein [Oryza sativa (japonica
  misc_feature (59)..(235): Homolog of NCBI NO: 34908538 NR Description: P0423B08.18 [Oryza sativa (japonica
  misc_feature (1)..(255): Homolog of NCBI NO: 15238336 NR Description: putative protein

SEQ ID NO: 32321 - DNA, 695 bp, Arabidopsis thaliana; identical to SEQ ID NO: 28731
  misc_feature (1)..(695): Ceres Seq. ID no. 12370089
  misc_feature: MA Experiment ID: 108473 Result: Down-regulated in Transcription
  misc_feature: MA Experiment 108473 PARAMETER Experiment Name: At_Drought_Flowers_cDNA_P Parameter: Timepoint (hr) Value: 7 d
  misc_feature: MA Experiment 108473 PARAMETER Experiment Name: At_Drought_Flowers_cDNA_P Parameter: Tissue Value: Flower
  misc_feature: MA Experiment 108473 PARAMETER Experiment Name: At_Drought_Flowers_cDNA_P Parameter: Treatment Value: Drought vs. No Drought
  misc_feature: MA Experiment ID: 108501 Result: Down-regulated in Transcription
  misc_feature: MA Experiment 108501 PARAMETER Experiment Name: At_ap2_floral_buds_cDNA_P Parameter: Plant Line Value: ap2 (Ler.)
  misc_feature: MA Experiment 108501 PARAMETER Experiment Name: At_ap2_floral_buds_cDNA_P Parameter: Tissue Value: Closed Flower
  misc_feature: MA Experiment ID: 108595 Result: Up-regulated in Transcription
  misc_feature: MA Experiment 108595 PARAMETER Experiment Name: At_Ler-pi_Ovule_cDNA_P Parameter: Plant Line Value: null
  misc_feature: MA Experiment ID: 20000184 Result: Down-regulated in Transcription
  misc_feature: MA Experiment 20000184 PARAMETER Experiment Name: At_Shoots__P Parameter: Age (day) Value: 7
  misc_feature: MA Experiment 20000184 PARAMETER Experiment Name: At_Shoots__P Parameter: Tissue Value: Shoots vs. Whole Plant
  misc_feature: MA Experiment ID: 20000185 Result: Down-regulated in Transcription
  misc_feature: MA Experiment 20000185 PARAMETER Experiment Name: At_Roots__P Parameter: Age (day) Value: 7 vs. 21
  misc_feature: MA Experiment 20000185 PARAMETER Experiment Name: At_Roots__P Parameter: Organism Value: A. thaliana
  misc_feature: MA Experiment 20000185 PARAMETER Experiment Name: At_Roots__P Parameter: Tissue Value: Roots vs. Whole Plant
  misc_feature: MA Experiment ID: 20000234 Result: Down-regulated in Transcription
  misc_feature: MA Experiment 20000234 PARAMETER Experiment Name: At_Siliques_P Parameter: Age (day) Value: 21
  misc_feature: MA Experiment 20000234 PARAMETER Experiment Name: At_Siliques_P Parameter: Organism Value: A. thaliana
  misc_feature: MA Experiment 20000234 PARAMETER Experiment Name: At_Siliques_P Parameter: Plant Line Value: WS
  misc_feature: MA Experiment 20000234 PARAMETER Experiment Name: At_Siliques_P Parameter: Tissue Value: Less Than 5mm Siliques vs. Whole Plant
  misc_feature: MA Experiment ID: 20000235 Result: Down-regulated in Transcription
  misc_feature: MA Experiment 20000235 PARAMETER Experiment Name: At_Siliques_P Parameter: Age (day) Value: 21
  misc_feature: MA Experiment 20000235 PARAMETER Experiment Name: At_Siliques_P Parameter: Organism Value: A. thaliana
  misc_feature: MA Experiment 20000235 PARAMETER Experiment Name: At_Siliques_P Parameter: Plant Line Value: WS
  misc_feature: MA Experiment 20000235 PARAMETER Experiment Name: At_Siliques_P Parameter: Tissue Value: 5-10mm Siliques vs. Whole Plant
  misc_feature: MA Experiment ID: 20000265 Result: Up-regulated in Transcription
  misc_feature: MA Experiment 20000265 PARAMETER Experiment Name: At_Open_Flower_P Parameter: Age (day) Value: 21
  misc_feature: MA Experiment 20000265 PARAMETER Experiment Name: At_Open_Flower_P Parameter: Plant Line Value: WS
  misc_feature: MA Experiment 20000265 PARAMETER Experiment Name: At_Open_Flower_P Parameter: Tissue Value: Closed Flower vs. Whole Plant
  misc_feature: MA Experiment ID: 20000286 Result: Up-regulated in Transcription
  misc_feature: MA Experiment 20000286 PARAMETER Experiment Name: At_Open_Flower_P Parameter: Age (day) Value: 21
  misc_feature: MA Experiment 20000286 PARAMETER Experiment Name: At_Open_Flower_P Parameter: Plant Line Value: WS
  misc_feature: MA Experiment 20000286 PARAMETER Experiment Name: At_Open_Flower_P Parameter: Tissue Value: Half Open vs. Whole Plant
  misc_feature: MA Experiment ID: 20000438 Result: Down-regulated in Transcription
  misc_feature: MA Experiment 20000438 PARAMETER Experiment Name: At_Shoots__P Parameter: Age (day) Value: 14
  misc_feature: MA Experiment 20000438 PARAMETER Experiment Name: At_Shoots__P Parameter: Tissue Value: Shoots vs. Whole Plant
  misc_feature: MA Experiment ID: 20000709 Result: Down-regulated in Transcription
  misc_feature: MA Experiment 20000709 PARAMETER Experiment Name: At_15mM_NH4NO3_L-to-H_P Parameter: Age (hr) Value: 14
  misc_feature: MA Experiment 20000709 PARAMETER Experiment Name: At_15mM_NH4NO3_L-to-H_P Parameter: Organism Value: A. thaliana
  misc_feature: MA Experiment 20000709 PARAMETER Experiment Name: At_15mM_NH4NO3_L-to-H_P Parameter: Plant Line Value: WS
  misc_feature: MA Experiment 20000709 PARAMETER Experiment Name: At_15mM_NH4NO3_L-to-H_P Parameter: Timepoint (hr) Value: 4
  misc_feature: MA Experiment 20000709 PARAMETER Experiment Name: At_15mM_NH4NO3_L-to-H_P Parameter: Tissue Value: Aerial
  misc_feature: MA Experiment 20000709 PARAMETER Experiment Name: At_15mM_NH4NO3_L-to-H_P Parameter: Treatment Value: 15mM NH4NO3 vs. 30mM Mannitol
  misc_feature: MA Experiment ID: 20000794 Result: Down-regulated in Transcription
  misc_feature: MA Experiment 20000794 PARAMETER Experiment Name: At_Petals_P Parameter: Age (day) Value: 23-25 days
  misc_feature: MA Experiment 20000794 PARAMETER Experiment Name: At_Petals_P Parameter: Plant Line Value: WS
  misc_feature: MA Experiment 20000794 PARAMETER Experiment Name: At_Petals_P Parameter: Tissue Value: Petals vs. Whole plant
  misc_feature: MA Experiment ID: 20001761 Result: Up-regulated in Transcription
  misc_feature: MA Experiment 20001761 PARAMETER Experiment Name: At_50mM_NH4NO3_L-to-H_P Parameter: Timepoint (hr) Value: 4
  misc_feature: MA Experiment 20001761 PARAMETER Experiment Name: At_50mM_NH4NO3_L-to-H_P Parameter: Tissue Value: Siliques
  misc_feature: MA Experiment 20001761 PARAMETER Experiment Name: At_50mM_NH4NO3_L-to-H_P Parameter: Treatment Value: 50mM NH4NO3 vs 100mM Mannitol
  misc_feature: MA Experiment ID: 20001773 Result: Up-regulated in Transcription
  misc_feature: MA Experiment 20001773 PARAMETER Experiment Name: At_Far-red-enriched-adult_P Parameter: Age (day) Value: 30
  misc_feature: MA Experiment 20001773 PARAMETER Experiment Name: At_Far-red-enriched-adult_P Parameter: Light Value: Far-red enriched vs. White
  misc_feature: MA Experiment 20001773 PARAMETER Experiment Name: At_Far-red-enriched-adult_P Parameter: Organism Value: A. thaliana
  misc_feature: MA Experiment 20001773 PARAMETER Experiment Name: At_Far-red-enriched-adult_P Parameter: Plant Line Value: Columbia
  misc_feature: MA Experiment 20001773 PARAMETER Experiment Name: At_Far-red-enriched-adult_P Parameter: Timepoint (hr) Value: 48
  misc_feature: MA Experiment 20001773 PARAMETER Experiment Name: At_Far-red-enriched-adult_P Parameter: Tissue Value: Aerial
  misc_feature: MA Experiment ID: 20001910 Result: Down-regulated in Transcription
  misc_feature: MA Experiment 20001910 PARAMETER Experiment Name: At_Drought_Reproduction_P Parameter: Age (day) Value: 37
  misc_feature: MA Experiment 20001910 PARAMETER Experiment Name: At_Drought_Reproduction_P Parameter: Organism Value: A. thaliana
  misc_feature: MA Experiment 20001910 PARAMETER Experiment Name: At_Drought_Reproduction_P Parameter: Plant Line Value: WS
  misc_feature: MA Experiment 20001910 PARAMETER Experiment Name: At_Drought_Reproduction_P Parameter: Timepoint (day) Value: 7
  misc_feature: MA Experiment 20001910 PARAMETER Experiment Name: At_Drought_Reproduction_P Parameter: Tissue Value: Flowers
  misc_feature: MA Experiment 20001910 PARAMETER Experiment Name: At_Drought_Reproduction_P Parameter: Treatment Value: Drought vs. No Drought
  misc_feature: MA Experiment ID: 20001911 Result: Down-regulated in Transcription
  misc_feature: MA Experiment 20001911 PARAMETER Experiment Name: At_Drought_Reproduction_P Parameter: Age (day) Value: 40
  misc_feature: MA Experiment 20001911 PARAMETER Experiment Name: At_Drought_Reproduction_P Parameter: Organism Value: A. thaliana
  misc_feature: MA Experiment 20001911 PARAMETER Experiment Name: At_Drought_Reproduction_P Parameter: Plant Line Value: WS
  misc_feature: MA Experiment 20001911 PARAMETER Experiment Name: At_Drought_Reproduction_P Parameter: Timepoint (day) Value: 10
  misc_feature: MA Experiment 20001911 PARAMETER Experiment Name: At_Drought_Reproduction_P Parameter: Tissue Value: Flowers
  misc_feature: MA Experiment 20001911 PARAMETER Experiment Name: At_Drought_Reproduction_P Parameter: Treatment Value: Drought vs. No Drought

SEQ ID NO: 32322 - protein, 159 aa, Arabidopsis thaliana; identical to SEQ ID NO: 28732
  peptide (1)..(159): Ceres Seq. ID no. 12370090
  misc_feature (37)..(155): Pfam Name: Oleosin Pfam Description: Oleosin
  misc_feature (36)..(139): Homolog of NCBI NO: 7488469 NR Description: oleosin-like protein - rape
  misc_feature (41)..(145): Homolog of NCBI NO: 15240815 NR Description: glycine-rich protein GRP19
  misc_feature (19)..(159): Homolog of NCBI NO: 123952 NR Description: MICROSPORE-SPECIFIC PROTEIN I3
  misc_feature (26)..(159): Homolog of NCBI NO: 7488519 NR Description: anther-specific protein BNA237 - turnip
  misc_feature (19)..(159): Homolog of NCBI NO: 1076452 NR Description: oleosin - rape
  misc_feature (34)..(159): Homolog of NCBI NO: 1076453 NR Description: oleosin - rape
  misc_feature (11)..(159): Homolog of NCBI NO: 15081220 NR Description: glycine-rich protein GRP20 [Arabidopsis thaliana]
  misc_feature (11)..(159): Homolog of NCBI NO: 15081213 NR Description: glycine-rich protein GRP20 [Arabidopsis thaliana]
  misc_feature (11)..(159): Homolog of NCBI NO: 15240816 NR Description: glycine-rich protein GRP20; protein id:
  misc_feature (11)..(159): Homolog of NCBI NO: 15081227 NR Description: glycine-rich protein GRP20 [Arabidopsis thaliana]

SEQ ID NO: 32323 - protein, 149 aa, Arabidopsis thaliana; identical to SEQ ID NO: 28733
  peptide (1)..(149): Ceres Seq. ID no. 12370091
  misc_feature (27)..(145): Pfam Name: Oleosin Pfam Description: Oleosin
  misc_feature (26)..(129): Homolog of NCBI NO: 7488469 NR Description: oleosin-like protein - rape
  misc_feature (31)..(135): Homolog of NCBI NO: 15240815 NR Description: glycine-rich protein GRP19
  misc_feature (9)..(149): Homolog of NCBI NO: 123952 NR Description: MICROSPORE-SPECIFIC PROTEIN I3
  misc_feature (16)..(149): Homolog of NCBI NO: 7488519 NR Description: anther-specific protein BNA237 - turnip
  misc_feature (9)..(149): Homolog of NCBI NO: 1076452 NR Description: oleosin - rape
  misc_feature (24)..(149): Homolog of NCBI NO: 1076453 NR Description: oleosin - rape
  misc_feature (1)..(149): Homolog of NCBI NO: 15081220 NR Description: glycine-rich protein GRP20 [Arabidopsis thaliana]
  misc_feature (1)..(149): Homolog of NCBI NO: 15081213 NR Description: glycine-rich protein GRP20 [Arabidopsis thaliana]
  misc_feature (1)..(149): Homolog of NCBI NO: 15240816 NR Description: glycine-rich protein GRP20; protein id:
  misc_feature (1)..(149): Homolog of NCBI NO: 15081227 NR Description: glycine-rich protein GRP20 [Arabidopsis thaliana]

SEQ ID NO: 32324 - protein, 118 aa, Arabidopsis thaliana; identical to SEQ ID NO: 28734
  peptide (1)..(118): Ceres Seq. ID no. 12370092
  misc_feature (1)..(114): Pfam Name: Oleosin Pfam Description: Oleosin
  misc_feature (1)..(98): Homolog of NCBI NO: 7488469 NR Description: oleosin-like protein - rape
  misc_feature (1)..(104): Homolog of NCBI NO: 15240815 NR Description: glycine-rich protein GRP19
  misc_feature (1)..(118): Homolog of NCBI NO: 123952 NR Description: MICROSPORE-SPECIFIC PROTEIN I3
  misc_feature (1)..(118): Homolog of NCBI NO: 7488519 NR Description: anther-specific protein BNA237 - turnip
  misc_feature (1)..(118): Homolog of NCBI NO: 1076452 NR Description: oleosin - rape
  misc_feature (1)..(118): Homolog of NCBI NO: 1076453 NR Description: oleosin - rape
  misc_feature (1)..(118): Homolog of NCBI NO: 15081220 NR Description: glycine-rich protein GRP20 [Arabidopsis thaliana]
  misc_feature (1)..(118): Homolog of NCBI NO: 15081213 NR Description: glycine-rich protein GRP20 [Arabidopsis thaliana]
  misc_feature (1)..(118): Homolog of NCBI NO: 15240816 NR Description: glycine-rich protein GRP20; protein id:
  misc_feature (1)..(118): Homolog of NCBI NO: 15081227 NR Description: glycine-rich protein GRP20 [Arabidopsis thaliana]

SEQ ID NO: 32325 - DNA, 940 bp, Arabidopsis thaliana; identical to SEQ ID NO: 28735
  misc_feature (1)..(940): Ceres Seq. ID no. 12327087
  misc_feature: MA Experiment ID: 108577 Result: Up-regulated in Transcription
  misc_feature: MA Experiment 108577 PARAMETER Experiment Name: At_42deg_Heat_cDNA_P Parameter: Temperature (deg C) Value: 42 vs. 22
  misc_feature: MA Experiment 108577 PARAMETER Experiment Name: At_42deg_Heat_cDNA_P Parameter: Timepoint (hr) Value: 6
  misc_feature: MA Experiment 108577 PARAMETER Experiment Name: At_42deg_Heat_cDNA_P Parameter: Tissue Value: Aerial
  misc_feature: MA Experiment ID: 108595 Result: Down-regulated in Transcription
  misc_feature: MA Experiment 108595 PARAMETER Experiment Name: At_Ler-pi_Ovule_cDNA_P Parameter: Plant Line Value: null
  misc_feature: MA Experiment ID: 20000185 Result: Down-regulated in Transcription
  misc_feature: MA Experiment 20000185 PARAMETER Experiment Name: At_Roots__P Parameter: Age (day) Value: 7 vs. 21
  misc_feature: MA Experiment 20000185 PARAMETER Experiment Name: At_Roots__P Parameter: Organism Value: A. thaliana
  misc_feature: MA Experiment 20000185 PARAMETER Experiment Name: At_Roots__P Parameter: Tissue Value: Roots vs. Whole Plant
  misc_feature: MA Experiment ID: 20000438 Result: Up-regulated in Transcription
  misc_feature: MA Experiment 20000438 PARAMETER Experiment Name: At_Shoots__P Parameter: Age (day) Value: 14
  misc_feature: MA Experiment 20000438 PARAMETER Experiment Name: At_Shoots__P Parameter: Tissue Value: Shoots vs. Whole Plant
  misc_feature: MA Experiment ID: 20001247 Result: Up-regulated in Transcription
  misc_feature: MA Experiment 20001247 PARAMETER Experiment Name: At_Far-red-induction_P Parameter: Age (day) Value: 7
  misc_feature: MA Experiment 20001247 PARAMETER Experiment Name: At_Far-red-induction_P Parameter: Light Value: Far-red vs. White
  misc_feature: MA Experiment 20001247 PARAMETER Experiment Name: At_Far-red-induction_P Parameter: Organism Value: A. thaliana
  misc_feature: MA Experiment 20001247 PARAMETER Experiment Name: At_Far-red-induction_P Parameter: Plant Line Value: Columbia
  misc_feature: MA Experiment 20001247 PARAMETER Experiment Name: At_Far-red-induction_P Parameter: Timepoint (hr) Value: 1
  misc_feature: MA Experiment 20001247 PARAMETER Experiment Name: At_Far-red-induction_P Parameter: Tissue Value: Whole Plant
  misc_feature: MA Experiment ID: 20001248 Result: Down-regulated in Transcription
  misc_feature: MA Experiment 20001248 PARAMETER Experiment Name: At_Far-red-induction_P Parameter: Age (day) Value: 7
  misc_feature: MA Experiment 20001248 PARAMETER Experiment Name: At_Far-red-induction_P Parameter: Light Value: Far-red vs. White
  misc_feature: MA Experiment 20001248 PARAMETER Experiment Name: At_Far-red-induction_P Parameter: Organism Value: A. thaliana
  misc_feature: MA Experiment 20001248 PARAMETER Experiment Name: At_Far-red-induction_P Parameter: Plant Line Value: Columbia
  misc_feature: MA Experiment 20001248 PARAMETER Experiment Name: At_Far-red-induction_P Parameter: Timepoint (hr) Value: 4
  misc_feature: MA Experiment 20001248 PARAMETER Experiment Name: At_Far-red-induction_P Parameter: Tissue Value: Whole Plant
  misc_feature: MA Experiment ID: 20001557 Result: Down-regulated in Transcription
  misc_feature: MA Experiment 20001557 PARAMETER Experiment Name: At_Drought_Soil_Dry_P Parameter: Age (day) Value: 27
  misc_feature: MA Experiment 20001557 PARAMETER Experiment Name: At_Drought_Soil_Dry_P Parameter: Organism Value: A. thaliana
  misc_feature: MA Experiment 20001557 PARAMETER Experiment Name: At_Drought_Soil_Dry_P Parameter: Plant Line Value: WS
  misc_feature: MA Experiment 20001557 PARAMETER Experiment Name: At_Drought_Soil_Dry_P Parameter: Post Timepoint (hr) Value: 3
  misc_feature: MA Experiment 20001557 PARAMETER Experiment Name: At_Drought_Soil_Dry_P Parameter: Post-Treatment Value: Re-Water vs. No Drought
  misc_feature: MA Experiment 20001557 PARAMETER Experiment Name: At_Drought_Soil_Dry_P Parameter: Timepoint (day) Value: 13
  misc_feature: MA Experiment 20001557 PARAMETER Experiment Name: At_Drought_Soil_Dry_P Parameter: Treatment Value: Drought vs. No Drought
  misc_feature: MA Experiment ID: 20001560 Result: Down-regulated in Transcription
  misc_feature: MA Experiment 20001560 PARAMETER Experiment Name: At_Drought_Soil_Dry_P Parameter: Age (day) Value: 28
  misc_feature: MA Experiment 20001560 PARAMETER Experiment Name: At_Drought_Soil_Dry_P Parameter: Organism Value: A. thaliana
  misc_feature: MA Experiment 20001560 PARAMETER Experiment Name: At_Drought_Soil_Dry_P Parameter: Plant Line Value: WS
  misc_feature: MA Experiment 20001560 PARAMETER Experiment Name: At_Drought_Soil_Dry_P Parameter: Post Timepoint (hr) Value: None
  misc_feature: MA Experiment 20001560 PARAMETER Experiment Name: At_Drought_Soil_Dry_P Parameter: Post-Treatment Value: None
  misc_feature: MA Experiment 20001560 PARAMETER Experiment Name: At_Drought_Soil_Dry_P Parameter: Timepoint (day) Value: 14
  misc_feature: MA Experiment 20001560 PARAMETER Experiment Name: At_Drought_Soil_Dry_P Parameter: Treatment Value: Drought vs. No Drought
  misc_feature: MA Experiment ID: 20001905 Result: Down-regulated in Transcription
  misc_feature: MA Experiment 20001905 PARAMETER Experiment Name: At_Drought_Reproduction_P Parameter: Age (day) Value: 40
  misc_feature: MA Experiment 20001905 PARAMETER Experiment Name: At_Drought_Reproduction_P Parameter: Organism Value: A. thaliana
  misc_feature: MA Experiment 20001905 PARAMETER Experiment Name: At_Drought_Reproduction_P Parameter: Plant Line Value: WS
  misc_feature: MA Experiment 20001905 PARAMETER Experiment Name: At_Drought_Reproduction_P Parameter: Timepoint (day) Value: 10
  misc_feature: MA Experiment 20001905 PARAMETER Experiment Name: At_Drought_Reproduction_P Parameter: Tissue Value: Rosettes
  misc_feature: MA Experiment 20001905 PARAMETER Experiment Name: At_Drought_Reproduction_P Parameter: Treatment Value: Drought vs. No Drought
  misc_feature: MA Experiment ID: 20001911 Result: Up-regulated in Transcription
  misc_feature: MA Experiment 20001911 PARAMETER Experiment Name: At_Drought_Reproduction_P Parameter: Age (day) Value: 40
  misc_feature: MA Experiment 20001911 PARAMETER Experiment Name: At_Drought_Reproduction_P Parameter: Organism Value: A. thaliana
  misc_feature: MA Experiment 20001911 PARAMETER Experiment Name: At_Drought_Reproduction_P Parameter: Plant Line Value: WS
  misc_feature: MA Experiment 20001911 PARAMETER Experiment Name: At_Drought_Reproduction_P Parameter: Timepoint (day) Value: 10
  misc_feature: MA Experiment 20001911 PARAMETER Experiment Name: At_Drought_Reproduction_P Parameter: Tissue Value: Flowers
  misc_feature: MA Experiment 20001911 PARAMETER Experiment Name: At_Drought_Reproduction_P Parameter: Treatment Value: Drought vs. No Drought

SEQ ID NO: 32326 - protein, 244 aa, Arabidopsis thaliana; identical to SEQ ID NO: 28736
  peptide (1)..(244): Ceres Seq. ID no. 12327088
  misc_feature (9)..(239): Pfam Name: Alanine racemase, N-terminal domain Pfam Description: Alanine racemase, N-terminal domain
  misc_feature (9)..(239): Pfam Name: Alanine racemase, N-terminal domain Pfam Description: Alanine racemase, N-terminal domain
  misc_feature (96)..(220): Homolog of NCBI NO: 19386824 NR Description: B1147A04.19 [Oryza sativa (japonica
  misc_feature (7)..(242): Homolog of NCBI NO: 16930823 NR Description: proline synthetase co-transcribed [Mus musculus]
  misc_feature (1)..(244): Homolog of NCBI NO: 6005842 NR Description: proline synthetase co-transcribed homolog
  misc_feature (25)..(242): Homolog of NCBI NO: 11359716 NR Description: conserved hypothetical protein [imported] -
  misc_feature (1)..(242): Homolog of NCBI NO: 18391333 NR Description: putative Proline synthetase associated protein
  misc_feature (96)..(220): Homolog of NCBI NO: 19386824 NR Description: B1147A04.19 [Oryza sativa (japonica
  misc_feature (1)..(244): Homolog of NCBI NO: 6005842 NR Description: proline synthetase co-transcribed homolog
  misc_feature (1)..(242): Homolog of NCBI NO: 18391333 NR Description: putative Proline synthetase associated protein
  misc_feature (1)..(244): Homolog of NCBI NO: 14030629 NR Description: AT4g26860/F10M23_200 [Arabidopsis thaliana]
  misc_feature (1)..(244): Homolog of NCBI NO: 18416879 NR Description: putative Proline synthetase associated protein
  misc_feature (1)..(186): Homolog of NCBI NO: 7445224 NR Description: hypothetical protein F10M23.200 - Arabidopsis
  misc_feature (192)..(244): Homolog of NCBI NO: 7445224 NR Description: hypothetical protein F10M23.200 - Arabidopsis
  misc_feature (1)..(242): Homolog of NCBI NO: 30682530 NR Description: Proline synthetase associated protein -related
  misc_feature (25)..(242): Homolog of NCBI NO: 11359716 NR Description: conserved hypothetical protein [imported] -
  misc_feature (7)..(242): Homolog of NCBI NO: 16930823 NR Description: proline synthetase co-transcribed [Mus musculus]
  misc_feature (1)..(242): Homolog of NCBI NO: 30682530 NR Description: Proline synthetase associated protein -related
  misc_feature (192)..(244): Homolog of NCBI NO: 7445224 NR Description: hypothetical protein F10M23.200 - Arabidopsis
  misc_feature (1)..(186): Homolog of NCBI NO: 7445224 NR Description: hypothetical protein F10M23.200 - Arabidopsis
  misc_feature (1)..(244): Homolog of NCBI NO: 18416879 NR Description: putative Proline synthetase associated protein
  misc_feature (1)..(244): Homolog of NCBI NO: 14030629 NR Description: AT4g26860/F10M23_200 [Arabidopsis thaliana]

SEQ ID NO: 32327 - protein, 141 aa, Arabidopsis thaliana; identical to SEQ ID NO: 28737
  peptide (1)..(141): Ceres Seq. ID no. 12327089
  misc_feature (1)..(136): Pfam Name: Alanine racemase, N-terminal domain Pfam Description: Alanine racemase, N-terminal domain
  misc_feature (1)..(136): Pfam Name: Alanine racemase, N-terminal domain Pfam Description: Alanine racemase, N-terminal domain
  misc_feature (1)..(117): Homolog of NCBI NO: 19386824 NR Description: B1147A04.19 [Oryza sativa (japonica
  misc_feature (1)..(139): Homolog of NCBI NO: 16930823 NR Description: proline synthetase co-transcribed [Mus musculus]
  misc_feature (1)..(141): Homolog of NCBI NO: 6005842 NR Description: proline synthetase co-transcribed homolog
  misc_feature (1)..(139): Homolog of NCBI NO: 11359716 NR Description: conserved hypothetical protein [imported] -
  misc_feature (1)..(139): Homolog of NCBI NO: 18391333 NR Description: putative Proline synthetase associated protein
  misc_feature (1)..(117): Homolog of NCBI NO: 19386824 NR Description: B1147A04.19 [Oryza sativa (japonica
  misc_feature (1)..(141): Homolog of NCBI NO: 6005842 NR Description: proline synthetase co-transcribed homolog
  misc_feature (1)..(139): Homolog of NCBI NO: 18391333 NR Description: putative Proline synthetase associated protein
  misc_feature (1)..(141): Homolog of NCBI NO: 14030629 NR Description: AT4g26860/F10M23_200 [Arabidopsis thaliana]
  misc_feature (1)..(141): Homolog of NCBI NO: 18416879 NR Description: putative Proline synthetase associated protein
  misc_feature (1)..(83): Homolog of NCBI NO: 7445224 NR Description: hypothetical protein F10M23.200 - Arabidopsis
  misc_feature (89)..(141): Homolog of NCBI NO: 7445224 NR Description: hypothetical protein F10M23.200 - Arabidopsis
  misc_feature (1)..(139): Homolog of NCBI NO: 30682530 NR Description: Proline synthetase associated protein -related
  misc_feature (1)..(139): Homolog of NCBI NO: 11359716 NR Description: conserved hypothetical protein [imported] -
  misc_feature (1)..(139): Homolog of NCBI NO: 16930823 NR Description: proline synthetase co-transcribed [Mus musculus]
  misc_feature (1)..(139): Homolog of NCBI NO: 30682530 NR Description: Proline synthetase associated protein -related
  misc_feature (89)..(141): Homolog of NCBI NO: 7445224 NR Description: hypothetical protein F10M23.200 - Arabidopsis
  misc_feature (1)..(83): Homolog of NCBI NO: 7445224 NR Description: hypothetical protein F10M23.200 - Arabidopsis
  misc_feature (1)..(141): Homolog of NCBI NO: 18416879 NR Description: putative Proline synthetase associated protein
  misc_feature (1)..(141): Homolog of NCBI NO: 14030629 NR Description: AT4g26860/F10M23_200 [Arabidopsis thaliana]

SEQ ID NO: 32328 - DNA, 840 bp, Arabidopsis thaliana; identical to SEQ ID NO: 28738
  misc_feature (1)..(840): Ceres Seq. ID no. 12332656
  misc_feature: MA Experiment ID: 108462 Result: Up-regulated in Transcription
  misc_feature: MA Experiment 108462 PARAMETER Experiment Name: At_Germinating_Seeds_cDNA_P Parameter: Age (day) Value: 2 vs. 0
  misc_feature: MA Experiment 108462 PARAMETER Experiment Name: At_Germinating_Seeds_cDNA_P Parameter: Tissue Value: Germinating Seeds
  misc_feature: MA Experiment ID: 108464 Result: Up-regulated in Transcription
  misc_feature: MA Experiment 108464 PARAMETER Experiment Name: At_Germinating_Seeds_cDNA_P Parameter: Age (day) Value: 4 vs. 0
  misc_feature: MA Experiment 108464 PARAMETER Experiment Name: At_Germinating_Seeds_cDNA_P Parameter: Tissue Value: Germinating Seeds
  misc_feature: MA Experiment ID: 108488 Result: Down-regulated in Transcription
  misc_feature: MA Experiment ID: 20000113 Result: Down-regulated in Transcription
  misc_feature: MA Experiment 20000113 PARAMETER Experiment Name: At_42deg_Heat_cDNA_P Parameter: Temperature (deg C) Value: 42 vs. 22
  misc_feature: MA Experiment 20000113 PARAMETER Experiment Name: At_42deg_Heat_cDNA_P Parameter: Timepoint (hr) Value: 8
  misc_feature: MA Experiment 20000113 PARAMETER Experiment Name: At_42deg_Heat_cDNA_P Parameter: Tissue Value: Aerial
  misc_feature: MA Experiment ID: 20001904 Result: Up-regulated in Transcription
  misc_feature: MA Experiment 20001904 PARAMETER Experiment Name: At_Drought_Reproduction_P Parameter: Age (day) Value: 37
  misc_feature: MA Experiment 20001904 PARAMETER Experiment Name: At_Drought_Reproduction_P Parameter: Organism Value: A. thaliana
  misc_feature: MA Experiment 20001904 PARAMETER Experiment Name: At_Drought_Reproduction_P Parameter: Plant Line Value: WS
  misc_feature: MA Experiment 20001904 PARAMETER Experiment Name: At_Drought_Reproduction_P Parameter: Timepoint (day) Value: 7
  misc_feature: MA Experiment 20001904 PARAMETER Experiment Name: At_Drought_Reproduction_P Parameter: Tissue Value: Rosettes
  misc_feature: MA Experiment 20001904 PARAMETER Experiment Name: At_Drought_Reproduction_P Parameter: Treatment Value: Drought vs. No Drought
  misc_feature: MA Experiment ID: 20001905 Result: Up-regulated in Transcription
  misc_feature: MA Experiment 20001905 PARAMETER Experiment Name: At_Drought_Reproduction_P Parameter: Age (day) Value: 40
  misc_feature: MA Experiment 20001905 PARAMETER Experiment Name: At_Drought_Reproduction_P Parameter: Organism Value: A. thaliana
  misc_feature: MA Experiment 20001905 PARAMETER Experiment Name: At_Drought_Reproduction_P Parameter: Plant Line Value: WS
  misc_feature: MA Experiment 20001905 PARAMETER Experiment Name: At_Drought_Reproduction_P Parameter: Timepoint (day) Value: 10
  misc_feature: MA Experiment 20001905 PARAMETER Experiment Name: At_Drought_Reproduction_P Parameter: Tissue Value: Rosettes
  misc_feature: MA Experiment 20001905 PARAMETER Experiment Name: At_Drought_Reproduction_P Parameter: Treatment Value: Drought vs. No Drought
  misc_feature: MA Experiment ID: 20001906 Result: Down-regulated in Transcription
  misc_feature: MA Experiment 20001906 PARAMETER Experiment Name: At_Drought_Reproduction_P Parameter: Age (day) Value: 35
  misc_feature: MA Experiment 20001906 PARAMETER Experiment Name: At_Drought_Reproduction_P Parameter: Organism Value: A. thaliana
  misc_feature: MA Experiment 20001906 PARAMETER Experiment Name: At_Drought_Reproduction_P Parameter: Plant Line Value: WS
  misc_feature: MA Experiment 20001906 PARAMETER Experiment Name: At_Drought_Reproduction_P Parameter: Timepoint (day) Value: 5
  misc_feature: MA Experiment 20001906 PARAMETER Experiment Name: At_Drought_Reproduction_P Parameter: Tissue Value: Siliques
  misc_feature: MA Experiment 20001906 PARAMETER Experiment Name: At_Drought_Reproduction_P Parameter: Treatment Value: Drought vs. No Drought
  misc_feature: MA Experiment ID: 20001911 Result: Down-regulated in Transcription
  misc_feature: MA Experiment 20001911 PARAMETER Experiment Name: At_Drought_Reproduction_P Parameter: Age (day) Value: 40
  misc_feature: MA Experiment 20001911 PARAMETER Experiment Name: At_Drought_Reproduction_P Parameter: Organism Value: A. thaliana
  misc_feature: MA Experiment 20001911 PARAMETER Experiment Name: At_Drought_Reproduction_P Parameter: Plant Line Value: WS
  misc_feature: MA Experiment 20001911 PARAMETER Experiment Name: At_Drought_Reproduction_P Parameter: Timepoint (day) Value: 10
  misc_feature: MA Experiment 20001911 PARAMETER Experiment Name: At_Drought_Reproduction_P Parameter: Tissue Value: Flowers
  misc_feature: MA Experiment 20001911 PARAMETER Experiment Name: At_Drought_Reproduction_P Parameter: Treatment Value: Drought vs. No Drought

SEQ ID NO: 32329 - protein, 139 aa, Arabidopsis thaliana; identical to SEQ ID NO: 28739
  peptide (1)..(139): Ceres Seq. ID no. 12332657
  misc_feature (12)..(139): Pfam Name: Cofilin/tropomyosin-type actin-binding protein Pfam Description: Cofilin/tropomyosin-type actin-binding protein
  misc_feature (8)..(139): Homolog of NCBI NO: 11276987 NR Description: actin depolymerizing factor 2 - Arabidopsis
  misc_feature (1)..(139): Homolog of NCBI NO: 38564721 NR Description: putative actin-depolymerizing factor 2
  misc_feature (1)..(139): Homolog of NCBI NO: 18408116 NR Description: actin depolymerizing factor 2 (ADF2)
  misc_feature (1)..(139): Homolog of NCBI NO: 30697295 NR Description: actin depolymerizing factor 3 - like protein
  misc_feature (1)..(137): Homolog of NCBI NO: 17366765 NR Description: Actin-depolymerizing factor 2 (ADF 2)
  misc_feature (1)..(139): Homolog of NCBI NO: 17366768 NR Description: Actin-depolymerizing factor 1 (ADF 1)
  misc_feature (8)..(139): Homolog of NCBI NO: 30697303 NR Description: actin depolymerizing factor 4 - like protein
  misc_feature (1)..(139): Homolog of NCBI NO: 15231309 NR Description: actin depolymerizing factor 1 (ADF1)
  misc_feature (1)..(139): Homolog of NCBI NO: 4185511 NR Description: actin depolymerizing factor 4 [Arabidopsis
  misc_feature (1)..(139): Homolog of NCBI NO: 30697300 NR Description: actin depolymerizing factor 4 - like protein

SEQ ID NO: 32330 - protein, 132 aa, Arabidopsis thaliana; identical to SEQ ID NO: 28740
  peptide (1)..(132): Ceres Seq. ID no. 12332658
  misc_feature (5)..(132): Pfam Name: Cofilin/tropomyosin-type actin-binding protein Pfam Description: Cofilin/tropomyosin-type actin-binding protein
  misc_feature (1)..(132): Homolog of NCBI NO: 11276987 NR Description: actin depolymerizing factor 2 - Arabidopsis
  misc_feature (1)..(132): Homolog of NCBI NO: 38564721 NR Description: putative actin-depolymerizing factor 2
  misc_feature (1)..(132): Homolog of NCBI NO: 18408116 NR Description: actin depolymerizing factor 2 (ADF2)
  misc_feature (1)..(132): Homolog of NCBI NO: 30697295 NR Description: actin depolymerizing factor 3 - like protein
  misc_feature (1)..(130): Homolog of NCBI NO: 17366765 NR Description: Actin-depolymerizing factor 2 (ADF 2)
  misc_feature (1)..(132): Homolog of NCBI NO: 17366768 NR Description: Actin-depolymerizing factor 1 (ADF 1)
  misc_feature (1)..(132): Homolog of NCBI NO: 30697303 NR Description: actin depolymerizing factor 4 - like protein
  misc_feature (1)..(132): Homolog of NCBI NO: 15231309 NR Description: actin depolymerizing factor 1 (ADF1)
  misc_feature (1)..(132): Homolog of NCBI NO: 4185511 NR Description: actin depolymerizing factor 4 [Arabidopsis
  misc_feature (1)..(132): Homolog of NCBI NO: 30697300 NR Description: actin depolymerizing factor 4 - like protein

SEQ ID NO: 32331 - DNA, 586 bp, Arabidopsis thaliana; identical to SEQ ID NO: 28741
  misc_feature (1)..(586): Ceres Seq. ID no. 12332652
  misc_feature: MA Experiment ID: 108434 Result: Down-regulated in Transcription
  misc_feature: MA Experiment 108434 PARAMETER Experiment Name: At_Root_Tips_cDNA_P Parameter: Tissue Value: Root Tips
  misc_feature: MA Experiment ID: 108609 Result: Up-regulated in Transcription
  misc_feature: MA Experiment 108609 PARAMETER Experiment Name: At_100uM_ABA_cDNA_P Parameter: Timepoint (hr) Value: 24
  misc_feature: MA Experiment 108609 PARAMETER Experiment Name: At_100uM_ABA_cDNA_P Parameter: Tissue Value: Aerial
  misc_feature: MA Experiment 108609 PARAMETER Experiment Name: At_100uM_ABA_cDNA_P Parameter: Treatment Value: 100uM ABA vs. No Treatment
  misc_feature: MA Experiment ID: 20000227 Result: Down-regulated in Transcription
  misc_feature: MA Experiment 20000227 PARAMETER Experiment Name: At_Root-Tips-vs-Tops_P Parameter: Tissue Value: Root Tips vs. Root Tops
  misc_feature: MA Experiment ID: 20000234 Result: Down-regulated in Transcription
  misc_feature: MA Experiment 20000234 PARAMETER Experiment Name: At_Siliques_P Parameter: Age (day) Value: 21
  misc_feature: MA Experiment 20000234 PARAMETER Experiment Name: At_Siliques_P Parameter: Organism Value: A. thaliana
  misc_feature: MA Experiment 20000234 PARAMETER Experiment Name: At_Siliques_P Parameter: Plant Line Value: WS
  misc_feature: MA Experiment 20000234 PARAMETER Experiment Name: At_Siliques_P Parameter: Tissue Value: Less Than 5mm Siliques vs. Whole Plant
  misc_feature: MA Experiment ID: 20000264 Result: Down-regulated in Transcription
  misc_feature: MA Experiment 20000264 PARAMETER Experiment Name: At_Open_Flower_P Parameter: Age (day) Value: 21
  misc_feature: MA Experiment 20000264 PARAMETER Experiment Name: At_Open_Flower_P Parameter: Plant Line Value: WS
  misc_feature: MA Experiment 20000264 PARAMETER Experiment Name: At_Open_Flower_P Parameter: Tissue Value: Open Flower vs. Whole Plant
  misc_feature: MA Experiment ID: 20000265 Result: Down-regulated in Transcription
  misc_feature: MA Experiment 20000265 PARAMETER Experiment Name: At_Open_Flower_P Parameter: Age (day) Value: 21
  misc_feature: MA Experiment 20000265 PARAMETER Experiment Name: At_Open_Flower_P Parameter: Plant Line Value: WS
  misc_feature: MA Experiment 20000265 PARAMETER Experiment Name: At_Open_Flower_P Parameter: Tissue Value: Closed Flower vs. Whole Plant
  misc_feature: MA Experiment ID: 20000286 Result: Down-regulated in Transcription
  misc_feature: MA Experiment 20000286 PARAMETER Experiment Name: At_Open_Flower_P Parameter: Age (day) Value: 21
  misc_feature: MA Experiment 20000286 PARAMETER Experiment Name: At_Open_Flower_P Parameter: Plant Line Value: WS
  misc_feature: MA Experiment 20000286 PARAMETER Experiment Name: At_Open_Flower_P Parameter: Tissue Value: Half Open vs. Whole Plant
  misc_feature: MA Experiment ID: 20000794 Result: Down-regulated in Transcription
  misc_feature: MA Experiment 20000794 PARAMETER Experiment Name: At_Petals_P Parameter: Age (day) Value: 23-25 days
  misc_feature: MA Experiment 20000794 PARAMETER Experiment Name: At_Petals_P Parameter: Plant Line Value: WS
  misc_feature: MA Experiment 20000794 PARAMETER Experiment Name: At_Petals_P Parameter: Tissue Value: Petals vs. Whole plant
  misc_feature: MA Experiment ID: 20001451 Result: Up-regulated in Transcription
  misc_feature: MA Experiment 20001451 PARAMETER Experiment Name: At_Far-red-induction_P Parameter: Age (day) Value: 7
  misc_feature: MA Experiment 20001451 PARAMETER Experiment Name: At_Far-red-induction_P Parameter: Light Value: Far-red vs. White
  misc_feature: MA Experiment 20001451 PARAMETER Experiment Name: At_Far-red-induction_P Parameter: Organism Value: A. thaliana
  misc_feature: MA Experiment 20001451 PARAMETER Experiment Name: At_Far-red-induction_P Parameter: Plant Line Value: Columbia
  misc_feature: MA Experiment 20001451 PARAMETER Experiment Name: At_Far-red-induction_P Parameter: Timepoint (hr) Value: 24
  misc_feature: MA Experiment 20001451 PARAMETER Experiment Name: At_Far-red-induction_P Parameter: Tissue Value: Whole Plant
  misc_feature: MA Experiment ID: 20001557 Result: Down-regulated in Transcription
  misc_feature: MA Experiment 20001557 PARAMETER Experiment Name: At_Drought_Soil_Dry_P Parameter: Age (day) Value: 27
  misc_feature: MA Experiment 20001557 PARAMETER Experiment Name: At_Drought_Soil_Dry_P Parameter: Organism Value: A. thaliana
  misc_feature: MA Experiment 20001557 PARAMETER Experiment Name: At_Drought_Soil_Dry_P Parameter: Plant Line Value: WS
  misc_feature: MA Experiment 20001557 PARAMETER Experiment Name: At_Drought_Soil_Dry_P Parameter: Post Timepoint (hr) Value: 3
  misc_feature: MA Experiment 20001557 PARAMETER Experiment Name: At_Drought_Soil_Dry_P Parameter: Post-Treatment Value: Re-Water vs. No Drought
  misc_feature: MA Experiment 20001557 PARAMETER Experiment Name: At_Drought_Soil_Dry_P Parameter: Timepoint (day) Value: 13
  misc_feature: MA Experiment 20001557 PARAMETER Experiment Name: At_Drought_Soil_Dry_P Parameter: Treatment Value: Drought vs. No Drought
  misc_feature: MA Experiment ID: 20001558 Result: Down-regulated in Transcription
  misc_feature: MA Experiment 20001558 PARAMETER Experiment Name: At_Drought_Soil_Dry_P Parameter: Age (day) Value: 27
  misc_feature: MA Experiment 20001558 PARAMETER Experiment Name: At_Drought_Soil_Dry_P Parameter: Organism Value: A. thaliana
  misc_feature: MA Experiment 20001558 PARAMETER Experiment Name: At_Drought_Soil_Dry_P Parameter: Plant Line Value: WS
  misc_feature: MA Experiment 20001558 PARAMETER Experiment Name: At_Drought_Soil_Dry_P Parameter: Post Timepoint (hr) Value: 6
  misc_feature: MA Experiment 20001558 PARAMETER Experiment Name: At_Drought_Soil_Dry_P Parameter: Post-Treatment Value: Re-Water vs. No Drought
  misc_feature: MA Experiment 20001558 PARAMETER Experiment Name: At_Drought_Soil_Dry_P Parameter: Timepoint (day) Value: 13
  misc_feature: MA Experiment 20001558 PARAMETER Experiment Name: At_Drought_Soil_Dry_P Parameter: Treatment Value: Drought vs. No Drought

SEQ ID NO: 32332 - protein, 131 aa, Arabidopsis thaliana; identical to SEQ ID NO: 28742
  peptide (1)..(131): Ceres Seq. ID no. 12332653
  misc_feature (24)..(125): Pfam Name: Rhodanese-like domain Pfam Description: Rhodanese-like domain
  misc_feature (67)..(131): Homolog of NCBI NO: 30698184 NR Description: senescence-associated protein [Arabidopsis
  misc_feature (6)..(128): Homolog of NCBI NO: 7340289 NR Description: OP1 [Cucumis sativus]
  misc_feature (16)..(130): Homolog of NCBI NO: 118636 NR Description: Senescence-associated protein DIN1
  misc_feature (13)..(130): Homolog of NCBI NO: 21537402 NR Description: senescence-associated protein sen1 [Arabidopsis
  misc_feature (13)..(130): Homolog of NCBI NO: 15233328 NR Description: senescence-associated protein sen1
  misc_feature (13)..(130): Homolog of NCBI NO: 1046268 NR Description: senescence-associated protein [Arabidopsis
  misc_feature (13)..(130): Homolog of NCBI NO: 7488606 NR Description: senescence-associated protein din1,
  misc_feature (16)..(129): Homolog of NCBI NO: 7594903 NR Description: Ntdin [Nicotiana tabacum]
  misc_feature (12)..(131): Homolog of NCBI NO: 30698182 NR Description: senescence-associated protein [Arabidopsis
  misc_feature (12)..(130): Homolog of NCBI NO: 2129628 NR Description: ketoconazole resistance protein - Arabidopsis

SEQ ID NO: 32333 - protein, 120 aa, Arabidopsis thaliana; identical to SEQ ID NO: 28743
  peptide (1)..(120): Ceres Seq. ID no. 12332654
  misc_feature (13)..(114): Pfam Name: Rhodanese-like domain Pfam Description: Rhodanese-like domain
  misc_feature (56)..(120): Homolog of NCBI NO: 30698184 NR Description: senescence-associated protein [Arabidopsis
  misc_feature (1)..(117): Homolog of NCBI NO: 7340289 NR Description: OP1 [Cucumis sativus]
  misc_feature (5)..(119): Homolog of NCBI NO: 118636 NR Description: Senescence-associated protein DIN1
  misc_feature (2)..(119): Homolog of NCBI NO: 21537402 NR Description: senescence-associated protein sen1 [Arabidopsis
  misc_feature (2)..(119): Homolog of NCBI NO: 15233328 NR Description: senescence-associated protein sen1
  misc_feature (2)..(119): Homolog of NCBI NO: 1046268 NR Description: senescence-associated protein [Arabidopsis
  misc_feature (2)..(119): Homolog of NCBI NO: 7488606 NR Description: senescence-associated protein din1,
  misc_feature (5)..(118): Homolog of NCBI NO: 7594903 NR Description: Ntdin [Nicotiana tabacum]
  misc_feature (1)..(120): Homolog of NCBI NO: 30698182 NR Description: senescence-associated protein [Arabidopsis
  misc_feature (1)..(119): Homolog of NCBI NO: 2129628 NR Description: ketoconazole resistance protein - Arabidopsis

SEQ ID NO: 32334 - protein, 72 aa, Arabidopsis thaliana; identical to SEQ ID NO: 28744
  peptide (1)..(72): Ceres Seq. ID no. 12332655
  misc_feature (1)..(66): Pfam Name: Rhodanese-like domain Pfam Description: Rhodanese-like domain
  misc_feature (8)..(72): Homolog of NCBI NO: 30698184 NR Description: senescence-associated protein [Arabidopsis
  misc_feature (1)..(69): Homolog of NCBI NO: 7340289 NR Description: OP1 [Cucumis sativus]
  misc_feature (1)..(71): Homolog of NCBI NO: 118636 NR Description: Senescence-associated protein DIN1
  misc_feature (1)..(71): Homolog of NCBI NO: 21537402 NR Description: senescence-associated protein sen1 [Arabidopsis
  misc_feature (1)..(71): Homolog of NCBI NO: 15233328 NR Description: senescence-associated protein sen1
  misc_feature (1)..(71): Homolog of NCBI NO: 1046268 NR Description: senescence-associated protein [Arabidopsis
  misc_feature (1)..(71): Homolog of NCBI NO: 7488606 NR Description: senescence-associated protein din1,
  misc_feature (1)..(70): Homolog of NCBI NO: 7594903 NR Description: Ntdin [Nicotiana tabacum]
  misc_feature (1)..(72): Homolog of NCBI NO: 30698182 NR Description: senescence-associated protein [Arabidopsis
  misc_feature (1)..(71): Homolog of NCBI NO: 2129628 NR Description: ketoconazole resistance protein - Arabidopsis

SEQ ID NO: 32335 - DNA, 589 bp, Arabidopsis thaliana; identical to SEQ ID NO: 28745
  misc_feature (1)..(589): Ceres Seq. ID no. 12384610
  misc_feature: MA Experiment ID: 108433 Result: Up-regulated in Transcription
  misc_feature: MA Experiment 108433 PARAMETER Experiment Name: At_rhl_Mutant2_cDNA_P Parameter: Age (day) Value: 7
  misc_feature: MA Experiment 108433 PARAMETER Experiment Name: At_rhl_Mutant2_cDNA_P Parameter: Organism Value: A. thaliana
  misc_feature: MA Experiment 108433 PARAMETER Experiment Name: At_rhl_Mutant2_cDNA_P Parameter: Plant Line Value: rhl Mutant vs. wt landsburg
  misc_feature: MA Experiment 108433 PARAMETER Experiment Name: At_rhl_Mutant2_cDNA_P Parameter: Tissue Value: Roots
  misc_feature: MA Experiment ID: 108434 Result: Down-regulated in Transcription
  misc_feature: MA Experiment 108434 PARAMETER Experiment Name: At_Root_Tips_cDNA_P Parameter: Tissue Value: Root Tips
  misc_feature: MA Experiment ID: 108435 Result: Down-regulated in Transcription
  misc_feature: MA Experiment 108435 PARAMETER Experiment Name: At_stm_Mutants_cDNA_P Parameter: Plant Line Value: wt Landsburg vs stm
  misc_feature: MA Experiment 108435 PARAMETER Experiment Name: At_stm_Mutants_cDNA_P Parameter: Tissue Value: Shoot Apical Meristem Region
  misc_feature: MA Experiment ID: 108462 Result: Up-regulated in Transcription
  misc_feature: MA Experiment 108462 PARAMETER Experiment Name: At_Germinating_Seeds_cDNA_P Parameter: Age (day) Value: 2 vs. 0
  misc_feature: MA Experiment 108462 PARAMETER Experiment Name: At_Germinating_Seeds_cDNA_P Parameter: Tissue Value: Germinating Seeds
  misc_feature: MA Experiment ID: 108464 Result: Up-regulated in Transcription
  misc_feature: MA Experiment 108464 PARAMETER Experiment Name: At_Germinating_Seeds_cDNA_P Parameter: Age (day) Value: 4 vs. 0
  misc_feature: MA Experiment 108464 PARAMETER Experiment Name: At_Germinating_Seeds_cDNA_P Parameter: Tissue Value: Germinating Seeds
  misc_feature: MA Experiment ID: 108488 Result: Down-regulated in Transcription
  misc_feature: MA Experiment ID: 108579 Result: Up-regulated in Transcription
  misc_feature: MA Experiment 108579 PARAMETER Experiment Name: At_4deg_Cold_cDNA_P Parameter: Temperature (deg C) Value: 4 vs. 22
  misc_feature: MA Experiment 108579 PARAMETER Experiment Name: At_4deg_Cold_cDNA_P Parameter: Timepoint (hr) Value: 6
  misc_feature: MA Experiment 108579 PARAMETER Experiment Name: At_4deg_Cold_cDNA_P Parameter: Tissue Value: Aerial
  misc_feature: MA Experiment ID: 108594 Result: Up-regulated in Transcription
  misc_feature: MA Experiment 108594 PARAMETER Experiment Name: At_Ler-rhl_Root_cDNA_P Parameter: Plant Line Value: null
  misc_feature: MA Experiment ID: 108595 Result: Down-regulated in Transcription
  misc_feature: MA Experiment 108595 PARAMETER Experiment Name: At_Ler-pi_Ovule_cDNA_P Parameter: Plant Line Value: null
  misc_feature: MA Experiment ID: 20000111 Result: Up-regulated in Transcription
  misc_feature: MA Experiment 20000111 PARAMETER Experiment Name: At_42deg_Heat_cDNA_P Parameter: Temperature (deg C) Value: 42 vs. 22
  misc_feature: MA Experiment 20000111 PARAMETER Experiment Name: At_42deg_Heat_cDNA_P Parameter: Timepoint (hr) Value: 6
  misc_feature: MA Experiment 20000111 PARAMETER Experiment Name: At_42deg_Heat_cDNA_P Parameter: Tissue Value: Aerial
  misc_feature: MA Experiment ID: 20000113 Result: Up-regulated in Transcription
  misc_feature: MA Experiment 20000113 PARAMETER Experiment Name: At_42deg_Heat_cDNA_P Parameter: Temperature (deg C) Value: 42 vs. 22
  misc_feature: MA Experiment 20000113 PARAMETER Experiment Name: At_42deg_Heat_cDNA_P Parameter: Timepoint (hr) Value: 8
  misc_feature: MA Experiment 20000113 PARAMETER Experiment Name: At_42deg_Heat_cDNA_P Parameter: Tissue Value: Aerial
  misc_feature: MA Experiment ID: 20000179 Result: Down-regulated in Transcription
  misc_feature: MA Experiment 20000179 PARAMETER Experiment Name: At_Germinating_Seeds_P Parameter: Age (hr) Value: 6 vs. 0
  misc_feature: MA Experiment 20000179 PARAMETER Experiment Name: At_Germinating_Seeds_P Parameter: Tissue Value: Germinating Seeds
  misc_feature: MA Experiment ID: 20000182 Result: Up-regulated in Transcription
  misc_feature: MA Experiment 20000182 PARAMETER Experiment Name: At_2mM_SA_P Parameter: Age (day) Value: 14
  misc_feature: MA Experiment 20000182 PARAMETER Experiment Name: At_2mM_SA_P Parameter: Organism Value: A. thaliana
  misc_feature: MA Experiment 20000182 PARAMETER Experiment Name: At_2mM_SA_P Parameter: Plant Line Value: WS
  misc_feature: MA Experiment 20000182 PARAMETER Experiment Name: At_2mM_SA_P Parameter: Timepoint (hr) Value: 6
  misc_feature: MA Experiment 20000182 PARAMETER Experiment Name: At_2mM_SA_P Parameter: Tissue Value: Aerial
  misc_feature: MA Experiment 20000182 PARAMETER Experiment Name: At_2mM_SA_P Parameter: Treatment Value: 2mM SA vs. No Treatment
  misc_feature: MA Experiment ID: 20000185 Result: Down-regulated in Transcription
  misc_feature: MA Experiment 20000185 PARAMETER Experiment Name: At_Roots__P Parameter: Age (day) Value: 7 vs. 21
  misc_feature: MA Experiment 20000185 PARAMETER Experiment Name: At_Roots__P Parameter: Organism Value: A. thaliana
  misc_feature: MA Experiment 20000185 PARAMETER Experiment Name: At_Roots__P Parameter: Tissue Value: Roots vs. Whole Plant
  misc_feature: MA Experiment ID: 20000286 Result: Down-regulated in Transcription
  misc_feature: MA Experiment 20000286 PARAMETER Experiment Name: At_Open_Flower_P Parameter: Age (day) Value: 21
  misc_feature: MA Experiment 20000286 PARAMETER Experiment Name: At_Open_Flower_P Parameter: Plant Line Value: WS
  misc_feature: MA Experiment 20000286 PARAMETER Experiment Name: At_Open_Flower_P Parameter: Tissue Value: Half Open vs. Whole Plant
  misc_feature: MA Experiment ID: 20000439 Result: Down-regulated in Transcription
  misc_feature: MA Experiment 20000439 PARAMETER Experiment Name: At_Roots__P Parameter: Age (day) Value: 14 vs. 21
  misc_feature: MA Experiment 20000439 PARAMETER Experiment Name: At_Roots__P Parameter: Organism Value: A. thaliana
  misc_feature: MA Experiment 20000439 PARAMETER Experiment Name: At_Roots__P Parameter: Tissue Value: Roots vs. Whole Plant
  misc_feature: MA Experiment ID: 20001450 Result: Up-regulated in Transcription
  misc_feature: MA Experiment 20001450 PARAMETER Experiment Name: At_Far-red-induction_P Parameter: Age (day) Value: 7
  misc_feature: MA Experiment 20001450 PARAMETER Experiment Name: At_Far-red-induction_P Parameter: Light Value: Far-red vs. White
  misc_feature: MA Experiment 20001450 PARAMETER Experiment Name: At_Far-red-induction_P Parameter: Organism Value: A. thaliana
  misc_feature: MA Experiment 20001450 PARAMETER Experiment Name: At_Far-red-induction_P Parameter: Plant Line Value: Columbia
  misc_feature: MA Experiment 20001450 PARAMETER Experiment Name: At_Far-red-induction_P Parameter: Timepoint (hr) Value: 8
  misc_feature: MA Experiment 20001450 PARAMETER Experiment Name: At_Far-red-induction_P Parameter: Tissue Value: Whole Plant
  misc_feature: MA Experiment ID: 20001557 Result: Down-regulated in Transcription
  misc_feature: MA Experiment 20001557 PARAMETER Experiment Name: At_Drought_Soil_Dry_P Parameter: Age (day) Value: 27
  misc_feature: MA Experiment 20001557 PARAMETER Experiment Name: At_Drought_Soil_Dry_P Parameter: Organism Value: A. thaliana
  misc_feature: MA Experiment 20001557 PARAMETER Experiment Name: At_Drought_Soil_Dry_P Parameter: Plant Line Value: WS
  misc_feature: MA Experiment 20001557 PARAMETER Experiment Name: At_Drought_Soil_Dry_P Parameter: Post Timepoint (hr) Value: 3
  misc_feature: MA Experiment 20001557 PARAMETER Experiment Name: At_Drought_Soil_Dry_P Parameter: Post-Treatment Value: Re-Water vs. No Drought
  misc_feature: MA Experiment 20001557 PARAMETER Experiment Name: At_Drought_Soil_Dry_P Parameter: Timepoint (day) Value: 13
  misc_feature: MA Experiment 20001557 PARAMETER Experiment Name: At_Drought_Soil_Dry_P Parameter: Treatment Value: Drought vs. No Drought
  misc_feature: MA Experiment ID: 20001558 Result: Down-regulated in Transcription
  misc_feature: MA Experiment 20001558 PARAMETER Experiment Name: At_Drought_Soil_Dry_P Parameter: Age (day) Value: 27
  misc_feature: MA Experiment 20001558 PARAMETER Experiment Name: At_Drought_Soil_Dry_P Parameter: Organism Value: A. thaliana
  misc_feature: MA Experiment 20001558 PARAMETER Experiment Name: At_Drought_Soil_Dry_P Parameter: Plant Line Value: WS
  misc_feature: MA Experiment 20001558 PARAMETER Experiment Name: At_Drought_Soil_Dry_P Parameter: Post Timepoint (hr) Value: 6
  misc_feature: MA Experiment 20001558 PARAMETER Experiment Name: At_Drought_Soil_Dry_P Parameter: Post-Treatment Value: Re-Water vs. No Drought
  misc_feature: MA Experiment 20001558 PARAMETER Experiment Name: At_Drought_Soil_Dry_P Parameter: Timepoint (day) Value: 13
  misc_feature: MA Experiment 20001558 PARAMETER Experiment Name: At_Drought_Soil_Dry_P Parameter: Treatment Value: Drought vs. No Drought

SEQ ID NO: 32336 - protein, 125 aa, Arabidopsis thaliana; identical to SEQ ID NO: 28746
  peptide (1)..(125): Ceres Seq. ID no. 12384611
  misc_feature (34)..(125): Homolog of NCBI NO: 2129783 NR Description: cystatin - field mustard
  misc_feature (34)..(124): Homolog of NCBI NO: 18158608 NR Description: cysteine protease inhibitor CPI-1 [Brassica
  misc_feature (34)..(124): Homolog of NCBI NO: 7488521 NR Description: cysteine proteinase inhibitor BCPI-2 - turnip
  misc_feature (30)..(125): Homolog of NCBI NO: 11139270 NR Description: PRLI-interacting factor M [Arabidopsis thaliana]
  misc_feature (34)..(125): Homolog of NCBI NO: 24899735 NR Description: cysteine proteinase inhibitor, putative 1
  misc_feature (34)..(125): Homolog of NCBI NO: 18399630 NR Description: cysteine proteinase inhibitor, putative; protein
  misc_feature (30)..(125): Homolog of NCBI NO: 12321971 NR Description: cysteine proteinase inhibitor, putative;
  misc_feature (34)..(125): Homolog of NCBI NO: 11127597 NR Description: cysteine proteinase inhibitor homolog
  misc_feature (10)..(125): Homolog of NCBI NO: 19347961 NR Description: putative cysteine proteinase inhibitor cystatin B
  misc_feature (1)..(125): Homolog of NCBI NO: 15226769 NR Description: putative cysteine proteinase inhibitor B

SEQ ID NO: 32337 - protein, 93 aa, Arabidopsis thaliana; identical to SEQ ID NO: 28747
  peptide (1)..(93): Ceres Seq. ID no. 12384612
  misc_feature (2)..(93): Homolog of NCBI NO: 2129783 NR Description: cystatin - field mustard
  misc_feature (2)..(92): Homolog of NCBI NO: 18158608 NR Description: cysteine protease inhibitor CPI-1 [Brassica
  misc_feature (2)..(92): Homolog of NCBI NO: 7488521 NR Description: cysteine proteinase inhibitor BCPI-2 - turnip
  misc_feature (1)..(93): Homolog of NCBI NO: 11139270 NR Description: PRLI-interacting factor M [Arabidopsis thaliana]
  misc_feature (2)..(93): Homolog of NCBI NO: 24899735 NR Description: cysteine proteinase inhibitor, putative 1
  misc_feature (2)..(93): Homolog of NCBI NO: 18399630 NR Description: cysteine proteinase inhibitor, putative; protein
  misc_feature (1)..(93): Homolog of NCBI NO: 12321971 NR Description: cysteine proteinase inhibitor, putative;
  misc_feature (2)..(93): Homolog of NCBI NO: 11127597 NR Description: cysteine proteinase inhibitor homolog
  misc_feature (1)..(93): Homolog of NCBI NO: 19347961 NR Description: putative cysteine proteinase inhibitor cystatin B
  misc_feature (1)..(93): Homolog of NCBI NO: 15226769 NR Description: putative cysteine proteinase inhibitor B

SEQ ID NO: 32338 - protein, 92 aa, Arabidopsis thaliana; identical to SEQ ID NO: 28748
  peptide (1)..(92): Ceres Seq. ID no. 12384613
  misc_feature (1)..(92): Homolog of NCBI NO: 2129783 NR Description: cystatin - field mustard
  misc_feature (1)..(91): Homolog of NCBI NO: 18158608 NR Description: cysteine protease inhibitor CPI-1 [Brassica
  misc_feature (1)..(91): Homolog of NCBI NO: 7488521 NR Description: cysteine proteinase inhibitor BCPI-2 - turnip
  misc_feature (1)..(92): Homolog of NCBI NO: 11139270 NR Description: PRLI-interacting factor M [Arabidopsis thaliana]
  misc_feature (1)..(92): Homolog of NCBI NO: 24899735 NR Description: cysteine proteinase inhibitor, putative 1
  misc_feature (1)..(92): Homolog of NCBI NO: 18399630 NR Description: cysteine proteinase inhibitor, putative; protein
  misc_feature (1)..(92): Homolog of NCBI NO: 12321971 NR Description: cysteine proteinase inhibitor, putative;
  misc_feature (1)..(92): Homolog of NCBI NO: 11127597 NR Description: cysteine proteinase inhibitor homolog
  misc_feature (1)..(92): Homolog of NCBI NO: 19347961 NR Description: putative cysteine proteinase inhibitor cystatin B
  misc_feature (1)..(92): Homolog of NCBI NO: 15226769 NR Description: putative cysteine proteinase inhibitor B

SEQ ID NO: 32339 - DNA, 608 bp, Arabidopsis thaliana; identical to SEQ ID NO: 28749
  misc_feature (1)..(608): Ceres Seq. ID no. 12393664
  misc_feature: MA Experiment ID: 108595 Result: Down-regulated in Transcription
  misc_feature: MA Experiment 108595 PARAMETER Experiment Name: At_Ler-pi_Ovule_cDNA_P Parameter: Plant Line Value: null
  misc_feature: MA Experiment ID: 20000224 Result: Down-regulated in Transcription
  misc_feature: MA Experiment ID: 20000437 Result: Down-regulated in Transcription
  misc_feature: MA Experiment 20000437 PARAMETER Experiment Name: At_Drought_P Parameter: Age (day) Value: 8
  misc_feature: MA Experiment 20000437 PARAMETER Experiment Name: At_Drought_P Parameter: Organism Value: A. thaliana
  misc_feature: MA Experiment 20000437 PARAMETER Experiment Name: At_Drought_P Parameter: Plant Line Value: WS
  misc_feature: MA Experiment 20000437 PARAMETER Experiment Name: At_Drought_P Parameter: Timepoint (hr) Value: 24
  misc_feature: MA Experiment 20000437 PARAMETER Experiment Name: At_Drought_P Parameter: Tissue Value: Whole Plant
  misc_feature: MA Experiment 20000437 PARAMETER Experiment Name: At_Drought_P Parameter: Treatment Value: Drought vs. No Drought
  misc_feature: MA Experiment ID: 20000452 Result: Down-regulated in Transcription
  misc_feature: MA Experiment 20000452 PARAMETER Experiment Name: At_CS6879_Shoots-Roots_P Parameter: Age (day) Value: 14
  misc_feature: MA Experiment 20000452 PARAMETER Experiment Name: At_CS6879_Shoots-Roots_P Parameter: Organism Value: A. thaliana
  misc_feature: MA Experiment 20000452 PARAMETER Experiment Name: At_CS6879_Shoots-Roots_P Parameter: Plant Line Value: CS6879 vs. WS
  misc_feature: MA Experiment 20000452 PARAMETER Experiment Name: At_CS6879_Shoots-Roots_P Parameter: Tissue Value: Shoots
  misc_feature: MA Experiment ID: 20001451 Result: Down-regulated in Transcription
  misc_feature: MA Experiment 20001451 PARAMETER Experiment Name: At_Far-red-induction_P Parameter: Age (day) Value: 7
  misc_feature: MA Experiment 20001451 PARAMETER Experiment Name: At_Far-red-induction_P Parameter: Light Value: Far-red vs. White
  misc_feature: MA Experiment 20001451 PARAMETER Experiment Name: At_Far-red-induction_P Parameter: Organism Value: A. thaliana
  misc_feature: MA Experiment 20001451 PARAMETER Experiment Name: At_Far-red-induction_P Parameter: Plant Line Value: Columbia
  misc_feature: MA Experiment 20001451 PARAMETER Experiment Name: At_Far-red-induction_P Parameter: Timepoint (hr) Value: 24
  misc_feature: MA Experiment 20001451 PARAMETER Experiment Name: At_Far-red-induction_P Parameter: Tissue Value: Whole Plant

SEQ ID NO: 32340 - protein, 115 aa, Arabidopsis thaliana; identical to SEQ ID NO: 28750
  peptide (1)..(115): Ceres Seq. ID no. 12393665
  misc_feature (21)..(86): Homolog of NCBI NO: 32420171 NR Description: NADH-UBIQUINONE OXIDOREDUCTASE 12 KD SUBUNIT
  misc_feature (21)..(86): Homolog of NCBI NO: 400649 NR Description: NADH-ubiquinone oxidoreductase 12 kDa subunit,
  misc_feature (12)..(115): Homolog of NCBI NO: 37537116 NR Description: unknown protein [Oryza sativa (japonica
  misc_feature (9)..(105): Homolog of NCBI NO: 11994104 NR Description: gene_id:MYF24.13~similar to unknown
  misc_feature (9)..(112): Homolog of NCBI NO: 18401879 NR Description: expressed protein
  misc_feature (9)..(115): Homolog of NCBI NO: 18402495 NR Description: expressed protein

SEQ ID NO: 32341 - protein, 107 aa, Arabidopsis thaliana; identical to SEQ ID NO: 28751
  peptide (1)..(107): Ceres Seq. ID no. 12393666
  misc_feature (13)..(78): Homolog of NCBI NO: 32420171 NR Description: NADH-UBIQUINONE OXIDOREDUCTASE 12 KD SUBUNIT
  misc_feature (13)..(78): Homolog of NCBI NO: 400649 NR Description: NADH-ubiquinone oxidoreductase 12 kDa subunit,
  misc_feature (4)..(107): Homolog of NCBI NO: 37537116 NR Description: unknown protein [Oryza sativa (japonica
  misc_feature (1)..(97): Homolog of NCBI NO: 11994104 NR Description: gene_id:MYF24.13~similar to unknown
  misc_feature (1)..(104): Homolog of NCBI NO: 18401879 NR Description: expressed protein
  misc_feature (1)..(107): Homolog of NCBI NO: 18402495 NR Description: expressed protein

SEQ ID NO: 32342 - protein, 78 aa, Arabidopsis thaliana; identical to SEQ ID NO: 28752
  peptide (1)..(78): Ceres Seq. ID no. 12393667
  misc_feature (1)..(49): Homolog of NCBI NO: 32420171 NR Description: NADH-UBIQUINONE OXIDOREDUCTASE 12 KD SUBUNIT
  misc_feature (1)..(49): Homolog of NCBI NO: 400649 NR Description: NADH-ubiquinone oxidoreductase 12 kDa subunit,
  misc_feature (1)..(78): Homolog of NCBI NO: 37537116 NR Description: unknown protein [Oryza sativa (japonica
  misc_feature (1)..(68): Homolog of NCBI NO: 11994104 NR Description: gene_id:MYF24.13~similar to unknown
  misc_feature (1)..(75): Homolog of NCBI NO: 18401879 NR Description: expressed protein
  misc_feature (1)..(78): Homolog of NCBI NO: 18402495 NR Description: expressed protein

SEQ ID NO: 32343 - DNA, 636 bp, Arabidopsis thaliana; identical to SEQ ID NO: 28753
  misc_feature (1)..(636): Ceres Seq. ID no. 13496892
  misc_feature: MA Experiment ID: 108434 Result: Up-regulated in Transcription
  misc_feature: MA Experiment 108434 PARAMETER Experiment Name: At_Root_Tips_cDNA_P Parameter: Tissue Value: Root Tips
  misc_feature: MA Experiment ID: 108595 Result: Up-regulated in Transcription
  misc_feature: MA Experiment 108595 PARAMETER Experiment Name: At_Ler-pi_Ovule_cDNA_P Parameter: Plant Line Value: null

SEQ ID NO: 32344 - protein, 107 aa, Arabidopsis thaliana; identical to SEQ ID NO: 28754
  peptide (1)..(107): Ceres Seq. ID no. 13496893
  misc_feature (19)..(66): Homolog of NCBI NO: 11270318 NR Description: peptidylprolyl isomerase (EC 5.2.1.8) CYP18
  misc_feature (20)..(66): Homolog of NCBI NO: 15227259 NR Description: cytosolic cyclophilin (ROC3) [Arabidopsis
  misc_feature (19)..(63): Homolog of NCBI NO: 29124975 NR Description: cyclophilin [Populus tremuloides]
  misc_feature (19)..(66): Homolog of NCBI NO: 18146786 NR Description: CYP1 [Vigna radiata]
  misc_feature (19)..(67): Homolog of NCBI NO: 11270322 NR Description: peptidylprolyl isomerase (EC 5.2.1.8)
  misc_feature (20)..(66): Homolog of NCBI NO: 18076088 NR Description: cyclophilin [Ricinus communis]
  misc_feature (19)..(66): Homolog of NCBI NO: 11270316 NR Description: peptidylprolyl isomerase (EC 5.2.1.8)
  misc_feature (20)..(66): Homolog of NCBI NO: 21886603 NR Description: peptidylprolyl isomerase (cyclophilin) [Betula
  misc_feature (19)..(66): Homolog of NCBI NO: 3334157 NR Description: Peptidyl-prolyl cis-trans isomerase (PPIase)
  misc_feature (19)..(67): Homolog of NCBI NO: 15236211 NR Description: peptidylprolyl isomerase (cyclophilin)

SEQ ID NO: 32345 - protein, 89 aa, Arabidopsis thaliana; identical to SEQ ID NO: 28755
  peptide (1)..(89): Ceres Seq. ID no. 13496894
  misc_feature (1)..(48): Homolog of NCBI NO: 11270318 NR Description: peptidylprolyl isomerase (EC 5.2.1.8) CYP18
  misc_feature (2)..(48): Homolog of NCBI NO: 15227259 NR Description: cytosolic cyclophilin (ROC3) [Arabidopsis
  misc_feature (1)..(45): Homolog of NCBI NO: 29124975 NR Description: cyclophilin [Populus tremuloides]
  misc_feature (1)..(48): Homolog of NCBI NO: 18146786 NR Description: CYP1 [Vigna radiata]
  misc_feature (1)..(49): Homolog of NCBI NO: 11270322 NR Description: peptidylprolyl isomerase (EC 5.2.1.8)
  misc_feature (2)..(48): Homolog of NCBI NO: 18076088 NR Description: cyclophilin [Ricinus communis]
  misc_feature (1)..(48): Homolog of NCBI NO: 11270316 NR Description: peptidylprolyl isomerase (EC 5.2.1.8)
  misc_feature (2)..(48): Homolog of NCBI NO: 21886603 NR Description: peptidylprolyl isomerase (cyclophilin) [Betula
  misc_feature (1)..(48): Homolog of NCBI NO: 3334157 NR Description: Peptidyl-prolyl cis-trans isomerase (PPIase)
  misc_feature (1)..(49): Homolog of NCBI NO: 15236211 NR Description: peptidylprolyl isomerase (cyclophilin)

SEQ ID NO: 32346 - protein, 80 aa, Arabidopsis thaliana; identical to SEQ ID NO: 28756
  peptide (1)..(80): Ceres Seq. ID no. 13496895
  misc_feature (1)..(39): Homolog of NCBI NO: 11270318 NR Description: peptidylprolyl isomerase (EC 5.2.1.8) CYP18
  misc_feature (1)..(39): Homolog of NCBI NO: 15227259 NR Description: cytosolic cyclophilin (ROC3) [Arabidopsis
  misc_feature (1)..(36): Homolog of NCBI NO: 29124975 NR Description: cyclophilin [Populus tremuloides]
  misc_feature (1)..(39): Homolog of NCBI NO: 18146786 NR Description: CYP1 [Vigna radiata]
  misc_feature (1)..(40): Homolog of NCBI NO: 11270322 NR Description: peptidylprolyl isomerase (EC 5.2.1.8)
  misc_feature (1)..(39): Homolog of NCBI NO: 18076088 NR Description: cyclophilin [Ricinus communis]
  misc_feature (1)..(39): Homolog of NCBI NO: 11270316 NR Description: peptidylprolyl isomerase (EC 5.2.1.8)
  misc_feature (1)..(39): Homolog of NCBI NO: 21886603 NR Description: peptidylprolyl isomerase (cyclophilin) [Betula
  misc_feature (1)..(39): Homolog of NCBI NO: 3334157 NR Description: Peptidyl-prolyl cis-trans isomerase (PPIase)
  misc_feature (1)..(40): Homolog of NCBI NO: 15236211 NR Description: peptidylprolyl isomerase (cyclophilin)

SEQ ID NO: 32347 - DNA, 1000 bp, Arabidopsis thaliana; identical to SEQ ID NO: 28757
  misc_feature (1)..(1000): Ceres Seq. ID no. 13489993
  misc_feature: MA Experiment ID: 108434 Result: Up-regulated in Transcription
  misc_feature: MA Experiment 108434 PARAMETER Experiment Name: At_Root_Tips_cDNA_P Parameter: Tissue Value: Root Tips
  misc_feature: MA Experiment ID: 108488 Result: Down-regulated in Transcription
  misc_feature: MA Experiment ID: 20000185 Result: Up-regulated in Transcription
  misc_feature: MA Experiment 20000185 PARAMETER Experiment Name: At_Roots__P Parameter: Age (day) Value: 7 vs. 21
  misc_feature: MA Experiment 20000185 PARAMETER Experiment Name: At_Roots__P Parameter: Organism Value: A. thaliana
  misc_feature: MA Experiment 20000185 PARAMETER Experiment Name: At_Roots__P Parameter: Tissue Value: Roots vs. Whole Plant

SEQ ID NO: 32348 - protein, 238 aa, Arabidopsis thaliana; identical to SEQ ID NO: 28758
  peptide (1)..(238): Ceres Seq. ID no. 13489994
  misc_feature (58)..(229): Pfam Name: ATP synthase delta (OSCP) subunit Pfam Description: ATP synthase delta (OSCP) subunit
  misc_feature (34)..(233): Homolog of NCBI NO: 31208781 NR Description: ENSANGP00000011882 [Anopheles gambiae]
  misc_feature (21)..(231): Homolog of NCBI NO: 27806307 NR Description: ATP synthase, H+ transporting, mitochondrial F1
  misc_feature (33)..(233): Homolog of NCBI NO: 4502303 NR Description: ATP synthase, H+ transporting, mitochondrial F1
  misc_feature (1)..(234): Homolog of NCBI NO: 23507248 NR Description: oligomycin sensitivity conferring protein [Silene
  misc_feature (1)..(234): Homolog of NCBI NO: 23507246 NR Description: oligomycin sensitivity conferring protein [Silene
  misc_feature (1)..(235): Homolog of NCBI NO: 4774163 NR Description: F1-ATP synthase delta subunit [Ipomoea batatas]
  misc_feature (1)..(235): Homolog of NCBI NO: 114682 NR Description: ATP synthase delta chain, mitochondrial precursor
  misc_feature (1)..(238): Homolog of NCBI NO: 1655482 NR Description: delta subunit of mitochondrial F1-ATPase
  misc_feature (1)..(238): Homolog of NCBI NO: 14190495 NR Description: AT5g13450/T22N19_100 [Arabidopsis thaliana]
  misc_feature (1)..(238): Homolog of NCBI NO: 15240628 NR Description: delta subunit of mitochondrial F1-ATPase

SEQ ID NO: 32349 - protein, 168 aa, Arabidopsis thaliana; identical to SEQ ID NO: 28759
  peptide (1)..(168): Ceres Seq. ID no. 13489995
  misc_feature (1)..(159): Pfam Name: ATP synthase delta (OSCP) subunit Pfam Description: ATP synthase delta (OSCP) subunit
  misc_feature (1)..(163): Homolog of NCBI NO: 31208781 NR Description: ENSANGP00000011882 [Anopheles gambiae]
  misc_feature (1)..(161): Homolog of NCBI NO: 27806307 NR Description: ATP synthase, H+ transporting, mitochondrial F1
  misc_feature (1)..(163): Homolog of NCBI NO: 4502303 NR Description: ATP synthase, H+ transporting, mitochondrial F1
  misc_feature (1)..(164): Homolog of NCBI NO: 23507248 NR Description: oligomycin sensitivity conferring protein [Silene
  misc_feature (1)..(164): Homolog of NCBI NO: 23507246 NR Description: oligomycin sensitivity conferring protein [Silene
  misc_feature (1)..(165): Homolog of NCBI NO: 4774163 NR Description: F1-ATP synthase delta subunit [Ipomoea batatas]
  misc_feature (1)..(165): Homolog of NCBI NO: 114682 NR Description: ATP synthase delta chain, mitochondrial precursor
  misc_feature (1)..(168): Homolog of NCBI NO: 1655482 NR Description: delta subunit of mitochondrial F1-ATPase
  misc_feature (1)..(168): Homolog of NCBI NO: 14190495 NR Description: AT5g13450/T22N19_100 [Arabidopsis thaliana]
  misc_feature (1)..(168): Homolog of NCBI NO: 15240628 NR Description: delta subunit of mitochondrial F1-ATPase

SEQ ID NO: 32350 - protein, 155 aa, Arabidopsis thaliana; identical to SEQ ID NO: 28760
  peptide (1)..(155): Ceres Seq. ID no. 13489996
  misc_feature (1)..(146): Pfam Name: ATP synthase delta (OSCP) subunit Pfam Description: ATP synthase delta (OSCP) subunit
  misc_feature (1)..(150): Homolog of NCBI NO: 31208781 NR Description: ENSANGP00000011882 [Anopheles gambiae]
  misc_feature (1)..(148): Homolog of NCBI NO: 27806307 NR Description: ATP synthase, H+ transporting, mitochondrial F1
  misc_feature (1)..(150): Homolog of NCBI NO: 4502303 NR Description: ATP synthase, H+ transporting, mitochondrial F1
  misc_feature (1)..(151): Homolog of NCBI NO: 23507248 NR Description: oligomycin sensitivity conferring protein [Silene
  misc_feature (1)..(151): Homolog of NCBI NO: 23507246 NR Description: oligomycin sensitivity conferring protein [Silene
  misc_feature (1)..(152): Homolog of NCBI NO: 4774163 NR Description: F1-ATP synthase delta subunit [Ipomoea batatas]
  misc_feature (1)..(152): Homolog of NCBI NO: 114682 NR Description: ATP synthase delta chain, mitochondrial precursor
  misc_feature (1)..(155): Homolog of NCBI NO: 1655482 NR Description: delta subunit of mitochondrial F1-ATPase
  misc_feature (1)..(155): Homolog of NCBI NO: 14190495 NR Description: AT5g13450/T22N19_100 [Arabidopsis thaliana]
  misc_feature (1)..(155): Homolog of NCBI NO: 15240628 NR Description: delta subunit of mitochondrial F1-ATPase

SEQ ID NO: 32351 - DNA, 1067 bp, Arabidopsis thaliana; identical to SEQ ID NO: 28761
  misc_feature (1)..(1067): Ceres Seq. ID no. 12327360
  misc_feature: MA Experiment ID: 108585 Result: Up-regulated in Transcription
  misc_feature: MA Experiment 108585 PARAMETER Experiment Name: At_5mM_NaNP_cDNA_P Parameter: Timepoint (hr) Value: 6
  misc_feature: MA Experiment 108585 PARAMETER Experiment Name: At_5mM_NaNP_cDNA_P Parameter: Tissue Value: Aerial
  misc_feature: MA Experiment 108585 PARAMETER Experiment Name: At_5mM_NaNP_cDNA_P Parameter: Treatment Value: null
  misc_feature: MA Experiment ID: 20000315 Result: Down-regulated in Transcription
  misc_feature: MA Experiment 20000315 PARAMETER Experiment Name: At_14day_Shoots-Roots_Sub_P Parameter: Age (day) Value: 14
  misc_feature: MA Experiment 20000315 PARAMETER Experiment Name: At_14day_Shoots-Roots_Sub_P Parameter: Organism Value: A. thaliana
  misc_feature: MA Experiment 20000315 PARAMETER Experiment Name: At_14day_Shoots-Roots_Sub_P Parameter: Plant Line Value: WS
  misc_feature: MA Experiment 20000315 PARAMETER Experiment Name: At_14day_Shoots-Roots_Sub_P Parameter: Tissue Value: Shoots vs. Whole Plant
  misc_feature: MA Experiment ID: 20000327 Result: Down-regulated in Transcription
  misc_feature: MA Experiment 20000327 PARAMETER Experiment Name: At_42deg_Heat_Sub_P Parameter: Age (day) Value: 14
  misc_feature: MA Experiment 20000327 PARAMETER Experiment Name: At_42deg_Heat_Sub_P Parameter: Organism Value: A. thaliana
  misc_feature: MA Experiment 20000327 PARAMETER Experiment Name: At_42deg_Heat_Sub_P Parameter: Plant Line Value: WS
  misc_feature: MA Experiment 20000327 PARAMETER Experiment Name: At_42deg_Heat_Sub_P Parameter: Temperature (deg C) Value: 42 vs. 22
  misc_feature: MA Experiment 20000327 PARAMETER Experiment Name: At_42deg_Heat_Sub_P Parameter: Timepoint (hr) Value: 1
  misc_feature: MA Experiment 20000327 PARAMETER Experiment Name: At_42deg_Heat_Sub_P Parameter: Tissue Value: Aerial
  misc_feature: MA Experiment ID: 20000355 Result: Down-regulated in Transcription
  misc_feature: MA Experiment 20000355 PARAMETER Experiment Name: At_Siliques_Sub_P Parameter: Age (day) Value: 21
  misc_feature: MA Experiment 20000355 PARAMETER Experiment Name: At_Siliques_Sub_P Parameter: Organism Value: A. thaliana
  misc_feature: MA Experiment 20000355 PARAMETER Experiment Name: At_Siliques_Sub_P Parameter: Plant Line Value: WS
  misc_feature: MA Experiment 20000355 PARAMETER Experiment Name: At_Siliques_Sub_P Parameter: Tissue Value: Less Than 5mm Siliques vs. Whole Plant

SEQ ID NO: 32352 - protein, 283 aa, Arabidopsis thaliana; identical to SEQ ID NO: 28762
  peptide (1)..(283): Ceres Seq. ID no. 12327361
  misc_feature (83)..(273): Pfam Name: Glutamine amidotransferase class-I Pfam Description: Glutamine amidotransferase class-I
  misc_feature (82)..(271): Homolog of NCBI NO: 11467408 NR Description: anthranilate synthase component II [Cyanophora
  misc_feature (82)..(272): Homolog of NCBI NO: 37520452 NR Description: anthranilate synthase component II [Gloeobacter
  misc_feature (49)..(281): Homolog of NCBI NO: 21741992 NR Description: OSJNBa0060P14.13 [Oryza sativa (japonica
  misc_feature (51)..(279): Homolog of NCBI NO: 28301926 NR Description: putative anthranilate synthase beta subunit
  misc_feature (62)..(283): Homolog of NCBI NO: 15221810 NR Description: F5A9.17; protein id: At1g24807.1 [Arabidopsis
  misc_feature (62)..(283): Homolog of NCBI NO: 15221840 NR Description: F5A9.7; protein id: At1g25083.1 [Arabidopsis
  misc_feature (51)..(283): Homolog of NCBI NO: 25403004 NR Description: probable anthranilate synthase beta subunit
  misc_feature (8)..(282): Homolog of NCBI NO: 15242893 NR Description: anthranilate synthase beta chain
  misc_feature (8)..(282): Homolog of NCBI NO: 21594026 NR Description: anthranilate synthase beta chain [Arabidopsis
  misc_feature (8)..(283): Homolog of NCBI NO: 15222532 NR Description: anthranilate synthase beta subunit

SEQ ID NO: 32353 - protein, 276 aa, Arabidopsis thaliana; identical to SEQ ID NO: 28763
  peptide (1)..(276): Ceres Seq. ID no. 12327362
  misc_feature (76)..(266): Pfam Name: Glutamine amidotransferase class-I Pfam Description: Glutamine amidotransferase class-I
  misc_feature (75)..(264): Homolog of NCBI NO: 11467408 NR Description: anthranilate synthase component II [Cyanophora
  misc_feature (75)..(265): Homolog of NCBI NO: 37520452 NR Description: anthranilate synthase component II [Gloeobacter
  misc_feature (42)..(274): Homolog of NCBI NO: 21741992 NR Description: OSJNBa0060P14.13 [Oryza sativa (japonica
  misc_feature (44)..(272): Homolog of NCBI NO: 28301926 NR Description: putative anthranilate synthase beta subunit
  misc_feature (55)..(276): Homolog of NCBI NO: 15221810 NR Description: F5A9.17; protein id: At1g24807.1 [Arabidopsis
  misc_feature (55)..(276): Homolog of NCBI NO: 15221840 NR Description: F5A9.7; protein id: At1g25083.1 [Arabidopsis
  misc_feature (44)..(276): Homolog of NCBI NO: 25403004 NR Description: probable anthranilate synthase beta subunit
  misc_feature (1)..(275): Homolog of NCBI NO: 15242893 NR Description: anthranilate synthase beta chain
  misc_feature (1)..(275): Homolog of NCBI NO: 21594026 NR Description: anthranilate synthase beta chain [Arabidopsis
  misc_feature (1)..(276): Homolog of NCBI NO: 15222532 NR Description: anthranilate synthase beta subunit

SEQ ID NO: 32354 - protein, 222 aa, Arabidopsis thaliana; identical to SEQ ID NO: 28764
  peptide (1)..(222): Ceres Seq. ID no. 12327363
  misc_feature (22)..(212): Pfam Name: Glutamine amidotransferase class-I Pfam Description: Glutamine amidotransferase class-I
  misc_feature (21)..(210): Homolog of NCBI NO: 11467408 NR Description: anthranilate synthase component II [Cyanophora
  misc_feature (21)..(211): Homolog of NCBI NO: 37520452 NR Description: anthranilate synthase component II [Gloeobacter
  misc_feature (1)..(220): Homolog of NCBI NO: 21741992 NR Description: OSJNBa0060P14.13 [Oryza sativa (japonica
  misc_feature (1)..(218): Homolog of NCBI NO: 28301926 NR Description: putative anthranilate synthase beta subunit
  misc_feature (1)..(222): Homolog of NCBI NO: 15221810 NR Description: F5A9.17; protein id: At1g24807.1 [Arabidopsis
  misc_feature (1)..(222): Homolog of NCBI NO: 15221840 NR Description: F5A9.7; protein id: At1g25083.1 [Arabidopsis
  misc_feature (1)..(222): Homolog of NCBI NO: 25403004 NR Description: probable anthranilate synthase beta subunit
  misc_feature (1)..(221): Homolog of NCBI NO: 15242893 NR Description: anthranilate synthase beta chain
  misc_feature (1)..(221): Homolog of NCBI NO: 21594026 NR Description: anthranilate synthase beta chain [Arabidopsis
  misc_feature (1)..(222): Homolog of NCBI NO: 15222532 NR Description: anthranilate synthase beta subunit

SEQ ID NO: 32355 - DNA, 524 bp, Arabidopsis thaliana; identical to SEQ ID NO: 28765
  misc_feature (1)..(524): Ceres Seq. ID no. 12385784
  misc_feature: MA Experiment ID: 108434 Result: Up-regulated in Transcription
  misc_feature: MA Experiment 108434 PARAMETER Experiment Name: At_Root_Tips_cDNA_P Parameter: Tissue Value: Root Tips
  misc_feature: MA Experiment ID: 108461 Result: Down-regulated in Transcription
  misc_feature: MA Experiment 108461 PARAMETER Experiment Name: At_Germinating_Seeds_cDNA_P Parameter: Age (day) Value: 1 vs. 0
  misc_feature: MA Experiment 108461 PARAMETER Experiment Name: At_Germinating_Seeds_cDNA_P Parameter: Tissue Value: Germinating Seeds
  misc_feature: MA Experiment ID: 108462 Result: Down-regulated in Transcription
  misc_feature: MA Experiment 108462 PARAMETER Experiment Name: At_Germinating_Seeds_cDNA_P Parameter: Age (day) Value: 2 vs. 0
  misc_feature: MA Experiment 108462 PARAMETER Experiment Name: At_Germinating_Seeds_cDNA_P Parameter: Tissue Value: Germinating Seeds
  misc_feature: MA Experiment ID: 108463 Result: Down-regulated in Transcription
  misc_feature: MA Experiment 108463 PARAMETER Experiment Name: At_Germinating_Seeds_cDNA_P Parameter: Age (day) Value: 3 vs. 0
  misc_feature: MA Experiment 108463 PARAMETER Experiment Name: At_Germinating_Seeds_cDNA_P Parameter: Tissue Value: Germinating Seeds
  misc_feature: MA Experiment ID: 108464 Result: Down-regulated in Transcription
  misc_feature: MA Experiment 108464 PARAMETER Experiment Name: At_Germinating_Seeds_cDNA_P Parameter: Age (day) Value: 4 vs. 0
  misc_feature: MA Experiment 108464 PARAMETER Experiment Name: At_Germinating_Seeds_cDNA_P Parameter: Tissue Value: Germinating Seeds
  misc_feature: MA Experiment ID: 108572 Result: Down-regulated in Transcription
  misc_feature: MA Experiment 108572 PARAMETER Experiment Name: At_Drought_cDNA_P Parameter: Timepoint (hr) Value: 1
  misc_feature: MA Experiment 108572 PARAMETER Experiment Name: At_Drought_cDNA_P Parameter: Tissue Value: Aerial
  misc_feature: MA Experiment 108572 PARAMETER Experiment Name: At_Drought_cDNA_P Parameter: Treatment Value: Drought vs. No Drought
  misc_feature: MA Experiment ID: 108573 Result: Down-regulated in Transcription
  misc_feature: MA Experiment 108573 PARAMETER Experiment Name: At_Drought_cDNA_P Parameter: Timepoint (hr) Value: 6
  misc_feature: MA Experiment 108573 PARAMETER Experiment Name: At_Drought_cDNA_P Parameter: Tissue Value: Aerial
  misc_feature: MA Experiment 108573 PARAMETER Experiment Name: At_Drought_cDNA_P Parameter: Treatment Value: Drought vs. No Drought
  misc_feature: MA Experiment ID: 20000113 Result: Up-regulated in Transcription
  misc_feature: MA Experiment 20000113 PARAMETER Experiment Name: At_42deg_Heat_cDNA_P Parameter: Temperature (deg C) Value: 42 vs. 22
  misc_feature: MA Experiment 20000113 PARAMETER Experiment Name: At_42deg_Heat_cDNA_P Parameter: Timepoint (hr) Value: 8
  misc_feature: MA Experiment 20000113 PARAMETER Experiment Name: At_42deg_Heat_cDNA_P Parameter: Tissue Value: Aerial
  misc_feature: MA Experiment ID: 20000180 Result: Down-regulated in Transcription
  misc_feature: MA Experiment 20000180 PARAMETER Experiment Name: At_Germinating_Seeds_P Parameter: Age (hr) Value: 24 vs. 0
  misc_feature: MA Experiment 20000180 PARAMETER Experiment Name: At_Germinating_Seeds_P Parameter: Tissue Value: Germinating Seeds
  misc_feature: MA Experiment ID: 20000184 Result: Up-regulated in Transcription
  misc_feature: MA Experiment 20000184 PARAMETER Experiment Name: At_Shoots__P Parameter: Age (day) Value: 7
  misc_feature: MA Experiment 20000184 PARAMETER Experiment Name: At_Shoots__P Parameter: Tissue Value: Shoots vs. Whole Plant
  misc_feature: MA Experiment ID: 20000794 Result: Down-regulated in Transcription
  misc_feature: MA Experiment 20000794 PARAMETER Experiment Name: At_Petals_P Parameter: Age (day) Value: 23-25 days
  misc_feature: MA Experiment 20000794 PARAMETER Experiment Name: At_Petals_P Parameter: Plant Line Value: WS
  misc_feature: MA Experiment 20000794 PARAMETER Experiment Name: At_Petals_P Parameter: Tissue Value: Petals vs. Whole plant
  misc_feature: MA Experiment ID: 20001451 Result: Up-regulated in Transcription
  misc_feature: MA Experiment 20001451 PARAMETER Experiment Name: At_Far-red-induction_P Parameter: Age (day) Value: 7
  misc_feature: MA Experiment 20001451 PARAMETER Experiment Name: At_Far-red-induction_P Parameter: Light Value: Far-red vs. White
  misc_feature: MA Experiment 20001451 PARAMETER Experiment Name: At_Far-red-induction_P Parameter: Organism Value: A. thaliana
  misc_feature: MA Experiment 20001451 PARAMETER Experiment Name: At_Far-red-induction_P Parameter: Plant Line Value: Columbia
  misc_feature: MA Experiment 20001451 PARAMETER Experiment Name: At_Far-red-induction_P Parameter: Timepoint (hr) Value: 24
  misc_feature: MA Experiment 20001451 PARAMETER Experiment Name: At_Far-red-induction_P Parameter: Tissue Value: Whole Plant
  misc_feature: MA Experiment ID: 20001558 Result: Up-regulated in Transcription
  misc_feature: MA Experiment 20001558 PARAMETER Experiment Name: At_Drought_Soil_Dry_P Parameter: Age (day) Value: 27
  misc_feature: MA Experiment 20001558 PARAMETER Experiment Name: At_Drought_Soil_Dry_P Parameter: Organism Value: A. thaliana
  misc_feature: MA Experiment 20001558 PARAMETER Experiment Name: At_Drought_Soil_Dry_P Parameter: Plant Line Value: WS
  misc_feature: MA Experiment 20001558 PARAMETER Experiment Name: At_Drought_Soil_Dry_P Parameter: Post Timepoint (hr) Value: 6
  misc_feature: MA Experiment 20001558 PARAMETER Experiment Name: At_Drought_Soil_Dry_P Parameter: Post-Treatment Value: Re-Water vs. No Drought
  misc_feature: MA Experiment 20001558 PARAMETER Experiment Name: At_Drought_Soil_Dry_P Parameter: Timepoint (day) Value: 13
  misc_feature: MA Experiment 20001558 PARAMETER Experiment Name: At_Drought_Soil_Dry_P Parameter: Treatment Value: Drought vs. No Drought
  misc_feature: MA Experiment ID: 20001757 Result: Up-regulated in Transcription
  misc_feature: MA Experiment 20001757 PARAMETER Experiment Name: At_50mM_NH4NO3_L-to-H_P Parameter: Timepoint (hr) Value: 6
  misc_feature: MA Experiment 20001757 PARAMETER Experiment Name: At_50mM_NH4NO3_L-to-H_P Parameter: Tissue Value: Leaf
  misc_feature: MA Experiment 20001757 PARAMETER Experiment Name: At_50mM_NH4NO3_L-to-H_P Parameter: Treatment Value: 50mM NH4NO3 vs 100mM Mannitol
  misc_feature: MA Experiment ID: 20001911 Result: Down-regulated in Transcription
  misc_feature: MA Experiment 20001911 PARAMETER Experiment Name: At_Drought_Reproduction_P Parameter: Age (day) Value: 40
  misc_feature: MA Experiment 20001911 PARAMETER Experiment Name: At_Drought_Reproduction_P Parameter: Organism Value: A. thaliana
  misc_feature: MA Experiment 20001911 PARAMETER Experiment Name: At_Drought_Reproduction_P Parameter: Plant Line Value: WS
  misc_feature: MA Experiment 20001911 PARAMETER Experiment Name: At_Drought_Reproduction_P Parameter: Timepoint (day) Value: 10
  misc_feature: MA Experiment 20001911 PARAMETER Experiment Name: At_Drought_Reproduction_P Parameter: Tissue Value: Flowers
  misc_feature: MA Experiment 20001911 PARAMETER Experiment Name: At_Drought_Reproduction_P Parameter: Treatment Value: Drought vs. No Drought
  misc_feature: Phenotype: WHOLE PLANT Size-Small
  misc_feature: Phenotype: WHOLE PLANT Size-Small
  misc_feature: Phenotype: WHOLE PLANT Size-Small
  misc_feature: Phenotype: WHOLE PLANT Size-Small
  misc_feature: Phenotype: WHOLE PLANT Size-Small
  misc_feature: Phenotype: WHOLE PLANT Size-Small

SEQ ID NO: 32356 - protein, 124 aa, Arabidopsis thaliana; identical to SEQ ID NO: 28766
  peptide (1)..(124): Ceres Seq. ID no. 12385785
  misc_feature (1)..(123): Homolog of NCBI NO: 7705477 NR Description: hypothetical protein HSPC152 [Homo sapiens]
  misc_feature (1)..(123): Homolog of NCBI NO: 12833869 NR Description: unnamed protein product [Mus musculus]
  misc_feature (1)..(122): Homolog of NCBI NO: 16740612 NR Description: RIKEN cDNA 0610038D11 gene [Mus musculus]
  misc_feature (1)..(123): Homolog of NCBI NO: 13385802 NR Description: RIKEN cDNA 0610038D11 [Mus musculus]
  misc_feature (1)..(124): Homolog of NCBI NO: 22535669 NR Description: contains ESTs
  misc_feature (1)..(123): Homolog of NCBI NO: 27661288 NR Description: similar to RIKEN cDNA 0610038D11
  misc_feature (8)..(124): Homolog of NCBI NO: 30725332 NR Description: At1g78190 [Arabidopsis thaliana]
  misc_feature (1)..(124): Homolog of NCBI NO: 15218237 NR Description: unknown protein; protein id: At1g78190.1
  misc_feature (1)..(124): Homolog of NCBI NO: 25518574 NR Description: hypothetical protein T16E15.11 - Arabidopsis
  misc_feature (1)..(124): Homolog of NCBI NO: 18395095 NR Description: Expressed protein

SEQ ID NO: 32357 - protein, 117 aa, Arabidopsis thaliana; identical to SEQ ID NO: 28767
  peptide (1)..(117): Ceres Seq. ID no. 12385786
  misc_feature (1)..(116): Homolog of NCBI NO: 7705477 NR Description: hypothetical protein HSPC152 [Homo sapiens]
  misc_feature (1)..(116): Homolog of NCBI NO: 12833869 NR Description: unnamed protein product [Mus musculus]
  misc_feature (1)..(115): Homolog of NCBI NO: 16740612 NR Description: RIKEN cDNA 0610038D11 gene [Mus musculus]
  misc_feature (1)..(116): Homolog of NCBI NO: 13385802 NR Description: RIKEN cDNA 0610038D11 [Mus musculus]
  misc_feature (1)..(117): Homolog of NCBI NO: 22535669 NR Description: contains ESTs
  misc_feature (1)..(116): Homolog of NCBI NO: 27661288 NR Description: similar to RIKEN cDNA 0610038D11
  misc_feature (1)..(117): Homolog of NCBI NO: 30725332 NR Description: At1g78190 [Arabidopsis thaliana]
  misc_feature (1)..(117): Homolog of NCBI NO: 15218237 NR Description: unknown protein; protein id: At1g78190.1
  misc_feature (1)..(117): Homolog of NCBI NO: 25518574 NR Description: hypothetical protein T16E15.11 - Arabidopsis
  misc_feature (1)..(117): Homolog of NCBI NO: 18395095 NR Description: Expressed protein

SEQ ID NO: 32358 - protein, 81 aa, Arabidopsis thaliana; identical to SEQ ID NO: 28768
  peptide (1)..(81): Ceres Seq. ID no. 12385787
  misc_feature (1)..(80): Homolog of NCBI NO: 7705477 NR Description: hypothetical protein HSPC152 [Homo sapiens]
  misc_feature (1)..(80): Homolog of NCBI NO: 12833869 NR Description: unnamed protein product [Mus musculus]
  misc_feature (1)..(79): Homolog of NCBI NO: 16740612 NR Description: RIKEN cDNA 0610038D11 gene [Mus musculus]
  misc_feature (1)..(80): Homolog of NCBI NO: 13385802 NR Description: RIKEN cDNA 0610038D11 [Mus musculus]
  misc_feature (1)..(81): Homolog of NCBI NO: 22535669 NR Description: contains ESTs
  misc_feature (1)..(80): Homolog of NCBI NO: 27661288 NR Description: similar to RIKEN cDNA 0610038D11
  misc_feature (1)..(81): Homolog of NCBI NO: 30725332 NR Description: At1g78190 [Arabidopsis thaliana]
  misc_feature (1)..(81): Homolog of NCBI NO: 15218237 NR Description: unknown protein; protein id: At1g78190.1
  misc_feature (1)..(81): Homolog of NCBI NO: 25518574 NR Description: hypothetical protein T16E15.11 - Arabidopsis
  misc_feature (1)..(81): Homolog of NCBI NO: 18395095 NR Description: Expressed protein

SEQ ID NO: 32359 - DNA, 503 bp, Arabidopsis thaliana; identical to SEQ ID NO: 28769
  misc_feature (1)..(503): Ceres Seq. ID no. 12322297
  misc_feature: MA Experiment ID: 108434 Result: Up-regulated in Transcription
  misc_feature: MA Experiment 108434 PARAMETER Experiment Name: At_Root_Tips_cDNA_P Parameter: Tissue Value: Root Tips
  misc_feature: MA Experiment ID: 108461 Result: Down-regulated in Transcription
  misc_feature: MA Experiment 108461 PARAMETER Experiment Name: At_Germinating_Seeds_cDNA_P Parameter: Age (day) Value: 1 vs. 0
  misc_feature: MA Experiment 108461 PARAMETER Experiment Name: At_Germinating_Seeds_cDNA_P Parameter: Tissue Value: Germinating Seeds
  misc_feature: MA Experiment ID: 108462 Result: Down-regulated in Transcription
  misc_feature: MA Experiment 108462 PARAMETER Experiment Name: At_Germinating_Seeds_cDNA_P Parameter: Age (day) Value: 2 vs. 0
  misc_feature: MA Experiment 108462 PARAMETER Experiment Name: At_Germinating_Seeds_cDNA_P Parameter: Tissue Value: Germinating Seeds
  misc_feature: MA Experiment ID: 108463 Result: Down-regulated in Transcription
  misc_feature: MA Experiment 108463 PARAMETER Experiment Name: At_Germinating_Seeds_cDNA_P Parameter: Age (day) Value: 3 vs. 0
  misc_feature: MA Experiment 108463 PARAMETER Experiment Name: At_Germinating_Seeds_cDNA_P Parameter: Tissue Value: Germinating Seeds
  misc_feature: MA Experiment ID: 108464 Result: Down-regulated in Transcription
  misc_feature: MA Experiment 108464 PARAMETER Experiment Name: At_Germinating_Seeds_cDNA_P Parameter: Age (day) Value: 4 vs. 0
  misc_feature: MA Experiment 108464 PARAMETER Experiment Name: At_Germinating_Seeds_cDNA_P Parameter: Tissue Value: Germinating Seeds
  misc_feature: MA Experiment ID: 108569 Result: Down-regulated in Transcription
  misc_feature: MA Experiment 108569 PARAMETER Experiment Name: At_0.001%_MeJA__cDNA_P Parameter: Timepoint (hr) Value: 6
  misc_feature: MA Experiment 108569 PARAMETER Experiment Name: At_0.001%_MeJA__cDNA_P Parameter: Tissue Value: Aerial
  misc_feature: MA Experiment 108569 PARAMETER Experiment Name: At_0.001%_MeJA__cDNA_P Parameter: Treatment Value: 0.001% MeJA vs. No Treatment
  misc_feature: MA Experiment ID: 108573 Result: Down-regulated in Transcription
  misc_feature: MA Experiment 108573 PARAMETER Experiment Name: At_Drought_cDNA_P Parameter: Timepoint (hr) Value: 6
  misc_feature: MA Experiment 108573 PARAMETER Experiment Name: At_Drought_cDNA_P Parameter: Tissue Value: Aerial
  misc_feature: MA Experiment 108573 PARAMETER Experiment Name: At_Drought_cDNA_P Parameter: Treatment Value: Drought vs. No Drought
  misc_feature: MA Experiment ID: 108577 Result: Down-regulated in Transcription
  misc_feature: MA Experiment 108577 PARAMETER Experiment Name: At_42deg_Heat_cDNA_P Parameter: Temperature (deg C) Value: 42 vs. 22
  misc_feature: MA Experiment 108577 PARAMETER Experiment Name: At_42deg_Heat_cDNA_P Parameter: Timepoint (hr) Value: 6
  misc_feature: MA Experiment 108577 PARAMETER Experiment Name: At_42deg_Heat_cDNA_P Parameter: Tissue Value: Aerial
  misc_feature: MA Experiment ID: 20000180 Result: Down-regulated in Transcription
  misc_feature: MA Experiment 20000180 PARAMETER Experiment Name: At_Germinating_Seeds_P Parameter: Age (hr) Value: 24 vs. 0
  misc_feature: MA Experiment 20000180 PARAMETER Experiment Name: At_Germinating_Seeds_P Parameter: Tissue Value: Germinating Seeds
  misc_feature: MA Experiment ID: 20000224 Result: Down-regulated in Transcription
  misc_feature: MA Experiment ID: 20000437 Result: Down-regulated in Transcription
  misc_feature: MA Experiment 20000437 PARAMETER Experiment Name: At_Drought_P Parameter: Age (day) Value: 8
  misc_feature: MA Experiment 20000437 PARAMETER Experiment Name: At_Drought_P Parameter: Organism Value: A. thaliana
  misc_feature: MA Experiment 20000437 PARAMETER Experiment Name: At_Drought_P Parameter: Plant Line Value: WS
  misc_feature: MA Experiment 20000437 PARAMETER Experiment Name: At_Drought_P Parameter: Timepoint (hr) Value: 24
  misc_feature: MA Experiment 20000437 PARAMETER Experiment Name: At_Drought_P Parameter: Tissue Value: Whole Plant
  misc_feature: MA Experiment 20000437 PARAMETER Experiment Name: At_Drought_P Parameter: Treatment Value: Drought vs. No Drought
  misc_feature: MA Experiment ID: 20000794 Result: Down-regulated in Transcription
  misc_feature: MA Experiment 20000794 PARAMETER Experiment Name: At_Petals_P Parameter: Age (day) Value: 23-25 days
  misc_feature: MA Experiment 20000794 PARAMETER Experiment Name: At_Petals_P Parameter: Plant Line Value: WS
  misc_feature: MA Experiment 20000794 PARAMETER Experiment Name: At_Petals_P Parameter: Tissue Value: Petals vs. Whole plant
  misc_feature: MA Experiment ID: 20001458 Result: Up-regulated in Transcription
  misc_feature: MA Experiment 20001458 PARAMETER Experiment Name: At_50mM_NH4NO3_L-to-H_P Parameter: Age (day) Value: Undefined
  misc_feature: MA Experiment 20001458 PARAMETER Experiment Name: At_50mM_NH4NO3_L-to-H_P Parameter: Organism Value: Undefined
  misc_feature: MA Experiment 20001458 PARAMETER Experiment Name: At_50mM_NH4NO3_L-to-H_P Parameter: Plant Line Value: Undefined
  misc_feature: MA Experiment 20001458 PARAMETER Experiment Name: At_50mM_NH4NO3_L-to-H_P Parameter: Timepoint (hr) Value: 2
  misc_feature: MA Experiment 20001458 PARAMETER Experiment Name: At_50mM_NH4NO3_L-to-H_P Parameter: Tissue Value: Siliques
  misc_feature: MA Experiment 20001458 PARAMETER Experiment Name: At_50mM_NH4NO3_L-to-H_P Parameter: Treatment Value: 50mM NH4NO3 vs. 100mM Manitol
  misc_feature: MA Experiment ID: 20001556 Result: Up-regulated in Transcription
  misc_feature: MA Experiment 20001556 PARAMETER Experiment Name: At_Drought_Soil_Dry_P Parameter: Age (day) Value: 26
  misc_feature: MA Experiment 20001556 PARAMETER Experiment Name: At_Drought_Soil_Dry_P Parameter: Organism Value: A. thaliana
  misc_feature: MA Experiment 20001556 PARAMETER Experiment Name: At_Drought_Soil_Dry_P Parameter: Plant Line Value: WS
  misc_feature: MA Experiment 20001556 PARAMETER Experiment Name: At_Drought_Soil_Dry_P Parameter: Post Timepoint (hr) Value: None
  misc_feature: MA Experiment 20001556 PARAMETER Experiment Name: At_Drought_Soil_Dry_P Parameter: Post-Treatment Value: None
  misc_feature: MA Experiment 20001556 PARAMETER Experiment Name: At_Drought_Soil_Dry_P Parameter: Timepoint (day) Value: 12
  misc_feature: MA Experiment 20001556 PARAMETER Experiment Name: At_Drought_Soil_Dry_P Parameter: Treatment Value: Drought vs. No Drought
  misc_feature: MA Experiment ID: 20001560 Result: Up-regulated in Transcription
  misc_feature: MA Experiment 20001560 PARAMETER Experiment Name: At_Drought_Soil_Dry_P Parameter: Age (day) Value: 28
  misc_feature: MA Experiment 20001560 PARAMETER Experiment Name: At_Drought_Soil_Dry_P Parameter: Organism Value: A. thaliana
  misc_feature: MA Experiment 20001560 PARAMETER Experiment Name: At_Drought_Soil_Dry_P Parameter: Plant Line Value: WS
  misc_feature: MA Experiment 20001560 PARAMETER Experiment Name: At_Drought_Soil_Dry_P Parameter: Post Timepoint (hr) Value: None
  misc_feature: MA Experiment 20001560 PARAMETER Experiment Name: At_Drought_Soil_Dry_P Parameter: Post-Treatment Value: None
  misc_feature: MA Experiment 20001560 PARAMETER Experiment Name: At_Drought_Soil_Dry_P Parameter: Timepoint (day) Value: 14
  misc_feature: MA Experiment 20001560 PARAMETER Experiment Name: At_Drought_Soil_Dry_P Parameter: Treatment Value: Drought vs. No Drought
  misc_feature: MA Experiment ID: 20001757 Result: Up-regulated in Transcription
  misc_feature: MA Experiment 20001757 PARAMETER Experiment Name: At_50mM_NH4NO3_L-to-H_P Parameter: Timepoint (hr) Value: 6
  misc_feature: MA Experiment 20001757 PARAMETER Experiment Name: At_50mM_NH4NO3_L-to-H_P Parameter: Tissue Value: Leaf
  misc_feature: MA Experiment 20001757 PARAMETER Experiment Name: At_50mM_NH4NO3_L-to-H_P Parameter: Treatment Value: 50mM NH4NO3 vs 100mM Mannitol

SEQ ID NO: 32360 - protein, 95 aa, Arabidopsis thaliana [sequence omitted]

SEQ ID NO: 32361 - protein, 65 aa, Arabidopsis thaliana; identical to SEQ ID NO: 28771
  peptide (1)..(65): Ceres Seq. ID no. 12322299

SEQ ID NO: 32362 - DNA, 1029 bp, Arabidopsis thaliana; identical to SEQ ID NO: 28772
  misc_feature (1)..(1029): Ceres Seq. ID no. 13486649
  misc_feature: MA Experiment ID: 108501 Result: Down-regulated in Transcription
  misc_feature: MA Experiment 108501 PARAMETER Experiment Name: At_ap2_floral_buds_cDNA_P Parameter: Plant Line Value: ap2 (Ler.)
  misc_feature: MA Experiment 108501 PARAMETER Experiment Name: At_ap2_floral_buds_cDNA_P Parameter: Tissue Value: Closed Flower
  misc_feature: MA Experiment ID: 108595 Result: Up-regulated in Transcription
  misc_feature: MA Experiment 108595 PARAMETER Experiment Name: At_Ler-pi_Ovule_cDNA_P Parameter: Plant Line Value: null
  misc_feature: MA Experiment ID: 20000171 Result: Up-regulated in Transcription
  misc_feature: MA Experiment 20000171 PARAMETER Experiment Name: At_42deg_Heat_P Parameter: Age (day) Value: 14
  misc_feature: MA Experiment 20000171 PARAMETER Experiment Name: At_42deg_Heat_P Parameter: Organism Value: A. thaliana
  misc_feature: MA Experiment 20000171 PARAMETER Experiment Name: At_42deg_Heat_P Parameter: Plant Line Value: WS
  misc_feature: MA Experiment 20000171 PARAMETER Experiment Name: At_42deg_Heat_P Parameter: Temperature (deg C) Value: 42 vs. 22
  misc_feature: MA Experiment 20000171 PARAMETER Experiment Name: At_42deg_Heat_P Parameter: Timepoint (hr) Value: 1
  misc_feature: MA Experiment 20000171 PARAMETER Experiment Name: At_42deg_Heat_P Parameter: Tissue Value: Aerial

SEQ ID NO: 32363 - protein, 239 aa, Arabidopsis thaliana; identical to SEQ ID NO: 28773
  peptide (1)..(239): Ceres Seq. ID no. 13486650
  misc_feature (9)..(98): Pfam Name: MtN3/saliva family Pfam Description: MtN3/saliva family
  misc_feature (1)..(210): Homolog of NCBI NO: 10177463 NR Description: contains similarity to MtN3
  misc_feature (29)..(235): Homolog of NCBI NO: 7486148 NR Description: hypothetical protein F25I24.60 - Arabidopsis
  misc_feature (7)..(220): Homolog of NCBI NO: 15219732 NR Description: nodulin MtN3 family protein [Arabidopsis
  misc_feature (1)..(234): Homolog of NCBI NO: 21592355 NR Description: contains similarity to nodulin MtN3 protein
  misc_feature (1)..(234): Homolog of NCBI NO: 18405611 NR Description: nodulin MtN3 family protein [Arabidopsis
  misc_feature (7)..(235): Homolog of NCBI NO: 18413388 NR Description: nodulin MtN3 family protein [Arabidopsis
  misc_feature (1)..(233): Homolog of NCBI NO: 34912462 NR Description: MtN3-like protein [Oryza sativa (japonica
  misc_feature (1)..(233): Homolog of NCBI NO: 34912454 NR Description: P0681B11.31 [Oryza sativa (japonica
  misc_feature (28)..(239): Homolog of NCBI NO: 10177513 NR Description: contains similarity to MtN3~gene_id:MSN9.17
  misc_feature (1)..(239): Homolog of NCBI NO: 18421965 NR Description: nodulin MtN3 family protein [Arabidopsis

SEQ ID NO: 32364 - protein, 188 aa, Arabidopsis thaliana; identical to SEQ ID NO: 28774
  peptide (1)..(188): Ceres Seq. ID no. 13486651
  misc_feature (1)..(159): Homolog of NCBI NO: 10177463 NR Description: contains similarity to MtN3
  misc_feature (1)..(184): Homolog of NCBI NO: 7486148 NR Description: hypothetical protein F25I24.60 - Arabidopsis
  misc_feature (1)..(169): Homolog of NCBI NO: 15219732 NR Description: nodulin MtN3 family protein [Arabidopsis
  misc_feature (1)..(183): Homolog of NCBI NO: 21592355 NR Description: contains similarity to nodulin MtN3 protein
  misc_feature (1)..(183): Homolog of NCBI NO: 18405611 NR Description: nodulin MtN3 family protein [Arabidopsis
  misc_feature (1)..(184): Homolog of NCBI NO: 18413388 NR Description: nodulin MtN3 family protein [Arabidopsis
  misc_feature (1)..(182): Homolog of NCBI NO: 34912462 NR Description: MtN3-like protein [Oryza sativa (japonica
  misc_feature (1)..(182): Homolog of NCBI NO: 34912454 NR Description: P0681B11.31 [Oryza sativa (japonica
  misc_feature (1)..(188): Homolog of NCBI NO: 10177513 NR Description: contains similarity to MtN3~gene_id:MSN9.17
  misc_feature (1)..(188): Homolog of NCBI NO: 18421965 NR Description: nodulin MtN3 family protein [Arabidopsis

SEQ ID NO: 32365 - protein, 185 aa, Arabidopsis thaliana; identical to SEQ ID NO: 28775
  peptide (1)..(185): Ceres Seq. ID no. 13486652
  misc_feature (1)..(156): Homolog of NCBI NO: 10177463 NR Description: contains similarity to MtN3
  misc_feature (1)..(181): Homolog of NCBI NO: 7486148 NR Description: hypothetical protein F25I24.60 - Arabidopsis
  misc_feature (1)..(166): Homolog of NCBI NO: 15219732 NR Description: nodulin MtN3 family protein [Arabidopsis
  misc_feature (1)..(180): Homolog of NCBI NO: 21592355 NR Description: contains similarity to nodulin MtN3 protein
  misc_feature (1)..(180): Homolog of NCBI NO: 18405611 NR Description: nodulin MtN3 family protein [Arabidopsis
  misc_feature (1)..(181): Homolog of NCBI NO: 18413388 NR Description: nodulin MtN3 family protein [Arabidopsis
  misc_feature (1)..(179): Homolog of NCBI NO: 34912462 NR Description: MtN3-like protein [Oryza sativa (japonica
  misc_feature (1)..(179): Homolog of NCBI NO: 34912454 NR Description: P0681B11.31 [Oryza sativa (japonica
  misc_feature (1)..(185): Homolog of NCBI NO: 10177513 NR Description: contains similarity to MtN3~gene_id:MSN9.17
  misc_feature (1)..(185): Homolog of NCBI NO: 18421965 NR Description: nodulin MtN3 family protein [Arabidopsis

SEQ ID NO: 32366 - DNA, 1221 bp, Arabidopsis thaliana; identical to SEQ ID NO: 28776
  misc_feature (1)..(1221): Ceres Seq. ID no. 12396606
  misc_feature: MA Experiment ID: 108434 Result: Down-regulated in Transcription
  misc_feature: MA Experiment 108434 PARAMETER Experiment Name: At_Root_Tips_cDNA_P Parameter: Tissue Value: Root Tips
  misc_feature: MA Experiment ID: 108569 Result: Up-regulated in Transcription
  misc_feature: MA Experiment 108569 PARAMETER Experiment Name: At_0.001%_MeJA__cDNA_P Parameter: Timepoint (hr) Value: 6
  misc_feature: MA Experiment 108569 PARAMETER Experiment Name: At_0.001%_MeJA__cDNA_P Parameter: Tissue Value: Aerial
  misc_feature: MA Experiment 108569 PARAMETER Experiment Name: At_0.001%_MeJA__cDNA_P Parameter: Treatment Value: 0.001% MeJA vs. No Treatment
  misc_feature: MA Experiment ID: 108572 Result: Up-regulated in Transcription
  misc_feature: MA Experiment 108572 PARAMETER Experiment Name: At_Drought_cDNA_P Parameter: Timepoint (hr) Value: 1
  misc_feature: MA Experiment 108572 PARAMETER Experiment Name: At_Drought_cDNA_P Parameter: Tissue Value: Aerial
  misc_feature: MA Experiment 108572 PARAMETER Experiment Name: At_Drought_cDNA_P Parameter: Treatment Value: Drought vs. No Drought
  misc_feature: MA Experiment ID: 108573 Result: Up-regulated in Transcription
  misc_feature: MA Experiment 108573 PARAMETER Experiment Name: At_Drought_cDNA_P Parameter: Timepoint (hr) Value: 6
  misc_feature: MA Experiment 108573 PARAMETER Experiment Name: At_Drought_cDNA_P Parameter: Tissue Value: Aerial
  misc_feature: MA Experiment 108573 PARAMETER Experiment Name: At_Drought_cDNA_P Parameter: Treatment Value: Drought vs. No Drought
  misc_feature: MA Experiment ID: 108576 Result: Up-regulated in Transcription
  misc_feature: MA Experiment 108576 PARAMETER Experiment Name: At_42deg_Heat_cDNA_P Parameter: Temperature (deg C) Value: 42 vs. 22
  misc_feature: MA Experiment 108576 PARAMETER Experiment Name: At_42deg_Heat_cDNA_P Parameter: Timepoint (hr) Value: 1
  misc_feature: MA Experiment 108576 PARAMETER Experiment Name: At_42deg_Heat_cDNA_P Parameter: Tissue Value: Aerial
  misc_feature: MA Experiment ID: 108577 Result: Up-regulated in Transcription
  misc_feature: MA Experiment 108577 PARAMETER Experiment Name: At_42deg_Heat_cDNA_P Parameter: Temperature (deg C) Value: 42 vs. 22
  misc_feature: MA Experiment 108577 PARAMETER Experiment Name: At_42deg_Heat_cDNA_P Parameter: Timepoint (hr) Value: 6
  misc_feature: MA Experiment 108577 PARAMETER Experiment Name: At_42deg_Heat_cDNA_P Parameter: Tissue Value: Aerial
  misc_feature: MA Experiment ID: 108585 Result: Up-regulated in Transcription
  misc_feature: MA Experiment 108585 PARAMETER Experiment Name: At_5mM_NaNP_cDNA_P Parameter: Timepoint (hr) Value: 6
  misc_feature: MA Experiment 108585 PARAMETER Experiment Name: At_5mM_NaNP_cDNA_P Parameter: Tissue Value: Aerial
  misc_feature: MA Experiment 108585 PARAMETER Experiment Name: At_5mM_NaNP_cDNA_P Parameter: Treatment Value: null
  misc_feature: MA Experiment ID: 108595 Result: Up-regulated in Transcription
  misc_feature: MA Experiment 108595 PARAMETER Experiment Name: At_Ler-pi_Ovule_cDNA_P Parameter: Plant Line Value: null
  misc_feature: MA Experiment ID: 20000072 Result: Down-regulated in Transcription
  misc_feature: MA Experiment 20000072 PARAMETER Experiment Name: At_100uM_ABA_Mutants_cDNA_P Parameter: Plant Line Value: CS8105
  misc_feature: MA Experiment 20000072 PARAMETER Experiment Name: At_100uM_ABA_Mutants_cDNA_P Parameter: Timepoint (hr) Value: 6
  misc_feature: MA Experiment 20000072 PARAMETER Experiment Name: At_100uM_ABA_Mutants_cDNA_P Parameter: Tissue Value: Aerial
  misc_feature: MA Experiment 20000072 PARAMETER Experiment Name: At_100uM_ABA_Mutants_cDNA_P Parameter: Treatment Value: 100uM ABA vs. No Treatment
  misc_feature: MA Experiment ID: 20000087 Result: Down-regulated in Transcription
  misc_feature: MA Experiment 20000087 PARAMETER Experiment Name: At_100uM_ABA_Mutants_cDNA_P Parameter: Plant Line Value: WS
  misc_feature: MA Experiment 20000087 PARAMETER Experiment Name: At_100uM_ABA_Mutants_cDNA_P Parameter: Timepoint (hr) Value: 6
  misc_feature: MA Experiment 20000087 PARAMETER Experiment Name: At_100uM_ABA_Mutants_cDNA_P Parameter: Tissue Value: Aerial
  misc_feature: MA Experiment 20000087 PARAMETER Experiment Name: At_100uM_ABA_Mutants_cDNA_P Parameter: Treatment Value: 100uM ABA vs. No Treatment
  misc_feature: MA Experiment ID: 20000090 Result: Down-regulated in Transcription
  misc_feature: MA Experiment ID: 20000111 Result: Up-regulated in Transcription
  misc_feature: MA Experiment 20000111 PARAMETER Experiment Name: At_42deg_Heat_cDNA_P Parameter: Temperature (deg C) Value: 42 vs. 22
  misc_feature: MA Experiment 20000111 PARAMETER Experiment Name: At_42deg_Heat_cDNA_P Parameter: Timepoint (hr) Value: 6
  misc_feature: MA Experiment 20000111 PARAMETER Experiment Name: At_42deg_Heat_cDNA_P Parameter: Tissue Value: Aerial
  misc_feature: MA Experiment ID: 20000113 Result: Up-regulated in Transcription
  misc_feature: MA Experiment 20000113 PARAMETER Experiment Name: At_42deg_Heat_cDNA_P Parameter: Temperature (deg C) Value: 42 vs. 22
  misc_feature: MA Experiment 20000113 PARAMETER Experiment Name: At_42deg_Heat_cDNA_P Parameter: Timepoint (hr) Value: 8
  misc_feature: MA Experiment 20000113 PARAMETER Experiment Name: At_42deg_Heat_cDNA_P Parameter: Tissue Value: Aerial
  misc_feature: MA Experiment ID: 20000173 Result: Up-regulated in Transcription
  misc_feature: MA Experiment 20000173 PARAMETER Experiment Name: At_42deg_Heat_P Parameter: Age (day) Value: 14
  misc_feature: MA Experiment 20000173 PARAMETER Experiment Name: At_42deg_Heat_P Parameter: Organism Value: A. thaliana
  misc_feature: MA Experiment 20000173 PARAMETER Experiment Name: At_42deg_Heat_P Parameter: Plant Line Value: WS
  misc_feature: MA Experiment 20000173 PARAMETER Experiment Name: At_42deg_Heat_P Parameter: Temperature (deg C) Value: 42 vs. 22
  misc_feature: MA Experiment 20000173 PARAMETER Experiment Name: At_42deg_Heat_P Parameter: Timepoint (hr) Value: 6
  misc_feature: MA Experiment 20000173 PARAMETER Experiment Name: At_42deg_Heat_P Parameter: Tissue Value: Aerial
  misc_feature: MA Experiment ID: 20000184 Result: Up-regulated in Transcription
  misc_feature: MA Experiment 20000184 PARAMETER Experiment Name: At_Shoots__P Parameter: Age (day) Value: 7
  misc_feature: MA Experiment 20000184 PARAMETER Experiment Name: At_Shoots__P Parameter: Tissue Value: Shoots vs. Whole Plant
  misc_feature: MA Experiment ID: 20000185 Result: Down-regulated in Transcription
  misc_feature: MA Experiment 20000185 PARAMETER Experiment Name: At_Roots__P Parameter: Age (day) Value: 7 vs. 21
  misc_feature: MA Experiment 20000185 PARAMETER Experiment Name: At_Roots__P Parameter: Organism Value: A. thaliana
  misc_feature: MA Experiment 20000185 PARAMETER Experiment Name: At_Roots__P Parameter: Tissue Value: Roots vs. Whole Plant
  misc_feature: MA Experiment ID: 20000234 Result: Up-regulated in Transcription
  misc_feature: MA Experiment 20000234 PARAMETER Experiment Name: At_Siliques_P Parameter: Age (day) Value: 21
  misc_feature: MA Experiment 20000234 PARAMETER Experiment Name: At_Siliques_P Parameter: Organism Value: A. thaliana
  misc_feature: MA Experiment 20000234 PARAMETER Experiment Name: At_Siliques_P Parameter: Plant Line Value: WS
  misc_feature: MA Experiment 20000234 PARAMETER Experiment Name: At_Siliques_P Parameter: Tissue Value: Less Than 5mm Siliques vs. Whole Plant
  misc_feature: MA Experiment ID: 20000264 Result: Up-regulated in Transcription
  misc_feature: MA Experiment 20000264 PARAMETER Experiment Name: At_Open_Flower_P Parameter: Age (day) Value: 21
  misc_feature: MA Experiment 20000264 PARAMETER Experiment Name: At_Open_Flower_P Parameter: Plant Line Value: WS
  misc_feature: MA Experiment 20000264 PARAMETER Experiment Name: At_Open_Flower_P Parameter: Tissue Value: Open Flower vs. Whole Plant
  misc_feature: MA Experiment ID: 20000265 Result: Up-regulated in Transcription
  misc_feature: MA Experiment 20000265 PARAMETER Experiment Name: At_Open_Flower_P Parameter: Age (day) Value: 21
  misc_feature: MA Experiment 20000265 PARAMETER Experiment Name: At_Open_Flower_P Parameter: Plant Line Value: WS
  misc_feature: MA Experiment 20000265 PARAMETER Experiment Name: At_Open_Flower_P Parameter: Tissue Value: Closed Flower vs. Whole Plant
  misc_feature: MA Experiment ID: 20000267 Result: Up-regulated in Transcription
  misc_feature: MA Experiment 20000267 PARAMETER Experiment Name: At_Drought_P Parameter: Age (day) Value: 7
  misc_feature: MA Experiment 20000267 PARAMETER Experiment Name: At_Drought_P Parameter: Organism Value: A. thaliana
  misc_feature: MA Experiment 20000267 PARAMETER Experiment Name: At_Drought_P Parameter: Plant Line Value: WS
  misc_feature: MA Experiment 20000267 PARAMETER Experiment Name: At_Drought_P Parameter: Timepoint (hr) Value: 6
  misc_feature: MA Experiment 20000267 PARAMETER Experiment Name: At_Drought_P Parameter: Tissue Value: Whole Plant
  misc_feature: MA Experiment 20000267 PARAMETER Experiment Name: At_Drought_P Parameter: Treatment Value: Drought vs. No Drought
  misc_feature: MA Experiment ID: 20000286 Result: Up-regulated in Transcription
  misc_feature: MA Experiment 20000286 PARAMETER Experiment Name: At_Open_Flower_P Parameter: Age (day) Value: 21
  misc_feature: MA Experiment 20000286 PARAMETER Experiment Name: At_Open_Flower_P Parameter: Plant Line Value: WS
  misc_feature: MA Experiment 20000286 PARAMETER Experiment Name: At_Open_Flower_P Parameter: Tissue Value: Half Open vs. Whole Plant
  misc_feature: MA Experiment ID: 20000436 Result: Up-regulated in Transcription
  misc_feature: MA Experiment 20000436 PARAMETER Experiment Name: At_Drought_P Parameter: Age (day) Value: 7
  misc_feature: MA Experiment 20000436 PARAMETER Experiment Name: At_Drought_P Parameter: Organism Value: A. thaliana
  misc_feature: MA Experiment 20000436 PARAMETER Experiment Name: At_Drought_P Parameter: Plant Line Value: WS
  misc_feature: MA Experiment 20000436 PARAMETER Experiment Name: At_Drought_P Parameter: Timepoint (hr) Value: 12
  misc_feature: MA Experiment 20000436 PARAMETER Experiment Name: At_Drought_P Parameter: Tissue Value: Whole Plant
  misc_feature: MA Experiment 20000436 PARAMETER Experiment Name: At_Drought_P Parameter: Treatment Value: Drought vs. No Drought
  misc_feature: MA Experiment ID: 20000437 Result: Up-regulated in Transcription
  misc_feature: MA Experiment 20000437 PARAMETER Experiment Name: At_Drought_P Parameter: Age (day) Value: 8
  misc_feature: MA Experiment 20000437 PARAMETER Experiment Name: At_Drought_P Parameter: Organism Value: A. thaliana
  misc_feature: MA Experiment 20000437 PARAMETER Experiment Name: At_Drought_P Parameter: Plant Line Value: WS
  misc_feature: MA Experiment 20000437 PARAMETER Experiment Name: At_Drought_P Parameter: Timepoint (hr) Value: 24
  misc_feature: MA Experiment 20000437 PARAMETER Experiment Name: At_Drought_P Parameter: Tissue Value: Whole Plant
  misc_feature: MA Experiment 20000437 PARAMETER Experiment Name: At_Drought_P Parameter: Treatment Value: Drought vs. No Drought
  misc_feature: MA Experiment ID: 20000451 Result: Up-regulated in Transcription
  misc_feature: MA Experiment 20000451 PARAMETER Experiment Name: At_CS6879_Shoots-Roots_P Parameter: Age (day) Value: 14
  misc_feature: MA Experiment 20000451 PARAMETER Experiment Name: At_CS6879_Shoots-Roots_P Parameter: Organism Value: A. thaliana
  misc_feature: MA Experiment 20000451 PARAMETER Experiment Name: At_CS6879_Shoots-Roots_P Parameter: Plant Line Value: CS6879 vs. WS
  misc_feature: MA Experiment 20000451 PARAMETER Experiment Name: At_CS6879_Shoots-Roots_P Parameter: Tissue Value: Roots
  misc_feature: MA Experiment ID: 20000495 Result: Up-regulated in Transcription
  misc_feature: MA Experiment 20000495 PARAMETER Experiment Name: At_Guard_Cells_P Parameter: Harvest Date Value: 8/2/2002
  misc_feature: MA Experiment 20000495 PARAMETER Experiment Name: At_Guard_Cells_P Parameter: Organism Value: A. thaliana
  misc_feature: MA Experiment 20000495 PARAMETER Experiment Name: At_Guard_Cells_P Parameter: Tissue Value: Guard Cells vs. Leaves
  misc_feature: MA Experiment ID: 20000496 Result: Up-regulated in Transcription
  misc_feature: MA Experiment 20000496 PARAMETER Experiment Name: At_Guard_Cells_P Parameter: Harvest Date Value: 7/19/2002
  misc_feature: MA Experiment 20000496 PARAMETER Experiment Name: At_Guard_Cells_P Parameter: Organism Value: Canola
  misc_feature: MA Experiment 20000496 PARAMETER Experiment Name: At_Guard_Cells_P Parameter: Tissue Value: Guard Cells vs. Leaves
  misc_feature: MA Experiment ID: 20001248 Result: Down-regulated in Transcription
  misc_feature: MA Experiment 20001248 PARAMETER Experiment Name: At_Far-red-induction_P Parameter: Age (day) Value: 7
  misc_feature: MA Experiment 20001248 PARAMETER Experiment Name: At_Far-red-induction_P Parameter: Light Value: Far-red vs. White
  misc_feature: MA Experiment 20001248 PARAMETER Experiment Name: At_Far-red-induction_P Parameter: Organism Value: A. thaliana
  misc_feature: MA Experiment 20001248 PARAMETER Experiment Name: At_Far-red-induction_P Parameter: Plant Line Value: Columbia
  misc_feature: MA Experiment 20001248 PARAMETER Experiment Name: At_Far-red-induction_P Parameter: Timepoint (hr) Value: 4
  misc_feature: MA Experiment 20001248 PARAMETER Experiment Name: At_Far-red-induction_P Parameter: Tissue Value: Whole Plant
  misc_feature: MA Experiment ID: 20001554 Result: Up-regulated in Transcription
  misc_feature: MA Experiment 20001554 PARAMETER Experiment Name: At_Drought_Soil_Dry_P Parameter: Age (day) Value: 21
  misc_feature: MA Experiment 20001554 PARAMETER Experiment Name: At_Drought_Soil_Dry_P Parameter: Organism Value: A. thaliana
  misc_feature: MA Experiment 20001554 PARAMETER Experiment Name: At_Drought_Soil_Dry_P Parameter: Plant Line Value: WS
  misc_feature: MA Experiment 20001554 PARAMETER Experiment Name: At_Drought_Soil_Dry_P Parameter: Post Timepoint (hr) Value: None
  misc_feature: MA Experiment 20001554 PARAMETER Experiment Name: At_Drought_Soil_Dry_P Parameter: Post-Treatment Value: None
  misc_feature: MA Experiment 20001554 PARAMETER Experiment Name: At_Drought_Soil_Dry_P Parameter: Timepoint (day) Value: 7
  misc_feature: MA Experiment 20001554 PARAMETER Experiment Name: At_Drought_Soil_Dry_P Parameter: Treatment Value: Drought vs. No Drought
  misc_feature: MA Experiment ID: 20001555 Result: Up-regulated in Transcription
  misc_feature: MA Experiment 20001555 PARAMETER Experiment Name: At_Drought_Soil_Dry_P Parameter: Age (day) Value: 24
  misc_feature: MA Experiment 20001555 PARAMETER Experiment Name: At_Drought_Soil_Dry_P Parameter: Organism Value: A. thaliana
  misc_feature: MA Experiment 20001555 PARAMETER Experiment Name: At_Drought_Soil_Dry_P Parameter: Plant Line Value: WS
  misc_feature: MA Experiment 20001555 PARAMETER Experiment Name: At_Drought_Soil_Dry_P Parameter: Post Timepoint (hr) Value: None
  misc_feature: MA Experiment 20001555 PARAMETER Experiment Name: At_Drought_Soil_Dry_P Parameter: Post-Treatment Value: None
  misc_feature: MA Experiment 20001555 PARAMETER Experiment Name: At_Drought_Soil_Dry_P Parameter: Timepoint (day) Value: 10
  misc_feature: MA Experiment 20001555 PARAMETER Experiment Name: At_Drought_Soil_Dry_P Parameter: Treatment Value: Drought vs. No Drought
  misc_feature: MA Experiment ID: 20001556 Result: Up-regulated in Transcription
  misc_feature: MA Experiment 20001556 PARAMETER Experiment Name: At_Drought_Soil_Dry_P Parameter: Age (day) Value: 26
  misc_feature: MA Experiment 20001556 PARAMETER Experiment Name: At_Drought_Soil_Dry_P Parameter: Organism Value: A. thaliana
  misc_feature: MA Experiment 20001556 PARAMETER Experiment Name: At_Drought_Soil_Dry_P Parameter: Plant Line Value: WS
  misc_feature: MA Experiment 20001556 PARAMETER Experiment Name: At_Drought_Soil_Dry_P Parameter: Post Timepoint (hr) Value: None
  misc_feature: MA Experiment 20001556 PARAMETER Experiment Name: At_Drought_Soil_Dry_P Parameter: Post-Treatment Value: None
  misc_feature: MA Experiment 20001556 PARAMETER Experiment Name: At_Drought_Soil_Dry_P Parameter: Timepoint (day) Value: 12
  misc_feature: MA Experiment 20001556 PARAMETER Experiment Name: At_Drought_Soil_Dry_P Parameter: Treatment Value: Drought vs. No Drought
  misc_feature: MA Experiment ID: 20001559 Result: Up-regulated in Transcription
  misc_feature: MA Experiment 20001559 PARAMETER Experiment Name: At_Drought_Soil_Dry_P Parameter: Age (day) Value: 28
  misc_feature: MA Experiment 20001559 PARAMETER Experiment Name: At_Drought_Soil_Dry_P Parameter: Organism Value: A. thaliana
  misc_feature: MA Experiment 20001559 PARAMETER Experiment Name: At_Drought_Soil_Dry_P Parameter: Plant Line Value: WS
  misc_feature: MA Experiment 20001559 PARAMETER Experiment Name: At_Drought_Soil_Dry_P Parameter: Post Timepoint (hr) Value: 29
  misc_feature: MA Experiment 20001559 PARAMETER Experiment Name: At_Drought_Soil_Dry_P Parameter: Post-Treatment Value: Re-Water vs. No Drought
  misc_feature: MA Experiment 20001559 PARAMETER Experiment Name: At_Drought_Soil_Dry_P Parameter: Timepoint (day) Value: 14
  misc_feature: MA Experiment 20001559 PARAMETER Experiment Name: At_Drought_Soil_Dry_P Parameter: Treatment Value: Drought vs. No Drought
  misc_feature: MA Experiment ID: 20001560 Result: Up-regulated in Transcription
  misc_feature: MA Experiment 20001560 PARAMETER Experiment Name: At_Drought_Soil_Dry_P Parameter: Age (day) Value: 28
  misc_feature: MA Experiment 20001560 PARAMETER Experiment Name: At_Drought_Soil_Dry_P Parameter: Organism Value: A. thaliana
  misc_feature: MA Experiment 20001560 PARAMETER Experiment Name: At_Drought_Soil_Dry_P Parameter: Plant Line Value: WS
  misc_feature: MA Experiment 20001560 PARAMETER Experiment Name: At_Drought_Soil_Dry_P Parameter: Post Timepoint (hr) Value: None
  misc_feature: MA Experiment 20001560 PARAMETER Experiment Name: At_Drought_Soil_Dry_P Parameter: Post-Treatment Value: None
  misc_feature: MA Experiment 20001560 PARAMETER Experiment Name: At_Drought_Soil_Dry_P Parameter: Timepoint (day) Value: 14
  misc_feature: MA Experiment 20001560 PARAMETER Experiment Name: At_Drought_Soil_Dry_P Parameter: Treatment Value: Drought vs. No Drought
  misc_feature: MA Experiment ID: 20001904 Result: Up-regulated in Transcription
  misc_feature: MA Experiment 20001904 PARAMETER Experiment Name: At_Drought_Reproduction_P Parameter: Age (day) Value: 37
  misc_feature: MA Experiment 20001904 PARAMETER Experiment Name: At_Drought_Reproduction_P Parameter: Organism Value: A. thaliana
  misc_feature: MA Experiment 20001904 PARAMETER Experiment Name: At_Drought_Reproduction_P Parameter: Plant Line Value: WS
  misc_feature: MA Experiment 20001904 PARAMETER Experiment Name: At_Drought_Reproduction_P Parameter: Timepoint (day) Value: 7
  misc_feature: MA Experiment 20001904 PARAMETER Experiment Name: At_Drought_Reproduction_P Parameter: Tissue Value: Rosettes
  misc_feature: MA Experiment 20001904 PARAMETER Experiment Name: At_Drought_Reproduction_P Parameter: Treatment Value: Drought vs. No Drought
  misc_feature: MA Experiment ID: 20001905 Result: Up-regulated in Transcription
  misc_feature: MA Experiment 20001905 PARAMETER Experiment Name: At_Drought_Reproduction_P Parameter: Age (day) Value: 40
  misc_feature: MA Experiment 20001905 PARAMETER Experiment Name: At_Drought_Reproduction_P Parameter: Organism Value: A. thaliana
  misc_feature: MA Experiment 20001905 PARAMETER Experiment Name: At_Drought_Reproduction_P Parameter: Plant Line Value: WS
  misc_feature: MA Experiment 20001905 PARAMETER Experiment Name: At_Drought_Reproduction_P Parameter: Timepoint (day) Value: 10
  misc_feature: MA Experiment 20001905 PARAMETER Experiment Name: At_Drought_Reproduction_P Parameter: Tissue Value: Rosettes
  misc_feature: MA Experiment 20001905 PARAMETER Experiment Name: At_Drought_Reproduction_P Parameter: Treatment Value: Drought vs. No Drought
  misc_feature: Phenotype: ROSETTE LEAVES Other
  misc_feature: Phenotype: ROSETTE LEAVES Curled-Curled 2
  misc_feature: Phenotype: ROSETTE LEAVES Curled-Curled 2

SEQ ID NO: 32367 - protein, 286 aa, Arabidopsis thaliana; identical to SEQ ID NO: 28777
  peptide (1)..(286): Ceres Seq. ID no. 12396607
  misc_feature (30)..(265): Pfam Name: Major intrinsic protein Pfam Description: Major intrinsic protein
  misc_feature (1)..(282): Homolog of NCBI NO: 28395418 NR Description: plasma intrinsic protein 2,1 [Juglans regia]
  misc_feature (1)..(286): Homolog of NCBI NO: 5081421 NR Description: plasma membrane intrinsic protein 1 [Brassica
  misc_feature (1)..(286): Homolog of NCBI NO: 28395420 NR Description: plasma intrinsic protein 2,2 [Juglans regia]
  misc_feature (1)..(282): Homolog of NCBI NO: 13486938 NR Description: plasma membrane intrinsic protein 2-1 [Pyrus
  misc_feature (1)..(282): Homolog of NCBI NO: 7441275 NR Description: mipC protein - common ice plant
  misc_feature (1)..(282): Homolog of NCBI NO: 17940746 NR Description: aquaporin-like protein [Petunia x hybrida]
  misc_feature (1)..(286): Homolog of NCBI NO: 8071620 NR Description: putative aquaporin PIP2-1 [Vitis berlandieri x
  misc_feature (1)..(286): Homolog of NCBI NO: 3158476 NR Description: aquaporin 2 [Samanea saman]
  misc_feature (1)..(286): Homolog of NCBI NO: 13486942 NR Description: plasma membrane intrinsic protein 2-2 [Pyrus
  misc_feature (1)..(286): Homolog of NCBI NO: 15233102 NR Description: aquaporin/MIP - like protein

SEQ ID NO: 32368 - protein, 231 aa, Arabidopsis thaliana; identical to SEQ ID NO: 28778
  peptide (1)..(231): Ceres Seq. ID no. 12396608
  misc_feature (1)..(210): Pfam Name: Major intrinsic protein Pfam Description: Major intrinsic protein
  misc_feature (1)..(227): Homolog of NCBI NO: 28395418 NR Description: plasma intrinsic protein 2,1 [Juglans regia]
  misc_feature (1)..(231): Homolog of NCBI NO: 5081421 NR Description: plasma membrane intrinsic protein 1 [Brassica
  misc_feature (1)..(231): Homolog of NCBI NO: 28395420 NR Description: plasma intrinsic protein 2,2 [Juglans regia]
  misc_feature (1)..(227): Homolog of NCBI NO: 13486938 NR Description: plasma membrane intrinsic protein 2-1 [Pyrus
  misc_feature (1)..(227): Homolog of NCBI NO: 7441275 NR Description: mipC protein - common ice plant
  misc_feature (1)..(227): Homolog of NCBI NO: 17940746 NR Description: aquaporin-like protein [Petunia x hybrida]
  misc_feature (1)..(231): Homolog of NCBI NO: 8071620 NR Description: putative aquaporin PIP2-1 [Vitis berlandieri x
  misc_feature (1)..(231): Homolog of NCBI NO: 3158476 NR Description: aquaporin 2 [Samanea saman]
  misc_feature (1)..(231): Homolog of NCBI NO: 13486942 NR Description: plasma membrane intrinsic protein 2-2 [Pyrus
  misc_feature (1)..(231): Homolog of NCBI NO: 15233102 NR Description: aquaporin/MIP - like protein

SEQ ID NO: 32369 - protein, 198 aa, Arabidopsis thaliana; identical to SEQ ID NO: 28779
  peptide (1)..(198): Ceres Seq. ID no. 12396609
  misc_feature (1)..(177): Pfam Name: Major intrinsic protein Pfam Description: Major intrinsic protein
  misc_feature (1)..(194): Homolog of NCBI NO: 28395418 NR Description: plasma intrinsic protein 2,1 [Juglans regia]
  misc_feature (1)..(198): Homolog of NCBI NO: 5081421 NR Description: plasma membrane intrinsic protein 1 [Brassica
  misc_feature (1)..(198): Homolog of NCBI NO: 28395420 NR Description: plasma intrinsic protein 2,2 [Juglans regia]
  misc_feature (1)..(194): Homolog of NCBI NO: 13486938 NR Description: plasma membrane intrinsic protein 2-1 [Pyrus
  misc_feature (1)..(194): Homolog of NCBI NO: 7441275 NR Description: mipC protein - common ice plant
  misc_feature (1)..(194): Homolog of NCBI NO: 17940746 NR Description: aquaporin-like protein [Petunia x hybrida]
  misc_feature (1)..(198): Homolog of NCBI NO: 8071620 NR Description: putative aquaporin PIP2-1 [Vitis berlandieri x
  misc_feature (1)..(198): Homolog of NCBI NO: 3158476 NR Description: aquaporin 2 [Samanea saman]
  misc_feature (1)..(198): Homolog of NCBI NO: 13486942 NR Description: plasma membrane intrinsic protein 2-2 [Pyrus
  misc_feature (1)..(198): Homolog of NCBI NO: 15233102 NR Description: aquaporin/MIP - like protein

SEQ ID NO: 32370 - DNA, 821 bp, Arabidopsis thaliana; identical to SEQ ID NO: 28780
  misc_feature (1)..(821): Ceres Seq. ID no. 12322096
  misc_feature: MA Experiment ID: 108464 Result: Up-regulated in Transcription
  misc_feature: MA Experiment 108464 PARAMETER Experiment Name: At_Germinating_Seeds_cDNA_P Parameter: Age (day) Value: 4 vs. 0
  misc_feature: MA Experiment 108464 PARAMETER Experiment Name: At_Germinating_Seeds_cDNA_P Parameter: Tissue Value: Germinating Seeds
  misc_feature: MA Experiment ID: 108488 Result: Down-regulated in Transcription
  misc_feature: MA Experiment ID: 108573 Result: Down-regulated in Transcription
  misc_feature: MA Experiment 108573 PARAMETER Experiment Name: At_Drought_cDNA_P Parameter: Timepoint (hr) Value: 6
  misc_feature: MA Experiment 108573 PARAMETER Experiment Name: At_Drought_cDNA_P Parameter: Tissue Value: Aerial
  misc_feature: MA Experiment 108573 PARAMETER Experiment Name: At_Drought_cDNA_P Parameter: Treatment Value: Drought vs. No Drought
  misc_feature: MA Experiment ID: 108595 Result: Up-regulated in Transcription
  misc_feature: MA Experiment 108595 PARAMETER Experiment Name: At_Ler-pi_Ovule_cDNA_P Parameter: Plant Line Value: null
  misc_feature: MA Experiment ID: 20000069 Result: Up-regulated in Transcription
  misc_feature: MA Experiment 20000069 PARAMETER Experiment Name: At_100uM_ABA_Mutants_cDNA_P Parameter: Plant Line Value: CS23
  misc_feature: MA Experiment 20000069 PARAMETER Experiment Name: At_100uM_ABA_Mutants_cDNA_P Parameter: Timepoint (hr) Value: 6
  misc_feature: MA Experiment 20000069 PARAMETER Experiment Name: At_100uM_ABA_Mutants_cDNA_P Parameter: Tissue Value: Aerial
  misc_feature: MA Experiment 20000069 PARAMETER Experiment Name: At_100uM_ABA_Mutants_cDNA_P Parameter: Treatment Value: 100uM ABA vs. No Treatment
  misc_feature: MA Experiment ID: 20000070 Result: Up-regulated in Transcription
  misc_feature: MA Experiment 20000070 PARAMETER Experiment Name: At_100uM_ABA_Mutants_cDNA_P Parameter: Plant Line Value: CS24
  misc_feature: MA Experiment 20000070 PARAMETER Experiment Name: At_100uM_ABA_Mutants_cDNA_P Parameter: Timepoint (hr) Value: 6
  misc_feature: MA Experiment 20000070 PARAMETER Experiment Name: At_100uM_ABA_Mutants_cDNA_P Parameter: Tissue Value: Aerial
  misc_feature: MA Experiment 20000070 PARAMETER Experiment Name: At_100uM_ABA_Mutants_cDNA_P Parameter: Treatment Value: 100uM ABA vs. No Treatment
  misc_feature: MA Experiment ID: 20000071 Result: Up-regulated in Transcription
  misc_feature: MA Experiment 20000071 PARAMETER Experiment Name: At_100uM_ABA_Mutants_cDNA_P Parameter: Plant Line Value: CS8104
  misc_feature: MA Experiment 20000071 PARAMETER Experiment Name: At_100uM_ABA_Mutants_cDNA_P Parameter: Timepoint (hr) Value: 6
  misc_feature: MA Experiment 20000071 PARAMETER Experiment Name: At_100uM_ABA_Mutants_cDNA_P Parameter: Tissue Value: Aerial
  misc_feature: MA Experiment 20000071 PARAMETER Experiment Name: At_100uM_ABA_Mutants_cDNA_P Parameter: Treatment Value: 100uM ABA vs. No Treatment
  misc_feature: MA Experiment ID: 20000072 Result: Up-regulated in Transcription
  misc_feature: MA Experiment 20000072 PARAMETER Experiment Name: At_100uM_ABA_Mutants_cDNA_P Parameter: Plant Line Value: CS8105
  misc_feature: MA Experiment 20000072 PARAMETER Experiment Name: At_100uM_ABA_Mutants_cDNA_P Parameter: Timepoint (hr) Value: 6
  misc_feature: MA Experiment 20000072 PARAMETER Experiment Name: At_100uM_ABA_Mutants_cDNA_P Parameter: Tissue Value: Aerial
  misc_feature: MA Experiment 20000072 PARAMETER Experiment Name: At_100uM_ABA_Mutants_cDNA_P Parameter: Treatment Value: 100uM ABA vs. No Treatment
  misc_feature: MA Experiment ID: 20000087 Result: Up-regulated in Transcription
  misc_feature: MA Experiment 20000087 PARAMETER Experiment Name: At_100uM_ABA_Mutants_cDNA_P Parameter: Plant Line Value: WS
  misc_feature: MA Experiment 20000087 PARAMETER Experiment Name: At_100uM_ABA_Mutants_cDNA_P Parameter: Timepoint (hr) Value: 6
  misc_feature: MA Experiment 20000087 PARAMETER Experiment Name: At_100uM_ABA_Mutants_cDNA_P Parameter: Tissue Value: Aerial
  misc_feature: MA Experiment 20000087 PARAMETER Experiment Name: At_100uM_ABA_Mutants_cDNA_P Parameter: Treatment Value: 100uM ABA vs. No Treatment
  misc_feature: MA Experiment ID: 20000088 Result: Up-regulated in Transcription
  misc_feature: MA Experiment 20000088 PARAMETER Experiment Name: At_100uM_ABA_Mutants_cDNA_P Parameter: Plant Line Value: Landsberg
  misc_feature: MA Experiment 20000088 PARAMETER Experiment Name: At_100uM_ABA_Mutants_cDNA_P Parameter: Timepoint (hr) Value: 6
  misc_feature: MA Experiment 20000088 PARAMETER Experiment Name: At_100uM_ABA_Mutants_cDNA_P Parameter: Tissue Value: Aerial
  misc_feature: MA Experiment 20000088 PARAMETER Experiment Name: At_100uM_ABA_Mutants_cDNA_P Parameter: Treatment Value: 100uM ABA vs. No Treatment
  misc_feature: MA Experiment ID: 20000089 Result: Up-regulated in Transcription
  misc_feature: MA Experiment ID: 20000090 Result: Up-regulated in Transcription
  misc_feature: MA Experiment ID: 20000111 Result: Down-regulated in Transcription
  misc_feature: MA Experiment 20000111 PARAMETER Experiment Name: At_42deg_Heat_cDNA_P Parameter: Temperature (deg C) Value: 42 vs. 22
  misc_feature: MA Experiment 20000111 PARAMETER Experiment Name: At_42deg_Heat_cDNA_P Parameter: Timepoint (hr) Value: 6
  misc_feature: MA Experiment 20000111 PARAMETER Experiment Name: At_42deg_Heat_cDNA_P Parameter: Tissue Value: Aerial
  misc_feature: MA Experiment ID: 20000113 Result: Down-regulated in Transcription
  misc_feature: MA Experiment 20000113 PARAMETER Experiment Name: At_42deg_Heat_cDNA_P Parameter: Temperature (deg C) Value: 42 vs. 22
  misc_feature: MA Experiment 20000113 PARAMETER Experiment Name: At_42deg_Heat_cDNA_P Parameter: Timepoint (hr) Value: 8
  misc_feature: MA Experiment 20000113 PARAMETER Experiment Name: At_42deg_Heat_cDNA_P Parameter: Tissue Value: Aerial
  misc_feature: MA Experiment ID: 20000117 Result: Up-regulated in Transcription
  misc_feature: MA Experiment 20000117 PARAMETER Experiment Name: At_100uM_ABA_Mutants_cDNA_P Parameter: Plant Line Value: Columbia
  misc_feature: MA Experiment 20000117 PARAMETER Experiment Name: At_100uM_ABA_Mutants_cDNA_P Parameter: Timepoint (hr) Value: 6
  misc_feature: MA Experiment 20000117 PARAMETER Experiment Name: At_100uM_ABA_Mutants_cDNA_P Parameter: Tissue Value: Aerial
  misc_feature: MA Experiment 20000117 PARAMETER Experiment Name: At_100uM_ABA_Mutants_cDNA_P Parameter: Treatment Value: 100uM ABA vs. No Treatment
  misc_feature: MA Experiment ID: 20000173 Result: Down-regulated in Transcription
  misc_feature: MA Experiment 20000173 PARAMETER Experiment Name: At_42deg_Heat_P Parameter: Age (day) Value: 14
  misc_feature: MA Experiment 20000173 PARAMETER Experiment Name: At_42deg_Heat_P Parameter: Organism Value: A. thaliana
  misc_feature: MA Experiment 20000173 PARAMETER Experiment Name: At_42deg_Heat_P Parameter: Plant Line Value: WS
  misc_feature: MA Experiment 20000173 PARAMETER Experiment Name: At_42deg_Heat_P Parameter: Temperature (deg C) Value: 42 vs. 22
  misc_feature: MA Experiment 20000173 PARAMETER Experiment Name: At_42deg_Heat_P Parameter: Timepoint (hr) Value: 6
  misc_feature: MA Experiment 20000173 PARAMETER Experiment Name: At_42deg_Heat_P Parameter: Tissue Value: Aerial
  misc_feature: MA Experiment ID: 20000235 Result: Down-regulated in Transcription
  misc_feature: MA Experiment 20000235 PARAMETER Experiment Name: At_Siliques_P Parameter: Age (day) Value: 21
  misc_feature: MA Experiment 20000235 PARAMETER Experiment Name: At_Siliques_P Parameter: Organism Value: A. thaliana
  misc_feature: MA Experiment 20000235 PARAMETER Experiment Name: At_Siliques_P Parameter: Plant Line Value: WS
  misc_feature: MA Experiment 20000235 PARAMETER Experiment Name: At_Siliques_P Parameter: Tissue Value: 5-10mm Siliques vs. Whole Plant
  misc_feature: MA Experiment ID: 20000437 Result: Up-regulated in Transcription
  misc_feature: MA Experiment 20000437 PARAMETER Experiment Name: At_Drought_P Parameter: Age (day) Value: 8
  misc_feature: MA Experiment 20000437 PARAMETER Experiment Name: At_Drought_P Parameter: Organism Value: A. thaliana
  misc_feature: MA Experiment 20000437 PARAMETER Experiment Name: At_Drought_P Parameter: Plant Line Value: WS
  misc_feature: MA Experiment 20000437 PARAMETER Experiment Name: At_Drought_P Parameter: Timepoint (hr) Value: 24
  misc_feature: MA Experiment 20000437 PARAMETER Experiment Name: At_Drought_P Parameter: Tissue Value: Whole Plant
  misc_feature: MA Experiment 20000437 PARAMETER Experiment Name: At_Drought_P Parameter: Treatment Value: Drought vs. No Drought
  misc_feature: MA Experiment ID: 20001248 Result: Up-regulated in Transcription
  misc_feature: MA Experiment 20001248 PARAMETER Experiment Name: At_Far-red-induction_P Parameter: Age (day) Value: 7
  misc_feature: MA Experiment 20001248 PARAMETER Experiment Name: At_Far-red-induction_P Parameter: Light Value: Far-red vs. White
  misc_feature: MA Experiment 20001248 PARAMETER Experiment Name: At_Far-red-induction_P Parameter: Organism Value: A. thaliana
  misc_feature: MA Experiment 20001248 PARAMETER Experiment Name: At_Far-red-induction_P Parameter: Plant Line Value: Columbia
  misc_feature: MA Experiment 20001248 PARAMETER Experiment Name: At_Far-red-induction_P Parameter: Timepoint (hr) Value: 4
  misc_feature: MA Experiment 20001248 PARAMETER Experiment Name: At_Far-red-induction_P Parameter: Tissue Value: Whole Plant
  misc_feature: MA Experiment ID: 20001451 Result: Up-regulated in Transcription
  misc_feature: MA Experiment 20001451 PARAMETER Experiment Name: At_Far-red-induction_P Parameter: Age (day) Value: 7
  misc_feature: MA Experiment 20001451 PARAMETER Experiment Name: At_Far-red-induction_P Parameter: Light Value: Far-red vs. White
  misc_feature: MA Experiment 20001451 PARAMETER Experiment Name: At_Far-red-induction_P Parameter: Organism Value: A. thaliana
  misc_feature: MA Experiment 20001451 PARAMETER Experiment Name: At_Far-red-induction_P Parameter: Plant Line Value: Columbia
  misc_feature: MA Experiment 20001451 PARAMETER Experiment Name: At_Far-red-induction_P Parameter: Timepoint (hr) Value: 24
  misc_feature: MA Experiment 20001451 PARAMETER Experiment Name: At_Far-red-induction_P Parameter: Tissue Value: Whole Plant
  misc_feature: MA Experiment ID: 20001558 Result: Down-regulated in Transcription
  misc_feature: MA Experiment 20001558 PARAMETER Experiment Name: At_Drought_Soil_Dry_P Parameter: Age (day) Value: 27
  misc_feature: MA Experiment 20001558 PARAMETER Experiment Name: At_Drought_Soil_Dry_P Parameter: Organism Value: A. thaliana
  misc_feature: MA Experiment 20001558 PARAMETER Experiment Name: At_Drought_Soil_Dry_P Parameter: Plant Line Value: WS
  misc_feature: MA Experiment 20001558 PARAMETER Experiment Name: At_Drought_Soil_Dry_P Parameter: Post Timepoint (hr) Value: 6
  misc_feature: MA Experiment 20001558 PARAMETER Experiment Name: At_Drought_Soil_Dry_P Parameter: Post-Treatment Value: Re-Water vs. No Drought
  misc_feature: MA Experiment 20001558 PARAMETER Experiment Name: At_Drought_Soil_Dry_P Parameter: Timepoint (day) Value: 13
  misc_feature: MA Experiment 20001558 PARAMETER Experiment Name: At_Drought_Soil_Dry_P Parameter: Treatment Value: Drought vs. No Drought

SEQ ID NO: 32371 - protein, 141 aa, Arabidopsis thaliana; identical to SEQ ID NO: 28781
  peptide (1)..(141): Ceres Seq. ID no. 12322097
  misc_feature (35)..(104): Pfam Name: HMG (high mobility group) box Pfam Description: HMG (high mobility group) box
  misc_feature (1)..(140): Homolog of NCBI NO: 7446212 NR Description: high mobility group protein - potato
  misc_feature (1)..(136): Homolog of NCBI NO: 25402921 NR Description: protein F2D10.18 [imported] - Arabidopsis
  misc_feature (1)..(141): Homolog of NCBI NO: 18394898 NR Description: Expressed protein
  misc_feature (1)..(141): Homolog of NCBI NO: 18394900 NR Description: Expressed protein
  misc_feature (1)..(141): Homolog of NCBI NO: 25402921 NR Description: protein F2D10.18 [imported] - Arabidopsis

SEQ ID NO: 32372 - protein, 96 aa, Arabidopsis thaliana; identical to SEQ ID NO: 28782
  peptide (1)..(96): Ceres Seq. ID no. 12322098
  misc_feature (1)..(59): Pfam Name: HMG (high mobility group) box Pfam Description: HMG (high mobility group) box
  misc_feature (1)..(95): Homolog of NCBI NO: 7446212 NR Description: high mobility group protein - potato
  misc_feature (1)..(91): Homolog of NCBI NO: 25402921 NR Description: protein F2D10.18 [imported] - Arabidopsis
  misc_feature (1)..(96): Homolog of NCBI NO: 18394898 NR Description: Expressed protein
  misc_feature (1)..(96): Homolog of NCBI NO: 18394900 NR Description: Expressed protein
  misc_feature (1)..(96): Homolog of NCBI NO: 25402921 NR Description: protein F2D10.18 [imported] - Arabidopsis

SEQ ID NO: 32373 - DNA, 1186 bp, Arabidopsis thaliana; identical to SEQ ID NO: 28783
  misc_feature (1)..(1186): Ceres Seq. ID no. 12422578
  misc_feature: MA Experiment ID: 108434 Result: Down-regulated in Transcription
  misc_feature: MA Experiment 108434 PARAMETER Experiment Name: At_Root_Tips_cDNA_P Parameter: Tissue Value: Root Tips
  misc_feature: MA Experiment ID: 108461 Result: Up-regulated in Transcription
  misc_feature: MA Experiment 108461 PARAMETER Experiment Name: At_Germinating_Seeds_cDNA_P Parameter: Age (day) Value: 1 vs. 0
  misc_feature: MA Experiment 108461 PARAMETER Experiment Name: At_Germinating_Seeds_cDNA_P Parameter: Tissue Value: Germinating Seeds
  misc_feature: MA Experiment ID: 108462 Result: Up-regulated in Transcription
  misc_feature: MA Experiment 108462 PARAMETER Experiment Name: At_Germinating_Seeds_cDNA_P Parameter: Age (day) Value: 2 vs. 0
  misc_feature: MA Experiment 108462 PARAMETER Experiment Name: At_Germinating_Seeds_cDNA_P Parameter: Tissue Value: Germinating Seeds
  misc_feature: MA Experiment ID: 108463 Result: Up-regulated in Transcription
  misc_feature: MA Experiment 108463 PARAMETER Experiment Name: At_Germinating_Seeds_cDNA_P Parameter: Age (day) Value: 3 vs. 0
  misc_feature: MA Experiment 108463 PARAMETER Experiment Name: At_Germinating_Seeds_cDNA_P Parameter: Tissue Value: Germinating Seeds
  misc_feature: MA Experiment ID: 108464 Result: Up-regulated in Transcription
  misc_feature: MA Experiment 108464 PARAMETER Experiment Name: At_Germinating_Seeds_cDNA_P Parameter: Age (day) Value: 4 vs. 0
  misc_feature: MA Experiment 108464 PARAMETER Experiment Name: At_Germinating_Seeds_cDNA_P Parameter: Tissue Value: Germinating Seeds
  misc_feature: MA Experiment ID: 108489 Result: Down-regulated in Transcription
  misc_feature: MA Experiment ID: 108573 Result: Down-regulated in Transcription
  misc_feature: MA Experiment 108573 PARAMETER Experiment Name: At_Drought_cDNA_P Parameter: Timepoint (hr) Value: 6
  misc_feature: MA Experiment 108573 PARAMETER Experiment Name: At_Drought_cDNA_P Parameter: Tissue Value: Aerial
  misc_feature: MA Experiment 108573 PARAMETER Experiment Name: At_Drought_cDNA_P Parameter: Treatment Value: Drought vs. No Drought
  misc_feature: MA Experiment ID: 108594 Result: Down-regulated in Transcription
  misc_feature: MA Experiment 108594 PARAMETER Experiment Name: At_Ler-rhl_Root_cDNA_P Parameter: Plant Line Value: null
  misc_feature: MA Experiment ID: 20000071 Result: Down-regulated in Transcription
  misc_feature: MA Experiment 20000071 PARAMETER Experiment Name: At_100uM_ABA_Mutants_cDNA_P Parameter: Plant Line Value: CS8104
  misc_feature: MA Experiment 20000071 PARAMETER Experiment Name: At_100uM_ABA_Mutants_cDNA_P Parameter: Timepoint (hr) Value: 6
  misc_feature: MA Experiment 20000071 PARAMETER Experiment Name: At_100uM_ABA_Mutants_cDNA_P Parameter: Tissue Value: Aerial
  misc_feature: MA Experiment 20000071 PARAMETER Experiment Name: At_100uM_ABA_Mutants_cDNA_P Parameter: Treatment Value: 100uM ABA vs. No Treatment
  misc_feature: MA Experiment ID: 20000072 Result: Down-regulated in Transcription
  misc_feature: MA Experiment 20000072 PARAMETER Experiment Name: At_100uM_ABA_Mutants_cDNA_P Parameter: Plant Line Value: CS8105
  misc_feature: MA Experiment 20000072 PARAMETER Experiment Name: At_100uM_ABA_Mutants_cDNA_P Parameter: Timepoint (hr) Value: 6
  misc_feature: MA Experiment 20000072 PARAMETER Experiment Name: At_100uM_ABA_Mutants_cDNA_P Parameter: Tissue Value: Aerial
  misc_feature: MA Experiment 20000072 PARAMETER Experiment Name: At_100uM_ABA_Mutants_cDNA_P Parameter: Treatment Value: 100uM ABA vs. No Treatment
  misc_feature: MA Experiment ID: 20000087 Result: Down-regulated in Transcription
  misc_feature: MA Experiment 20000087 PARAMETER Experiment Name: At_100uM_ABA_Mutants_cDNA_P Parameter: Plant Line Value: WS
  misc_feature: MA Experiment 20000087 PARAMETER Experiment Name: At_100uM_ABA_Mutants_cDNA_P Parameter: Timepoint (hr) Value: 6
  misc_feature: MA Experiment 20000087 PARAMETER Experiment Name: At_100uM_ABA_Mutants_cDNA_P Parameter: Tissue Value: Aerial
  misc_feature: MA Experiment 20000087 PARAMETER Experiment Name: At_100uM_ABA_Mutants_cDNA_P Parameter: Treatment Value: 100uM ABA vs. No Treatment
  misc_feature: MA Experiment ID: 20000088 Result: Down-regulated in Transcription
  misc_feature: MA Experiment 20000088 PARAMETER Experiment Name: At_100uM_ABA_Mutants_cDNA_P Parameter: Plant Line Value: Landsberg
  misc_feature: MA Experiment 20000088 PARAMETER Experiment Name: At_100uM_ABA_Mutants_cDNA_P Parameter: Timepoint (hr) Value: 6
  misc_feature: MA Experiment 20000088 PARAMETER Experiment Name: At_100uM_ABA_Mutants_cDNA_P Parameter: Tissue Value: Aerial
  misc_feature: MA Experiment 20000088 PARAMETER Experiment Name: At_100uM_ABA_Mutants_cDNA_P Parameter: Treatment Value: 100uM ABA vs. No Treatment
  misc_feature: MA Experiment ID: 20000090 Result: Down-regulated in Transcription
  misc_feature: MA Experiment ID: 20000111 Result: Up-regulated in Transcription
  misc_feature: MA Experiment 20000111 PARAMETER Experiment Name: At_42deg_Heat_cDNA_P Parameter: Temperature (deg C) Value: 42 vs. 22
  misc_feature: MA Experiment 20000111 PARAMETER Experiment Name: At_42deg_Heat_cDNA_P Parameter: Timepoint (hr) Value: 6
  misc_feature: MA Experiment 20000111 PARAMETER Experiment Name: At_42deg_Heat_cDNA_P Parameter: Tissue Value: Aerial
  misc_feature: MA Experiment ID: 20000117 Result: Down-regulated in Transcription
  misc_feature: MA Experiment 20000117 PARAMETER Experiment Name: At_100uM_ABA_Mutants_cDNA_P Parameter: Plant Line Value: Columbia
  misc_feature: MA Experiment 20000117 PARAMETER Experiment Name: At_100uM_ABA_Mutants_cDNA_P Parameter: Timepoint (hr) Value: 6
  misc_feature: MA Experiment 20000117 PARAMETER Experiment Name: At_100uM_ABA_Mutants_cDNA_P Parameter: Tissue Value: Aerial
  misc_feature: MA Experiment 20000117 PARAMETER Experiment Name: At_100uM_ABA_Mutants_cDNA_P Parameter: Treatment Value: 100uM ABA vs. No Treatment
  misc_feature: MA Experiment ID: 20000180 Result: Up-regulated in Transcription
  misc_feature: MA Experiment 20000180 PARAMETER Experiment Name: At_Germinating_Seeds_P Parameter: Age (hr) Value: 24 vs. 0
  misc_feature: MA Experiment 20000180 PARAMETER Experiment Name: At_Germinating_Seeds_P Parameter: Tissue Value: Germinating Seeds
  misc_feature: MA Experiment ID: 20000496 Result: Up-regulated in Transcription
  misc_feature: MA Experiment 20000496 PARAMETER Experiment Name: At_Guard_Cells_P Parameter: Harvest Date Value: 7/19/2002
  misc_feature: MA Experiment 20000496 PARAMETER Experiment Name: At_Guard_Cells_P Parameter: Organism Value: Canola
  misc_feature: MA Experiment 20000496 PARAMETER Experiment Name: At_Guard_Cells_P Parameter: Tissue Value: Guard Cells vs. Leaves
  misc_feature: MA Experiment ID: 20000527 Result: Down-regulated in Transcription
  misc_feature: MA Experiment 20000527 PARAMETER Experiment Name: At_10percent_PEG_P Parameter: Age (day) Value: 20
  misc_feature: MA Experiment 20000527 PARAMETER Experiment Name: At_10percent_PEG_P Parameter: Organism Value: A. thaliana
  misc_feature: MA Experiment 20000527 PARAMETER Experiment Name: At_10percent_PEG_P Parameter: Plant Line Value: WS
  misc_feature: MA Experiment 20000527 PARAMETER Experiment Name: At_10percent_PEG_P Parameter: Timepoint (day) Value: 20
  misc_feature: MA Experiment 20000527 PARAMETER Experiment Name: At_10percent_PEG_P Parameter: Tissue Value: Whole Plant
  misc_feature: MA Experiment 20000527 PARAMETER Experiment Name: At_10percent_PEG_P Parameter: Treatment Value: 10percent PEG vs. No Treatment
  misc_feature: MA Experiment ID: 20001248 Result: Down-regulated in Transcription
  misc_feature: MA Experiment 20001248 PARAMETER Experiment Name: At_Far-red-induction_P Parameter: Age (day) Value: 7
  misc_feature: MA Experiment 20001248 PARAMETER Experiment Name: At_Far-red-induction_P Parameter: Light Value: Far-red vs. White
  misc_feature: MA Experiment 20001248 PARAMETER Experiment Name: At_Far-red-induction_P Parameter: Organism Value: A. thaliana
  misc_feature: MA Experiment 20001248 PARAMETER Experiment Name: At_Far-red-induction_P Parameter: Plant Line Value: Columbia
  misc_feature: MA Experiment 20001248 PARAMETER Experiment Name: At_Far-red-induction_P Parameter: Timepoint (hr) Value: 4
  misc_feature: MA Experiment 20001248 PARAMETER Experiment Name: At_Far-red-induction_P Parameter: Tissue Value: Whole Plant
  misc_feature: MA Experiment ID: 20001450 Result: Down-regulated in Transcription
  misc_feature: MA Experiment 20001450 PARAMETER Experiment Name: At_Far-red-induction_P Parameter: Age (day) Value: 7
  misc_feature: MA Experiment 20001450 PARAMETER Experiment Name: At_Far-red-induction_P Parameter: Light Value: Far-red vs. White
  misc_feature: MA Experiment 20001450 PARAMETER Experiment Name: At_Far-red-induction_P Parameter: Organism Value: A. thaliana
  misc_feature: MA Experiment 20001450 PARAMETER Experiment Name: At_Far-red-induction_P Parameter: Plant Line Value: Columbia
  misc_feature: MA Experiment 20001450 PARAMETER Experiment Name: At_Far-red-induction_P Parameter: Timepoint (hr) Value: 8
  misc_feature: MA Experiment 20001450 PARAMETER Experiment Name: At_Far-red-induction_P Parameter: Tissue Value: Whole Plant
  misc_feature: MA Experiment ID: 20001558 Result: Down-regulated in Transcription
  misc_feature: MA Experiment 20001558 PARAMETER Experiment Name: At_Drought_Soil_Dry_P Parameter: Age (day) Value: 27
  misc_feature: MA Experiment 20001558 PARAMETER Experiment Name: At_Drought_Soil_Dry_P Parameter: Organism Value: A. thaliana
  misc_feature: MA Experiment 20001558 PARAMETER Experiment Name: At_Drought_Soil_Dry_P Parameter: Plant Line Value: WS
  misc_feature: MA Experiment 20001558 PARAMETER Experiment Name: At_Drought_Soil_Dry_P Parameter: Post Timepoint (hr) Value: 6
  misc_feature: MA Experiment 20001558 PARAMETER Experiment Name: At_Drought_Soil_Dry_P Parameter: Post-Treatment Value: Re-Water vs. No Drought
  misc_feature: MA Experiment 20001558 PARAMETER Experiment Name: At_Drought_Soil_Dry_P Parameter: Timepoint (day) Value: 13
  misc_feature: MA Experiment 20001558 PARAMETER Experiment Name: At_Drought_Soil_Dry_P Parameter: Treatment Value: Drought vs. No Drought
  misc_feature: MA Experiment ID: 20001908 Result: Down-regulated in Transcription
  misc_feature: MA Experiment 20001908 PARAMETER Experiment Name: At_Drought_Reproduction_P Parameter: Age (day) Value: 40
  misc_feature: MA Experiment 20001908 PARAMETER Experiment Name: At_Drought_Reproduction_P Parameter: Organism Value: A. thaliana
  misc_feature: MA Experiment 20001908 PARAMETER Experiment Name: At_Drought_Reproduction_P Parameter: Plant Line Value: WS
  misc_feature: MA Experiment 20001908 PARAMETER Experiment Name: At_Drought_Reproduction_P Parameter: Timepoint (day) Value: 10
  misc_feature: MA Experiment 20001908 PARAMETER Experiment Name: At_Drought_Reproduction_P Parameter: Tissue Value: Siliques
  misc_feature: MA Experiment 20001908 PARAMETER Experiment Name: At_Drought_Reproduction_P Parameter: Treatment Value: Drought vs. No Drought
  misc_feature: MA Experiment ID: 20001911 Result: Down-regulated in Transcription
  misc_feature: MA Experiment 20001911 PARAMETER Experiment Name: At_Drought_Reproduction_P Parameter: Age (day) Value: 40
  misc_feature: MA Experiment 20001911 PARAMETER Experiment Name: At_Drought_Reproduction_P Parameter: Organism Value: A. thaliana
  misc_feature: MA Experiment 20001911 PARAMETER Experiment Name: At_Drought_Reproduction_P Parameter: Plant Line Value: WS
  misc_feature: MA Experiment 20001911 PARAMETER Experiment Name: At_Drought_Reproduction_P Parameter: Timepoint (day) Value: 10
  misc_feature: MA Experiment 20001911 PARAMETER Experiment Name: At_Drought_Reproduction_P Parameter: Tissue Value: Flowers
  misc_feature: MA Experiment 20001911 PARAMETER Experiment Name: At_Drought_Reproduction_P Parameter: Treatment Value: Drought vs. No Drought

SEQ ID NO: 32374 - protein, 333 aa, Arabidopsis thaliana; identical to SEQ ID NO: 28784
  peptide (1)..(333): Ceres Seq. ID no. 12422579
  misc_feature (26)..(333): Pfam Name: Isoflavone reductase Pfam Description: Isoflavone reductase
  misc_feature (27)..(332): Homolog of NCBI NO: 7578895 NR Description: phenylcoumaran benzylic ether reductase homolog
  misc_feature (28)..(325): Homolog of NCBI NO: 4731376 NR Description: isoflavone reductase homolog Bet v 6.0101 [Betula
  misc_feature (27)..(332): Homolog of NCBI NO: 3114899 NR Description: phenylcoumaran benzylic ether reductase
  misc_feature (27)..(332): Homolog of NCBI NO: 3114903 NR Description: phenylcoumaran benzylic ether reductase
  misc_feature (27)..(332): Homolog of NCBI NO: 3114901 NR Description: phenylcoumaran benzylic ether reductase
  misc_feature (28)..(332): Homolog of NCBI NO: 10764491 NR Description: allergenic isoflavone reductase-like protein Bet
  misc_feature (24)..(332): Homolog of NCBI NO: 15222191 NR Description: isoflavone reductase homolog P3, putative
  misc_feature (24)..(333): Homolog of NCBI NO: 15222190 NR Description: isoflavone reductase homolog P3, putative
  misc_feature (24)..(333): Homolog of NCBI NO: 25344798 NR Description: probable NADPH oxidoreductase, 14094-12769
  misc_feature (24)..(333): Homolog of NCBI NO: 18410820 NR Description: isoflavone reductase homolog P3

SEQ ID NO: 32375 - protein, 310 aa, Arabidopsis thaliana; identical to SEQ ID NO: 28785
  peptide (1)..(310): Ceres Seq. ID no. 12422580
  misc_feature (3)..(310): Pfam Name: Isoflavone reductase Pfam Description: Isoflavone reductase
  misc_feature (4)..(309): Homolog of NCBI NO: 7578895 NR Description: phenylcoumaran benzylic ether reductase homolog
  misc_feature (5)..(302): Homolog of NCBI NO: 4731376 NR Description: isoflavone reductase homolog Bet v 6.0101 [Betula
  misc_feature (4)..(309): Homolog of NCBI NO: 3114899 NR Description: phenylcoumaran benzylic ether reductase
  misc_feature (4)..(309): Homolog of NCBI NO: 3114903 NR Description: phenylcoumaran benzylic ether reductase
  misc_feature (4)..(309): Homolog of NCBI NO: 3114901 NR Description: phenylcoumaran benzylic ether reductase
  misc_feature (5)..(309): Homolog of NCBI NO: 10764491 NR Description: allergenic isoflavone reductase-like protein Bet
  misc_feature (1)..(309): Homolog of NCBI NO: 15222191 NR Description: isoflavone reductase homolog P3, putative
  misc_feature (1)..(310): Homolog of NCBI NO: 15222190 NR Description: isoflavone reductase homolog P3, putative
  misc_feature (1)..(310): Homolog of NCBI NO: 25344798 NR Description: probable NADPH oxidoreductase, 14094-12769
  misc_feature (1)..(310): Homolog of NCBI NO: 18410820 NR Description: isoflavone reductase homolog P3

SEQ ID NO: 32376 - protein, 223 aa, Arabidopsis thaliana; identical to SEQ ID NO: 28786
  peptide (1)..(223): Ceres Seq. ID no. 12422581
  misc_feature (1)..(223): Pfam Name: Isoflavone reductase Pfam Description: Isoflavone reductase
  misc_feature (1)..(222): Homolog of NCBI NO: 7578895 NR Description: phenylcoumaran benzylic ether reductase homolog
  misc_feature (1)..(215): Homolog of NCBI NO: 4731376 NR Description: isoflavone reductase homolog Bet v 6.0101 [Betula
  misc_feature (1)..(222): Homolog of NCBI NO: 3114899 NR Description: phenylcoumaran benzylic ether reductase
  misc_feature (1)..(222): Homolog of NCBI NO: 3114903 NR Description: phenylcoumaran benzylic ether reductase
  misc_feature (1)..(222): Homolog of NCBI NO: 3114901 NR Description: phenylcoumaran benzylic ether reductase
  misc_feature (1)..(222): Homolog of NCBI NO: 10764491 NR Description: allergenic isoflavone reductase-like protein Bet
  misc_feature (1)..(222): Homolog of NCBI NO: 15222191 NR Description: isoflavone reductase homolog P3, putative
  misc_feature (1)..(223): Homolog of NCBI NO: 15222190 NR Description: isoflavone reductase homolog P3, putative
  misc_feature (1)..(223): Homolog of NCBI NO: 25344798 NR Description: probable NADPH oxidoreductase, 14094-12769
  misc_feature (1)..(223): Homolog of NCBI NO: 18410820 NR Description: isoflavone reductase homolog P3

SEQ ID NO: 32377 - DNA, 1078 bp, Arabidopsis thaliana; identical to SEQ ID NO: 28787
  misc_feature (1)..(1078): Ceres Seq. ID no. 12334300
  misc_feature: MA Experiment ID: 20000166 Result: Up-regulated in Transcription
  misc_feature: MA Experiment 20000166 PARAMETER Experiment Name: At_100uM_ABA_P Parameter: Age (day) Value: 14
  misc_feature: MA Experiment 20000166 PARAMETER Experiment Name: At_100uM_ABA_P Parameter: Organism Value: A. thaliana
  misc_feature: MA Experiment 20000166 PARAMETER Experiment Name: At_100uM_ABA_P Parameter: Plant Line Value: WS
  misc_feature: MA Experiment 20000166 PARAMETER Experiment Name: At_100uM_ABA_P Parameter: Timepoint (hr) Value: 1
  misc_feature: MA Experiment 20000166 PARAMETER Experiment Name: At_100uM_ABA_P Parameter: Tissue Value: Aerial
  misc_feature: MA Experiment 20000166 PARAMETER Experiment Name: At_100uM_ABA_P Parameter: Treatment Value: 100uM ABA vs. No Treatment
  misc_feature: MA Experiment ID: 20000169 Result: Up-regulated in Transcription
  misc_feature: MA Experiment 20000169 PARAMETER Experiment Name: At_100uM_ABA_P Parameter: Age (day) Value: 14
  misc_feature: MA Experiment 20000169 PARAMETER Experiment Name: At_100uM_ABA_P Parameter: Organism Value: A. thaliana
  misc_feature: MA Experiment 20000169 PARAMETER Experiment Name: At_100uM_ABA_P Parameter: Plant Line Value: WS
  misc_feature: MA Experiment 20000169 PARAMETER Experiment Name: At_100uM_ABA_P Parameter: Timepoint (hr) Value: 6
  misc_feature: MA Experiment 20000169 PARAMETER Experiment Name: At_100uM_ABA_P Parameter: Tissue Value: Aerial
  misc_feature: MA Experiment 20000169 PARAMETER Experiment Name: At_100uM_ABA_P Parameter: Treatment Value: 100uM ABA vs. No Treatment
  misc_feature: MA Experiment ID: 20000184 Result: Down-regulated in Transcription
  misc_feature: MA Experiment 20000184 PARAMETER Experiment Name: At_Shoots__P Parameter: Age (day) Value: 7
  misc_feature: MA Experiment 20000184 PARAMETER Experiment Name: At_Shoots__P Parameter: Tissue Value: Shoots vs. Whole Plant
  misc_feature: MA Experiment ID: 20000214 Result: Down-regulated in Transcription
  misc_feature: MA Experiment 20000214 PARAMETER Experiment Name: At_4deg_Cold_P Parameter: Timepoint (hr) Value: 6
  misc_feature: MA Experiment ID: 20000234 Result: Down-regulated in Transcription
  misc_feature: MA Experiment 20000234 PARAMETER Experiment Name: At_Siliques_P Parameter: Age (day) Value: 21
  misc_feature: MA Experiment 20000234 PARAMETER Experiment Name: At_Siliques_P Parameter: Organism Value: A. thaliana
  misc_feature: MA Experiment 20000234 PARAMETER Experiment Name: At_Siliques_P Parameter: Plant Line Value: WS
  misc_feature: MA Experiment 20000234 PARAMETER Experiment Name: At_Siliques_P Parameter: Tissue Value: Less Than 5mm Siliques vs. Whole Plant
  misc_feature: MA Experiment ID: 20000235 Result: Down-regulated in Transcription
  misc_feature: MA Experiment 20000235 PARAMETER Experiment Name: At_Siliques_P Parameter: Age (day) Value: 21
  misc_feature: MA Experiment 20000235 PARAMETER Experiment Name: At_Siliques_P Parameter: Organism Value: A. thaliana
  misc_feature: MA Experiment 20000235 PARAMETER Experiment Name: At_Siliques_P Parameter: Plant Line Value: WS
  misc_feature: MA Experiment 20000235 PARAMETER Experiment Name: At_Siliques_P Parameter: Tissue Value: 5-10mm Siliques vs. Whole Plant
  misc_feature: MA Experiment ID: 20000265 Result: Down-regulated in Transcription
  misc_feature: MA Experiment 20000265 PARAMETER Experiment Name: At_Open_Flower_P Parameter: Age (day) Value: 21
  misc_feature: MA Experiment 20000265 PARAMETER Experiment Name: At_Open_Flower_P Parameter: Plant Line Value: WS
  misc_feature: MA Experiment 20000265 PARAMETER Experiment Name: At_Open_Flower_P Parameter: Tissue Value: Closed Flower vs. Whole Plant
  misc_feature: MA Experiment ID: 20000286 Result: Down-regulated in Transcription
  misc_feature: MA Experiment 20000286 PARAMETER Experiment Name: At_Open_Flower_P Parameter: Age (day) Value: 21
  misc_feature: MA Experiment 20000286 PARAMETER Experiment Name: At_Open_Flower_P Parameter: Plant Line Value: WS
  misc_feature: MA Experiment 20000286 PARAMETER Experiment Name: At_Open_Flower_P Parameter: Tissue Value: Half Open vs. Whole Plant
  misc_feature: MA Experiment ID: 20000436 Result: Up-regulated in Transcription
  misc_feature: MA Experiment 20000436 PARAMETER Experiment Name: At_Drought_P Parameter: Age (day) Value: 7
  misc_feature: MA Experiment 20000436 PARAMETER Experiment Name: At_Drought_P Parameter: Organism Value: A. thaliana
  misc_feature: MA Experiment 20000436 PARAMETER Experiment Name: At_Drought_P Parameter: Plant Line Value: WS
  misc_feature: MA Experiment 20000436 PARAMETER Experiment Name: At_Drought_P Parameter: Timepoint (hr) Value: 12
  misc_feature: MA Experiment 20000436 PARAMETER Experiment Name: At_Drought_P Parameter: Tissue Value: Whole Plant
  misc_feature: MA Experiment 20000436 PARAMETER Experiment Name: At_Drought_P Parameter: Treatment Value: Drought vs. No Drought
  misc_feature: MA Experiment ID: 20000437 Result: Up-regulated in Transcription
  misc_feature: MA Experiment 20000437 PARAMETER Experiment Name: At_Drought_P Parameter: Age (day) Value: 8
  misc_feature: MA Experiment 20000437 PARAMETER Experiment Name: At_Drought_P Parameter: Organism Value: A. thaliana
  misc_feature: MA Experiment 20000437 PARAMETER Experiment Name: At_Drought_P Parameter: Plant Line Value: WS
  misc_feature: MA Experiment 20000437 PARAMETER Experiment Name: At_Drought_P Parameter: Timepoint (hr) Value: 24
  misc_feature: MA Experiment 20000437 PARAMETER Experiment Name: At_Drought_P Parameter: Tissue Value: Whole Plant
  misc_feature: MA Experiment 20000437 PARAMETER Experiment Name: At_Drought_P Parameter: Treatment Value: Drought vs. No Drought
  misc_feature: MA Experiment ID: 20000453 Result: Up-regulated in Transcription
  misc_feature: MA Experiment 20000453 PARAMETER Experiment Name: At_100uM_ABA_P Parameter: Age (day) Value: 15
  misc_feature: MA Experiment 20000453 PARAMETER Experiment Name: At_100uM_ABA_P Parameter: Organism Value: A. thaliana
  misc_feature: MA Experiment 20000453 PARAMETER Experiment Name: At_100uM_ABA_P Parameter: Plant Line Value: WS
  misc_feature: MA Experiment 20000453 PARAMETER Experiment Name: At_100uM_ABA_P Parameter: Timepoint (hr) Value: 24
  misc_feature: MA Experiment 20000453 PARAMETER Experiment Name: At_100uM_ABA_P Parameter: Tissue Value: Aerial
  misc_feature: MA Experiment 20000453 PARAMETER Experiment Name: At_100uM_ABA_P Parameter: Treatment Value: 100uM ABA vs. No Treatment
  misc_feature: MA Experiment ID: 20000794 Result: Up-regulated in Transcription
  misc_feature: MA Experiment 20000794 PARAMETER Experiment Name: At_Petals_P Parameter: Age (day) Value: 23-25 days
  misc_feature: MA Experiment 20000794 PARAMETER Experiment Name: At_Petals_P Parameter: Plant Line Value: WS
  misc_feature: MA Experiment 20000794 PARAMETER Experiment Name: At_Petals_P Parameter: Tissue Value: Petals vs. Whole plant
  misc_feature: MA Experiment ID: 20001450 Result: Up-regulated in Transcription
  misc_feature: MA Experiment 20001450 PARAMETER Experiment Name: At_Far-red-induction_P Parameter: Age (day) Value: 7
  misc_feature: MA Experiment 20001450 PARAMETER Experiment Name: At_Far-red-induction_P Parameter: Light Value: Far-red vs. White
  misc_feature: MA Experiment 20001450 PARAMETER Experiment Name: At_Far-red-induction_P Parameter: Organism Value: A. thaliana
  misc_feature: MA Experiment 20001450 PARAMETER Experiment Name: At_Far-red-induction_P Parameter: Plant Line Value: Columbia
  misc_feature: MA Experiment 20001450 PARAMETER Experiment Name: At_Far-red-induction_P Parameter: Timepoint (hr) Value: 8
  misc_feature: MA Experiment 20001450 PARAMETER Experiment Name: At_Far-red-induction_P Parameter: Tissue Value: Whole Plant
  misc_feature: MA Experiment ID: 20001451 Result: Up-regulated in Transcription
  misc_feature: MA Experiment 20001451 PARAMETER Experiment Name: At_Far-red-induction_P Parameter: Age (day) Value: 7
  misc_feature: MA Experiment 20001451 PARAMETER Experiment Name: At_Far-red-induction_P Parameter: Light Value: Far-red vs. White
  misc_feature: MA Experiment 20001451 PARAMETER Experiment Name: At_Far-red-induction_P Parameter: Organism Value: A. thaliana
  misc_feature: MA Experiment 20001451 PARAMETER Experiment Name: At_Far-red-induction_P Parameter: Plant Line Value: Columbia
  misc_feature: MA Experiment 20001451 PARAMETER Experiment Name: At_Far-red-induction_P Parameter: Timepoint (hr) Value: 24
  misc_feature: MA Experiment 20001451 PARAMETER Experiment Name: At_Far-red-induction_P Parameter: Tissue Value: Whole Plant
  misc_feature: MA Experiment ID: 20001554 Result: Up-regulated in Transcription
  misc_feature: MA Experiment 20001554 PARAMETER Experiment Name: At_Drought_Soil_Dry_P Parameter: Age (day) Value: 21
  misc_feature: MA Experiment 20001554 PARAMETER Experiment Name: At_Drought_Soil_Dry_P Parameter: Organism Value: A. thaliana
  misc_feature: MA Experiment 20001554 PARAMETER Experiment Name: At_Drought_Soil_Dry_P Parameter: Plant Line Value: WS
  misc_feature: MA Experiment 20001554 PARAMETER Experiment Name: At_Drought_Soil_Dry_P Parameter: Post Timepoint (hr) Value: None
  misc_feature: MA Experiment 20001554 PARAMETER Experiment Name: At_Drought_Soil_Dry_P Parameter: Post-Treatment Value: None
  misc_feature: MA Experiment 20001554 PARAMETER Experiment Name: At_Drought_Soil_Dry_P Parameter: Timepoint (day) Value: 7
  misc_feature: MA Experiment 20001554 PARAMETER Experiment Name: At_Drought_Soil_Dry_P Parameter: Treatment Value: Drought vs. No Drought
  misc_feature: MA Experiment ID: 20001555 Result: Up-regulated in Transcription
  misc_feature: MA Experiment 20001555 PARAMETER Experiment Name: At_Drought_Soil_Dry_P Parameter: Age (day) Value: 24
  misc_feature: MA Experiment 20001555 PARAMETER Experiment Name: At_Drought_Soil_Dry_P Parameter: Organism Value: A. thaliana
  misc_feature: MA Experiment 20001555 PARAMETER Experiment Name: At_Drought_Soil_Dry_P Parameter: Plant Line Value: WS
  misc_feature: MA Experiment 20001555 PARAMETER Experiment Name: At_Drought_Soil_Dry_P Parameter: Post Timepoint (hr) Value: None
  misc_feature: MA Experiment 20001555 PARAMETER Experiment Name: At_Drought_Soil_Dry_P Parameter: Post-Treatment Value: None
  misc_feature: MA Experiment 20001555 PARAMETER Experiment Name: At_Drought_Soil_Dry_P Parameter: Timepoint (day) Value: 10
  misc_feature: MA Experiment 20001555 PARAMETER Experiment Name: At_Drought_Soil_Dry_P Parameter: Treatment Value: Drought vs. No Drought
  misc_feature: MA Experiment ID: 20001559 Result: Up-regulated in Transcription
  misc_feature: MA Experiment 20001559 PARAMETER Experiment Name: At_Drought_Soil_Dry_P Parameter: Age (day) Value: 28
  misc_feature: MA Experiment 20001559 PARAMETER Experiment Name: At_Drought_Soil_Dry_P Parameter: Organism Value: A. thaliana
  misc_feature: MA Experiment 20001559 PARAMETER Experiment Name: At_Drought_Soil_Dry_P Parameter: Plant Line Value: WS
  misc_feature: MA Experiment 20001559 PARAMETER Experiment Name: At_Drought_Soil_Dry_P Parameter: Post Timepoint (hr) Value: 29
  misc_feature: MA Experiment 20001559 PARAMETER Experiment Name: At_Drought_Soil_Dry_P Parameter: Post-Treatment Value: Re-Water vs. No Drought
  misc_feature: MA Experiment 20001559 PARAMETER Experiment Name: At_Drought_Soil_Dry_P Parameter: Timepoint (day) Value: 14
  misc_feature: MA Experiment 20001559 PARAMETER Experiment Name: At_Drought_Soil_Dry_P Parameter: Treatment Value: Drought vs. No Drought
  misc_feature: MA Experiment ID: 20001904 Result: Up-regulated in Transcription
  misc_feature: MA Experiment 20001904 PARAMETER Experiment Name: At_Drought_Reproduction_P Parameter: Age (day) Value: 37
  misc_feature: MA Experiment 20001904 PARAMETER Experiment Name: At_Drought_Reproduction_P Parameter: Organism Value: A. thaliana
  misc_feature: MA Experiment 20001904 PARAMETER Experiment Name: At_Drought_Reproduction_P Parameter: Plant Line Value: WS
  misc_feature: MA Experiment 20001904 PARAMETER Experiment Name: At_Drought_Reproduction_P Parameter: Timepoint (day) Value: 7
  misc_feature: MA Experiment 20001904 PARAMETER Experiment Name: At_Drought_Reproduction_P Parameter: Tissue Value: Rosettes
  misc_feature: MA Experiment 20001904 PARAMETER Experiment Name: At_Drought_Reproduction_P Parameter: Treatment Value: Drought vs. No Drought
  misc_feature: MA Experiment ID: 20001905 Result: Up-regulated in Transcription
  misc_feature: MA Experiment 20001905 PARAMETER Experiment Name: At_Drought_Reproduction_P Parameter: Age (day) Value: 40
  misc_feature: MA Experiment 20001905 PARAMETER Experiment Name: At_Drought_Reproduction_P Parameter: Organism Value: A. thaliana
  misc_feature: MA Experiment 20001905 PARAMETER Experiment Name: At_Drought_Reproduction_P Parameter: Plant Line Value: WS
  misc_feature: MA Experiment 20001905 PARAMETER Experiment Name: At_Drought_Reproduction_P Parameter: Timepoint (day) Value: 10
  misc_feature: MA Experiment 20001905 PARAMETER Experiment Name: At_Drought_Reproduction_P Parameter: Tissue Value: Rosettes
  misc_feature: MA Experiment 20001905 PARAMETER Experiment Name: At_Drought_Reproduction_P Parameter: Treatment Value: Drought vs. No Drought
  misc_feature: MA Experiment ID: 20001911 Result: Up-regulated in Transcription
  misc_feature: MA Experiment 20001911 PARAMETER Experiment Name: At_Drought_Reproduction_P Parameter: Age (day) Value: 40
  misc_feature: MA Experiment 20001911 PARAMETER Experiment Name: At_Drought_Reproduction_P Parameter: Organism Value: A. thaliana
  misc_feature: MA Experiment 20001911 PARAMETER Experiment Name: At_Drought_Reproduction_P Parameter: Plant Line Value: WS
  misc_feature: MA Experiment 20001911 PARAMETER Experiment Name: At_Drought_Reproduction_P Parameter: Timepoint (day) Value: 10
  misc_feature: MA Experiment 20001911 PARAMETER Experiment Name: At_Drought_Reproduction_P Parameter: Tissue Value: Flowers
  misc_feature: MA Experiment 20001911 PARAMETER Experiment Name: At_Drought_Reproduction_P Parameter: Treatment Value: Drought vs. No Drought

SEQ ID NO: 32378 - protein, 294 aa, Arabidopsis thaliana; identical to SEQ ID NO: 28788
  peptide (1)..(294): Ceres Seq. ID no. 12334301
  misc_feature (63)..(232): Pfam Name: Metallo-beta-lactamase superfamily Pfam Description: Metallo-beta-lactamase superfamily
  misc_feature (43)..(291): Homolog of NCBI NO: 27676450 NR Description: similar to HSCO protein [Mus musculus] [Rattus
  misc_feature (43)..(291): Homolog of NCBI NO: 12963539 NR Description: HSCO protein [Mus musculus]
  misc_feature (35)..(287): Homolog of NCBI NO: 14198377 NR Description: Similar to RIKEN cDNA 0610025L15 gene [Homo
  misc_feature (36)..(288): Homolog of NCBI NO: 27371293 NR Description: Similar to RIKEN cDNA 0610025L15 gene [Xenopus
  misc_feature (32)..(290): Homolog of NCBI NO: 34910930 NR Description: putative glyoxalase II [Oryza sativa (japonica
  misc_feature (39)..(294): Homolog of NCBI NO: 1644427 NR Description: glyoxalase II [Arabidopsis thaliana]
  misc_feature (39)..(294): Homolog of NCBI NO: 18404530 NR Description: glyoxalase II, putative (hydroxyacylglutathione
  misc_feature (238)..(294): Homolog of NCBI NO: 8671869 NR Description: Contains similarity to an unknown glyoxalase II Arabidopsis thaliana gb|U74610 and contains a PF|00753 domain. ESTs gb|AI999524, gb|AI100252, gb|AI099807,
  misc_feature (3)..(239): Homolog of NCBI NO: 8671869 NR Description: Contains similarity to an unknown glyoxalase II Arabidopsis thaliana gb|U74610 and contains a PF|00753 domain. ESTs gb|AI999524, gb|AI100252, gb|AI099807,
  misc_feature (3)..(294): Homolog of NCBI NO: 25405648 NR Description: probable glyoxalase II, 78941-80643

SEQ ID NO: 32379 - protein, 292 aa, Arabidopsis thaliana; identical to SEQ ID NO: 28789
  peptide (1)..(292): Ceres Seq. ID no. 12334302
  misc_feature (61)..(230): Pfam Name: Metallo-beta-lactamase superfamily Pfam Description: Metallo-beta-lactamase superfamily
  misc_feature (41)..(289): Homolog of NCBI NO: 27676450 NR Description: similar to HSCO protein [Mus musculus] [Rattus
  misc_feature (41)..(289): Homolog of NCBI NO: 12963539 NR Description: HSCO protein [Mus musculus]
  misc_feature (33)..(285): Homolog of NCBI NO: 14198377 NR Description: Similar to RIKEN cDNA 0610025L15 gene [Homo
  misc_feature (34)..(286): Homolog of NCBI NO: 27371293 NR Description: Similar to RIKEN cDNA 0610025L15 gene [Xenopus
  misc_feature (30)..(288): Homolog of NCBI NO: 34910930 NR Description: putative glyoxalase II [Oryza sativa (japonica
  misc_feature (37)..(292): Homolog of NCBI NO: 1644427 NR Description: glyoxalase II [Arabidopsis thaliana]
  misc_feature (37)..(292): Homolog of NCBI NO: 18404530 NR Description: glyoxalase II, putative (hydroxyacylglutathione
  misc_feature (236)..(292): Homolog of NCBI NO: 8671869 NR Description: Contains similarity to an unknown glyoxalase II Arabidopsis thaliana gb|U74610 and contains a PF|00753 domain. ESTs gb|AI999524, gb|AI100252, gb|AI099807,
  misc_feature (1)..(237): Homolog of NCBI NO: 8671869 NR Description: Contains similarity to an unknown glyoxalase II Arabidopsis thaliana gb|U74610 and contains a PF|00753 domain. ESTs gb|AI999524, gb|AI100252, gb|AI099807,
  misc_feature (1)..(292): Homolog of NCBI NO: 25405648 NR Description: probable glyoxalase II, 78941-80643

SEQ ID NO: 32380 - protein, 256 aa, Arabidopsis thaliana; identical to SEQ ID NO: 28790
  peptide (1)..(256): Ceres Seq. ID no. 12334303
  misc_feature (25)..(194): Pfam Name: Metallo-beta-lactamase superfamily Pfam Description: Metallo-beta-lactamase superfamily
  misc_feature (5)..(253): Homolog of NCBI NO: 27676450 NR Description: similar to HSCO protein [Mus musculus] [Rattus
  misc_feature (5)..(253): Homolog of NCBI NO: 12963539 NR Description: HSCO protein [Mus musculus]
  misc_feature (1)..(249): Homolog of NCBI NO: 14198377 NR Description: Similar to RIKEN cDNA 0610025L15 gene [Homo
  misc_feature (1)..(250): Homolog of NCBI NO: 27371293 NR Description: Similar to RIKEN cDNA 0610025L15 gene [Xenopus
  misc_feature (1)..(252): Homolog of NCBI NO: 34910930 NR Description: putative glyoxalase II [Oryza sativa (japonica
  misc_feature (1)..(256): Homolog of NCBI NO: 1644427 NR Description: glyoxalase II [Arabidopsis thaliana]
  misc_feature (1)..(256): Homolog of NCBI NO: 18404530 NR Description: glyoxalase II, putative (hydroxyacylglutathione
  misc_feature (200)..(256): Homolog of NCBI NO: 8671869 NR Description: Contains similarity to an unknown glyoxalase II Arabidopsis thaliana gb|U74610 and contains a PF|00753 domain. ESTs gb|AI999524, gb|AI100252, gb|AI099807,
  misc_feature (1)..(201): Homolog of NCBI NO: 8671869 NR Description: Contains similarity to an unknown glyoxalase II Arabidopsis thaliana gb|U74610 and contains a PF|00753 domain. ESTs gb|AI999524, gb|AI100252, gb|AI099807,
  misc_feature (1)..(256): Homolog of NCBI NO: 25405648 NR Description: probable glyoxalase II, 78941-80643

SEQ ID NO: 32381 - DNA, 1155 bp, Arabidopsis thaliana; identical to SEQ ID NO: 28791
  misc_feature (1)..(1155): Ceres Seq. ID no. 12371691
  misc_feature: MA Experiment ID: 108434 Result: Down-regulated in Transcription
  misc_feature: MA Experiment 108434 PARAMETER Experiment Name: At_Root_Tips_cDNA_P Parameter: Tissue Value: Root Tips
  misc_feature: MA Experiment ID: 108573 Result: Up-regulated in Transcription
  misc_feature: MA Experiment 108573 PARAMETER Experiment Name: At_Drought_cDNA_P Parameter: Timepoint (hr) Value: 6
  misc_feature: MA Experiment 108573 PARAMETER Experiment Name: At_Drought_cDNA_P Parameter: Tissue Value: Aerial
  misc_feature: MA Experiment 108573 PARAMETER Experiment Name: At_Drought_cDNA_P Parameter: Treatment Value: Drought vs. No Drought
  misc_feature: MA Experiment ID: 108574 Result: Up-regulated in Transcription
  misc_feature: MA Experiment 108574 PARAMETER Experiment Name: At_Wounding__cDNA_P Parameter: Timepoint (hr) Value: 1
  misc_feature: MA Experiment 108574 PARAMETER Experiment Name: At_Wounding__cDNA_P Parameter: Tissue Value: Aerial
  misc_feature: MA Experiment 108574 PARAMETER Experiment Name: At_Wounding__cDNA_P Parameter: Treatment Value: Wounding vs. No Wounding
  misc_feature: MA Experiment ID: 108579 Result: Up-regulated in Transcription
  misc_feature: MA Experiment 108579 PARAMETER Experiment Name: At_4deg_Cold_cDNA_P Parameter: Temperature (deg C) Value: 4 vs. 22
  misc_feature: MA Experiment 108579 PARAMETER Experiment Name: At_4deg_Cold_cDNA_P Parameter: Timepoint (hr) Value: 6
  misc_feature: MA Experiment 108579 PARAMETER Experiment Name: At_4deg_Cold_cDNA_P Parameter: Tissue Value: Aerial
  misc_feature: MA Experiment ID: 108594 Result: Down-regulated in Transcription
  misc_feature: MA Experiment 108594 PARAMETER Experiment Name: At_Ler-rhl_Root_cDNA_P Parameter: Plant Line Value: null
  misc_feature: MA Experiment ID: 108605 Result: Up-regulated in Transcription
  misc_feature: MA Experiment 108605 PARAMETER Experiment Name: At_100uM_ABA_cDNA_P Parameter: Timepoint (hr) Value: 6
  misc_feature: MA Experiment 108605 PARAMETER Experiment Name: At_100uM_ABA_cDNA_P Parameter: Tissue Value: Aerial
  misc_feature: MA Experiment 108605 PARAMETER Experiment Name: At_100uM_ABA_cDNA_P Parameter: Treatment Value: 100uM ABA vs. No Treatment
  misc_feature: MA Experiment ID: 108607 Result: Up-regulated in Transcription
  misc_feature: MA Experiment 108607 PARAMETER Experiment Name: At_100uM_ABA_cDNA_P Parameter: Timepoint (hr) Value: 4
  misc_feature: MA Experiment 108607 PARAMETER Experiment Name: At_100uM_ABA_cDNA_P Parameter: Tissue Value: Aerial
  misc_feature: MA Experiment 108607 PARAMETER Experiment Name: At_100uM_ABA_cDNA_P Parameter: Treatment Value: 100uM ABA vs. No Treatment
  misc_feature: MA Experiment ID: 20000069 Result: Up-regulated in Transcription
  misc_feature: MA Experiment 20000069 PARAMETER Experiment Name: At_100uM_ABA_Mutants_cDNA_P Parameter: Plant Line Value: CS23
  misc_feature: MA Experiment 20000069 PARAMETER Experiment Name: At_100uM_ABA_Mutants_cDNA_P Parameter: Timepoint (hr) Value: 6
  misc_feature: MA Experiment 20000069 PARAMETER Experiment Name: At_100uM_ABA_Mutants_cDNA_P Parameter: Tissue Value: Aerial
  misc_feature: MA Experiment 20000069 PARAMETER Experiment Name: At_100uM_ABA_Mutants_cDNA_P Parameter: Treatment Value: 100uM ABA vs. No Treatment
  misc_feature: MA Experiment ID: 20000070 Result: Up-regulated in Transcription
  misc_feature: MA Experiment 20000070 PARAMETER Experiment Name: At_100uM_ABA_Mutants_cDNA_P Parameter: Plant Line Value: CS24
  misc_feature: MA Experiment 20000070 PARAMETER Experiment Name: At_100uM_ABA_Mutants_cDNA_P Parameter: Timepoint (hr) Value: 6
  misc_feature: MA Experiment 20000070 PARAMETER Experiment Name: At_100uM_ABA_Mutants_cDNA_P Parameter: Tissue Value: Aerial
  misc_feature: MA Experiment 20000070 PARAMETER Experiment Name: At_100uM_ABA_Mutants_cDNA_P Parameter: Treatment Value: 100uM ABA vs. No Treatment
  misc_feature: MA Experiment ID: 20000071 Result: Up-regulated in Transcription
  misc_feature: MA Experiment 20000071 PARAMETER Experiment Name: At_100uM_ABA_Mutants_cDNA_P Parameter: Plant Line Value: CS8104
  misc_feature: MA Experiment 20000071 PARAMETER Experiment Name: At_100uM_ABA_Mutants_cDNA_P Parameter: Timepoint (hr) Value: 6
  misc_feature: MA Experiment 20000071 PARAMETER Experiment Name: At_100uM_ABA_Mutants_cDNA_P Parameter: Tissue Value: Aerial
  misc_feature: MA Experiment 20000071 PARAMETER Experiment Name: At_100uM_ABA_Mutants_cDNA_P Parameter: Treatment Value: 100uM ABA vs. No Treatment
  misc_feature: MA Experiment ID: 20000072 Result: Up-regulated in Transcription
  misc_feature: MA Experiment 20000072 PARAMETER Experiment Name: At_100uM_ABA_Mutants_cDNA_P Parameter: Plant Line Value: CS8105
  misc_feature: MA Experiment 20000072 PARAMETER Experiment Name: At_100uM_ABA_Mutants_cDNA_P Parameter: Timepoint (hr) Value: 6
  misc_feature: MA Experiment 20000072 PARAMETER Experiment Name: At_100uM_ABA_Mutants_cDNA_P Parameter: Tissue Value: Aerial
  misc_feature: MA Experiment 20000072 PARAMETER Experiment Name: At_100uM_ABA_Mutants_cDNA_P Parameter: Treatment Value: 100uM ABA vs. No Treatment
  misc_feature: MA Experiment ID: 20000086 Result: Up-regulated in Transcription
  misc_feature: MA Experiment 20000086 PARAMETER Experiment Name: At_100uM_ABA_Mutants_cDNA_P Parameter: Plant Line Value: CS22
  misc_feature: MA Experiment 20000086 PARAMETER Experiment Name: At_100uM_ABA_Mutants_cDNA_P Parameter: Timepoint (hr) Value: 6
  misc_feature: MA Experiment 20000086 PARAMETER Experiment Name: At_100uM_ABA_Mutants_cDNA_P Parameter: Tissue Value: Aerial
  misc_feature: MA Experiment 20000086 PARAMETER Experiment Name: At_100uM_ABA_Mutants_cDNA_P Parameter: Treatment Value: 100uM ABA vs. No Treatment
  misc_feature: MA Experiment ID: 20000087 Result: Up-regulated in Transcription
  misc_feature: MA Experiment 20000087 PARAMETER Experiment Name: At_100uM_ABA_Mutants_cDNA_P Parameter: Plant Line Value: WS
  misc_feature: MA Experiment 20000087 PARAMETER Experiment Name: At_100uM_ABA_Mutants_cDNA_P Parameter: Timepoint (hr) Value: 6
  misc_feature: MA Experiment 20000087 PARAMETER Experiment Name: At_100uM_ABA_Mutants_cDNA_P Parameter: Tissue Value: Aerial
  misc_feature: MA Experiment 20000087 PARAMETER Experiment Name: At_100uM_ABA_Mutants_cDNA_P Parameter: Treatment Value: 100uM ABA vs. No Treatment
  misc_feature: MA Experiment ID: 20000088 Result: Up-regulated in Transcription
  misc_feature: MA Experiment 20000088 PARAMETER Experiment Name: At_100uM_ABA_Mutants_cDNA_P Parameter: Plant Line Value: Landsberg
  misc_feature: MA Experiment 20000088 PARAMETER Experiment Name: At_100uM_ABA_Mutants_cDNA_P Parameter: Timepoint (hr) Value: 6
  misc_feature: MA Experiment 20000088 PARAMETER Experiment Name: At_100uM_ABA_Mutants_cDNA_P Parameter: Tissue Value: Aerial
  misc_feature: MA Experiment 20000088 PARAMETER Experiment Name: At_100uM_ABA_Mutants_cDNA_P Parameter: Treatment Value: 100uM ABA vs. No Treatment
  misc_feature: MA Experiment ID: 20000111 Result: Down-regulated in Transcription
  misc_feature: MA Experiment 20000111 PARAMETER Experiment Name: At_42deg_Heat_cDNA_P Parameter: Temperature (deg C) Value: 42 vs. 22
  misc_feature: MA Experiment 20000111 PARAMETER Experiment Name: At_42deg_Heat_cDNA_P Parameter: Timepoint (hr) Value: 6
  misc_feature: MA Experiment 20000111 PARAMETER Experiment Name: At_42deg_Heat_cDNA_P Parameter: Tissue Value: Aerial
  misc_feature: MA Experiment ID: 20000113 Result: Down-regulated in Transcription
  misc_feature: MA Experiment 20000113 PARAMETER Experiment Name: At_42deg_Heat_cDNA_P Parameter: Temperature (deg C) Value: 42 vs. 22
  misc_feature: MA Experiment 20000113 PARAMETER Experiment Name: At_42deg_Heat_cDNA_P Parameter: Timepoint (hr) Value: 8
  misc_feature: MA Experiment 20000113 PARAMETER Experiment Name: At_42deg_Heat_cDNA_P Parameter: Tissue Value: Aerial
  misc_feature: MA Experiment ID: 20000117 Result: Up-regulated in Transcription
  misc_feature: MA Experiment 20000117 PARAMETER Experiment Name: At_100uM_ABA_Mutants_cDNA_P Parameter: Plant Line Value: Columbia
  misc_feature: MA Experiment 20000117 PARAMETER Experiment Name: At_100uM_ABA_Mutants_cDNA_P Parameter: Timepoint (hr) Value: 6
  misc_feature: MA Experiment 20000117 PARAMETER Experiment Name: At_100uM_ABA_Mutants_cDNA_P Parameter: Tissue Value: Aerial
  misc_feature: MA Experiment 20000117 PARAMETER Experiment Name: At_100uM_ABA_Mutants_cDNA_P Parameter: Treatment Value: 100uM ABA vs. No Treatment
  misc_feature: MA Experiment ID: 20000169 Result: Up-regulated in Transcription
  misc_feature: MA Experiment 20000169 PARAMETER Experiment Name: At_100uM_ABA_P Parameter: Age (day) Value: 14
  misc_feature: MA Experiment 20000169 PARAMETER Experiment Name: At_100uM_ABA_P Parameter: Organism Value: A. thaliana
  misc_feature: MA Experiment 20000169 PARAMETER Experiment Name: At_100uM_ABA_P Parameter: Plant Line Value: WS
  misc_feature: MA Experiment 20000169 PARAMETER Experiment Name: At_100uM_ABA_P Parameter: Timepoint (hr) Value: 6
  misc_feature: MA Experiment 20000169 PARAMETER Experiment Name: At_100uM_ABA_P Parameter: Tissue Value: Aerial
  misc_feature: MA Experiment 20000169 PARAMETER Experiment Name: At_100uM_ABA_P Parameter: Treatment Value: 100uM ABA vs. No Treatment
  misc_feature: MA Experiment ID: 20000173 Result: Down-regulated in Transcription
  misc_feature: MA Experiment 20000173 PARAMETER Experiment Name: At_42deg_Heat_P Parameter: Age (day) Value: 14
  misc_feature: MA Experiment 20000173 PARAMETER Experiment Name: At_42deg_Heat_P Parameter: Organism Value: A. thaliana
  misc_feature: MA Experiment 20000173 PARAMETER Experiment Name: At_42deg_Heat_P Parameter: Plant Line Value: WS
  misc_feature: MA Experiment 20000173 PARAMETER Experiment Name: At_42deg_Heat_P Parameter: Temperature (deg C) Value: 42 vs. 22
  misc_feature: MA Experiment 20000173 PARAMETER Experiment Name: At_42deg_Heat_P Parameter: Timepoint (hr) Value: 6
  misc_feature: MA Experiment 20000173 PARAMETER Experiment Name: At_42deg_Heat_P Parameter: Tissue Value: Aerial
  misc_feature: MA Experiment ID: 20000184 Result: Down-regulated in Transcription
  misc_feature: MA Experiment 20000184 PARAMETER Experiment Name: At_Shoots__P Parameter: Age (day) Value: 7
  misc_feature: MA Experiment 20000184 PARAMETER Experiment Name: At_Shoots__P Parameter: Tissue Value: Shoots vs. Whole Plant
  misc_feature: MA Experiment ID: 20000227 Result: Down-regulated in Transcription
  misc_feature: MA Experiment 20000227 PARAMETER Experiment Name: At_Root-Tips-vs-Tops_P Parameter: Tissue Value: Root Tips vs. Root Tops
  misc_feature: MA Experiment ID: 20000234 Result: Down-regulated in Transcription
  misc_feature: MA Experiment 20000234 PARAMETER Experiment Name: At_Siliques_P Parameter: Age (day) Value: 21
  misc_feature: MA Experiment 20000234 PARAMETER Experiment Name: At_Siliques_P Parameter: Organism Value: A. thaliana
  misc_feature: MA Experiment 20000234 PARAMETER Experiment Name: At_Siliques_P Parameter: Plant Line Value: WS
  misc_feature: MA Experiment 20000234 PARAMETER Experiment Name: At_Siliques_P Parameter: Tissue Value: Less Than 5mm Siliques vs. Whole Plant
  misc_feature: MA Experiment ID: 20000265 Result: Down-regulated in Transcription
  misc_feature: MA Experiment 20000265 PARAMETER Experiment Name: At_Open_Flower_P Parameter: Age (day) Value: 21
  misc_feature: MA Experiment 20000265 PARAMETER Experiment Name: At_Open_Flower_P Parameter: Plant Line Value: WS
  misc_feature: MA Experiment 20000265 PARAMETER Experiment Name: At_Open_Flower_P Parameter: Tissue Value: Closed Flower vs. Whole Plant
  misc_feature: MA Experiment ID: 20000437 Result: Up-regulated in Transcription
  misc_feature: MA Experiment 20000437 PARAMETER Experiment Name: At_Drought_P Parameter: Age (day) Value: 8
  misc_feature: MA Experiment 20000437 PARAMETER Experiment Name: At_Drought_P Parameter: Organism Value: A. thaliana
  misc_feature: MA Experiment 20000437 PARAMETER Experiment Name: At_Drought_P Parameter: Plant Line Value: WS
  misc_feature: MA Experiment 20000437 PARAMETER Experiment Name: At_Drought_P Parameter: Timepoint (hr) Value: 24
  misc_feature: MA Experiment 20000437 PARAMETER Experiment Name: At_Drought_P Parameter: Tissue Value: Whole Plant
  misc_feature: MA Experiment 20000437 PARAMETER Experiment Name: At_Drought_P Parameter: Treatment Value: Drought vs. No Drought
  misc_feature: MA Experiment ID: 20000460 Result: Up-regulated in Transcription
  misc_feature: MA Experiment 20000460 PARAMETER Experiment Name: At_10percent_PEG_P Parameter: Age (day) Value: 12
  misc_feature: MA Experiment 20000460 PARAMETER Experiment Name: At_10percent_PEG_P Parameter: Organism Value: A. thaliana
  misc_feature: MA Experiment 20000460 PARAMETER Experiment Name: At_10percent_PEG_P Parameter: Plant Line Value: WS
  misc_feature: MA Experiment 20000460 PARAMETER Experiment Name: At_10percent_PEG_P Parameter: Timepoint (day) Value: 12
  misc_feature: MA Experiment 20000460 PARAMETER Experiment Name: At_10percent_PEG_P Parameter: Tissue Value: Whole Plant
  misc_feature: MA Experiment 20000460 PARAMETER Experiment Name: At_10percent_PEG_P Parameter: Treatment Value: 10percent PEG vs. No Treatment
  misc_feature: MA Experiment ID: 20000495 Result: Down-regulated in Transcription
  misc_feature: MA Experiment 20000495 PARAMETER Experiment Name: At_Guard_Cells_P Parameter: Harvest Date Value: 8/2/2002
  misc_feature: MA Experiment 20000495 PARAMETER Experiment Name: At_Guard_Cells_P Parameter: Organism Value: A. thaliana
  misc_feature: MA Experiment 20000495 PARAMETER Experiment Name: At_Guard_Cells_P Parameter: Tissue Value: Guard Cells vs. Leaves
  misc_feature: MA Experiment ID: 20000496 Result: Down-regulated in Transcription
  misc_feature: MA Experiment 20000496 PARAMETER Experiment Name: At_Guard_Cells_P Parameter: Harvest Date Value: 7/19/2002
  misc_feature: MA Experiment 20000496 PARAMETER Experiment Name: At_Guard_Cells_P Parameter: Organism Value: Canola
  misc_feature: MA Experiment 20000496 PARAMETER Experiment Name: At_Guard_Cells_P Parameter: Tissue Value: Guard Cells vs. Leaves
  misc_feature: MA Experiment ID: 20001911 Result: Up-regulated in Transcription
  misc_feature: MA Experiment 20001911 PARAMETER Experiment Name: At_Drought_Reproduction_P Parameter: Age (day) Value: 40
  misc_feature: MA Experiment 20001911 PARAMETER Experiment Name: At_Drought_Reproduction_P Parameter: Organism Value: A. thaliana
  misc_feature: MA Experiment 20001911 PARAMETER Experiment Name: At_Drought_Reproduction_P Parameter: Plant Line Value: WS
  misc_feature: MA Experiment 20001911 PARAMETER Experiment Name: At_Drought_Reproduction_P Parameter: Timepoint (day) Value: 10
  misc_feature: MA Experiment 20001911 PARAMETER Experiment Name: At_Drought_Reproduction_P Parameter: Tissue Value: Flowers
  misc_feature: MA Experiment 20001911 PARAMETER Experiment Name: At_Drought_Reproduction_P Parameter: Treatment Value: Drought vs. No Drought

SEQ ID NO: 32382 - protein, 354 aa, Arabidopsis thaliana; identical to SEQ ID NO: 28792
  peptide (1)..(354): Ceres Seq. ID no. 12371692
  misc_feature (274)..(334): Pfam Name: WRKY DNA -binding domain Pfam Description: WRKY DNA -binding domain
  misc_feature (149)..(332): Homolog of NCBI NO: 4894963 NR Description: DNA-binding protein WRKY3 [Avena sativa]
  misc_feature (30)..(346): Homolog of NCBI NO: 7488950 NR Description: DNA-binding protein WRKY3 - parsley
  misc_feature (32)..(336): Homolog of NCBI NO: 38568048 NR Description: OSJNBa0065J03.18 [Oryza sativa (japonica
  misc_feature (30)..(340): Homolog of NCBI NO: 4760596 NR Description: DNA-binding protein NtWRKY3 [Nicotiana tabacum]
  misc_feature (30)..(349): Homolog of NCBI NO: 25348152 NR Description: probable WRKY-type DNA binding protein
  misc_feature (30)..(354): Homolog of NCBI NO: 18400580 NR Description: WRKY family transcription factor
  misc_feature (30)..(354): Homolog of NCBI NO: 22329054 NR Description: WRKY family transcription factor
  misc_feature (30)..(354): Homolog of NCBI NO: 21537078 NR Description: putaive DNA-binding protein [Arabidopsis thaliana]
  misc_feature (30)..(354): Homolog of NCBI NO: 16604573 NR Description: putative putaive DNA-binding protein [Arabidopsis
  misc_feature (30)..(354): Homolog of NCBI NO: 30689072 NR Description: WRKY family transcription factor [Arabidopsis

SEQ ID NO: 32383 - protein, 325 aa, Arabidopsis thaliana; identical to SEQ ID NO: 28793
  peptide (1)..(325): Ceres Seq. ID no. 12371693
  misc_feature (245)..(305): Pfam Name: WRKY DNA -binding domain Pfam Description: WRKY DNA -binding domain
  misc_feature (120)..(303): Homolog of NCBI NO: 4894963 NR Description: DNA-binding protein WRKY3 [Avena sativa]
  misc_feature (1)..(317): Homolog of NCBI NO: 7488950 NR Description: DNA-binding protein WRKY3 - parsley
  misc_feature (3)..(307): Homolog of NCBI NO: 38568048 NR Description: OSJNBa0065J03.18 [Oryza sativa (japonica
  misc_feature (1)..(311): Homolog of NCBI NO: 4760596 NR Description: DNA-binding protein NtWRKY3 [Nicotiana tabacum]
  misc_feature (1)..(320): Homolog of NCBI NO: 25348152 NR Description: probable WRKY-type DNA binding protein
  misc_feature (1)..(325): Homolog of NCBI NO: 18400580 NR Description: WRKY family transcription factor
  misc_feature (1)..(325): Homolog of NCBI NO: 22329054 NR Description: WRKY family transcription factor
  misc_feature (1)..(325): Homolog of NCBI NO: 21537078 NR Description: putaive DNA-binding protein [Arabidopsis thaliana]
  misc_feature (1)..(325): Homolog of NCBI NO: 16604573 NR Description: putative putaive DNA-binding protein [Arabidopsis
  misc_feature (1)..(325): Homolog of NCBI NO: 30689072 NR Description: WRKY family transcription factor [Arabidopsis

SEQ ID NO: 32384 - protein, 320 aa, Arabidopsis thaliana; identical to SEQ ID NO: 28794
  peptide (1)..(320): Ceres Seq. ID no. 12371694
  misc_feature (240)..(300): Pfam Name: WRKY DNA -binding domain Pfam Description: WRKY DNA -binding domain
  misc_feature (115)..(298): Homolog of NCBI NO: 4894963 NR Description: DNA-binding protein WRKY3 [Avena sativa]
  misc_feature (1)..(312): Homolog of NCBI NO: 7488950 NR Description: DNA-binding protein WRKY3 - parsley
  misc_feature (1)..(302): Homolog of NCBI NO: 38568048 NR Description: OSJNBa0065J03.18 [Oryza sativa (japonica
  misc_feature (1)..(306): Homolog of NCBI NO: 4760596 NR Description: DNA-binding protein NtWRKY3 [Nicotiana tabacum]
  misc_feature (1)..(315): Homolog of NCBI NO: 25348152 NR Description: probable WRKY-type DNA binding protein
  misc_feature (1)..(320): Homolog of NCBI NO: 18400580 NR Description: WRKY family transcription factor
  misc_feature (1)..(320): Homolog of NCBI NO: 22329054 NR Description: WRKY family transcription factor
  misc_feature (1)..(320): Homolog of NCBI NO: 21537078 NR Description: putaive DNA-binding protein [Arabidopsis thaliana]
  misc_feature (1)..(320): Homolog of NCBI NO: 16604573 NR Description: putative putaive DNA-binding protein [Arabidopsis
  misc_feature (1)..(320): Homolog of NCBI NO: 30689072 NR Description: WRKY family transcription factor [Arabidopsis

SEQ ID NO: 32385 - DNA, 1043 bp, Arabidopsis thaliana; identical to SEQ ID NO: 28795
  misc_feature (1)..(1043): Ceres Seq. ID no. 12333847
  misc_feature: MA Experiment ID: 108434 Result: Down-regulated in Transcription
  misc_feature: MA Experiment 108434 PARAMETER Experiment Name: At_Root_Tips_cDNA_P Parameter: Tissue Value: Root Tips
  misc_feature: MA Experiment ID: 108435 Result: Down-regulated in Transcription
  misc_feature: MA Experiment 108435 PARAMETER Experiment Name: At_stm_Mutants_cDNA_P Parameter: Plant Line Value: wt Landsburg vs stm
  misc_feature: MA Experiment 108435 PARAMETER Experiment Name: At_stm_Mutants_cDNA_P Parameter: Tissue Value: Shoot Apical Meristem Region
  misc_feature: MA Experiment ID: 108461 Result: Down-regulated in Transcription
  misc_feature: MA Experiment 108461 PARAMETER Experiment Name: At_Germinating_Seeds_cDNA_P Parameter: Age (day) Value: 1 vs. 0
  misc_feature: MA Experiment 108461 PARAMETER Experiment Name: At_Germinating_Seeds_cDNA_P Parameter: Tissue Value: Germinating Seeds
  misc_feature: MA Experiment ID: 108462 Result: Down-regulated in Transcription
  misc_feature: MA Experiment 108462 PARAMETER Experiment Name: At_Germinating_Seeds_cDNA_P Parameter: Age (day) Value: 2 vs. 0
  misc_feature: MA Experiment 108462 PARAMETER Experiment Name: At_Germinating_Seeds_cDNA_P Parameter: Tissue Value: Germinating Seeds
  misc_feature: MA Experiment ID: 108473 Result: Up-regulated in Transcription
  misc_feature: MA Experiment 108473 PARAMETER Experiment Name: At_Drought_Flowers_cDNA_P Parameter: Timepoint (hr) Value: 7 d
  misc_feature: MA Experiment 108473 PARAMETER Experiment Name: At_Drought_Flowers_cDNA_P Parameter: Tissue Value: Flower
  misc_feature: MA Experiment 108473 PARAMETER Experiment Name: At_Drought_Flowers_cDNA_P Parameter: Treatment Value: Drought vs. No Drought
  misc_feature: MA Experiment ID: 108488 Result: Down-regulated in Transcription
  misc_feature: MA Experiment ID: 108501 Result: Down-regulated in Transcription
  misc_feature: MA Experiment 108501 PARAMETER Experiment Name: At_ap2_floral_buds_cDNA_P Parameter: Plant Line Value: ap2 (Ler.)
  misc_feature: MA Experiment 108501 PARAMETER Experiment Name: At_ap2_floral_buds_cDNA_P Parameter: Tissue Value: Closed Flower
  misc_feature: MA Experiment ID: 108561 Result: Up-regulated in Transcription
  misc_feature: MA Experiment 108561 PARAMETER Experiment Name: At_100uM_ABA_cDNA_P Parameter: Timepoint (hr) Value: 6
  misc_feature: MA Experiment 108561 PARAMETER Experiment Name: At_100uM_ABA_cDNA_P Parameter: Tissue Value: Aerial
  misc_feature: MA Experiment 108561 PARAMETER Experiment Name: At_100uM_ABA_cDNA_P Parameter: Treatment Value: 100uM ABA vs. No Treatment
  misc_feature: MA Experiment ID: 108572 Result: Up-regulated in Transcription
  misc_feature: MA Experiment 108572 PARAMETER Experiment Name: At_Drought_cDNA_P Parameter: Timepoint (hr) Value: 1
  misc_feature: MA Experiment 108572 PARAMETER Experiment Name: At_Drought_cDNA_P Parameter: Tissue Value: Aerial
  misc_feature: MA Experiment 108572 PARAMETER Experiment Name: At_Drought_cDNA_P Parameter: Treatment Value: Drought vs. No Drought
  misc_feature: MA Experiment ID: 108573 Result: Up-regulated in Transcription
  misc_feature: MA Experiment 108573 PARAMETER Experiment Name: At_Drought_cDNA_P Parameter: Timepoint (hr) Value: 6
  misc_feature: MA Experiment 108573 PARAMETER Experiment Name: At_Drought_cDNA_P Parameter: Tissue Value: Aerial
  misc_feature: MA Experiment 108573 PARAMETER Experiment Name: At_Drought_cDNA_P Parameter: Treatment Value: Drought vs. No Drought
  misc_feature: MA Experiment ID: 108574 Result: Down-regulated in Transcription
  misc_feature: MA Experiment 108574 PARAMETER Experiment Name: At_Wounding__cDNA_P Parameter: Timepoint (hr) Value: 1
  misc_feature: MA Experiment 108574 PARAMETER Experiment Name: At_Wounding__cDNA_P Parameter: Tissue Value: Aerial
  misc_feature: MA Experiment 108574 PARAMETER Experiment Name: At_Wounding__cDNA_P Parameter: Treatment Value: Wounding vs. No Wounding
  misc_feature: MA Experiment ID: 108576 Result: Down-regulated in Transcription
  misc_feature: MA Experiment 108576 PARAMETER Experiment Name: At_42deg_Heat_cDNA_P Parameter: Temperature (deg C) Value: 42 vs. 22
  misc_feature: MA Experiment 108576 PARAMETER Experiment Name: At_42deg_Heat_cDNA_P Parameter: Timepoint (hr) Value: 1
  misc_feature: MA Experiment 108576 PARAMETER Experiment Name: At_42deg_Heat_cDNA_P Parameter: Tissue Value: Aerial
  misc_feature: MA Experiment ID: 108585 Result: Up-regulated in Transcription
  misc_feature: MA Experiment 108585 PARAMETER Experiment Name: At_5mM_NaNP_cDNA_P Parameter: Timepoint (hr) Value: 6
  misc_feature: MA Experiment 108585 PARAMETER Experiment Name: At_5mM_NaNP_cDNA_P Parameter: Tissue Value: Aerial
  misc_feature: MA Experiment 108585 PARAMETER Experiment Name: At_5mM_NaNP_cDNA_P Parameter: Treatment Value: null
  misc_feature: MA Experiment ID: 108594 Result: Up-regulated in Transcription
  misc_feature: MA Experiment 108594 PARAMETER Experiment Name: At_Ler-rhl_Root_cDNA_P Parameter: Plant Line Value: null
  misc_feature: MA Experiment ID: 108595 Result: Up-regulated in Transcription
  misc_feature: MA Experiment 108595 PARAMETER Experiment Name: At_Ler-pi_Ovule_cDNA_P Parameter: Plant Line Value: null
  misc_feature: MA Experiment ID: 108609 Result: Up-regulated in Transcription
  misc_feature: MA Experiment 108609 PARAMETER Experiment Name: At_100uM_ABA_cDNA_P Parameter: Timepoint (hr) Value: 24
  misc_feature: MA Experiment 108609 PARAMETER Experiment Name: At_100uM_ABA_cDNA_P Parameter: Tissue Value: Aerial
  misc_feature: MA Experiment 108609 PARAMETER Experiment Name: At_100uM_ABA_cDNA_P Parameter: Treatment Value: 100uM ABA vs. No Treatment
  misc_feature: MA Experiment ID: 20000068 Result: Down-regulated in Transcription
  misc_feature: MA Experiment ID: 20000069 Result: Up-regulated in Transcription
  misc_feature: MA Experiment 20000069 PARAMETER Experiment Name: At_100uM_ABA_Mutants_cDNA_P Parameter: Plant Line Value: CS23
  misc_feature: MA Experiment 20000069 PARAMETER Experiment Name: At_100uM_ABA_Mutants_cDNA_P Parameter: Timepoint (hr) Value: 6
  misc_feature: MA Experiment 20000069 PARAMETER Experiment Name: At_100uM_ABA_Mutants_cDNA_P Parameter: Tissue Value: Aerial
  misc_feature: MA Experiment 20000069 PARAMETER Experiment Name: At_100uM_ABA_Mutants_cDNA_P Parameter: Treatment Value: 100uM ABA vs. No Treatment
  misc_feature: MA Experiment ID: 20000070 Result: Up-regulated in Transcription
  misc_feature: MA Experiment 20000070 PARAMETER Experiment Name: At_100uM_ABA_Mutants_cDNA_P Parameter: Plant Line Value: CS24
  misc_feature: MA Experiment 20000070 PARAMETER Experiment Name: At_100uM_ABA_Mutants_cDNA_P Parameter: Timepoint (hr) Value: 6
  misc_feature: MA Experiment 20000070 PARAMETER Experiment Name: At_100uM_ABA_Mutants_cDNA_P Parameter: Tissue Value: Aerial
  misc_feature: MA Experiment 20000070 PARAMETER Experiment Name: At_100uM_ABA_Mutants_cDNA_P Parameter: Treatment Value: 100uM ABA vs. No Treatment
  misc_feature: MA Experiment ID: 20000071 Result: Up-regulated in Transcription
  misc_feature: MA Experiment 20000071 PARAMETER Experiment Name: At_100uM_ABA_Mutants_cDNA_P Parameter: Plant Line Value: CS8104
  misc_feature: MA Experiment 20000071 PARAMETER Experiment Name: At_100uM_ABA_Mutants_cDNA_P Parameter: Timepoint (hr) Value: 6
  misc_feature: MA Experiment 20000071 PARAMETER Experiment Name: At_100uM_ABA_Mutants_cDNA_P Parameter: Tissue Value: Aerial
  misc_feature: MA Experiment 20000071 PARAMETER Experiment Name: At_100uM_ABA_Mutants_cDNA_P Parameter: Treatment Value: 100uM ABA vs. No Treatment
  misc_feature: MA Experiment ID: 20000072 Result: Up-regulated in Transcription
  misc_feature: MA Experiment 20000072 PARAMETER Experiment Name: At_100uM_ABA_Mutants_cDNA_P Parameter: Plant Line Value: CS8105
  misc_feature: MA Experiment 20000072 PARAMETER Experiment Name: At_100uM_ABA_Mutants_cDNA_P Parameter: Timepoint (hr) Value: 6
  misc_feature: MA Experiment 20000072 PARAMETER Experiment Name: At_100uM_ABA_Mutants_cDNA_P Parameter: Tissue Value: Aerial
  misc_feature: MA Experiment 20000072 PARAMETER Experiment Name: At_100uM_ABA_Mutants_cDNA_P Parameter: Treatment Value: 100uM ABA vs. No Treatment
  misc_feature: MA Experiment ID: 20000087 Result: Up-regulated in Transcription
  misc_feature: MA Experiment 20000087 PARAMETER Experiment Name: At_100uM_ABA_Mutants_cDNA_P Parameter: Plant Line Value: WS
  misc_feature: MA Experiment 20000087 PARAMETER Experiment Name: At_100uM_ABA_Mutants_cDNA_P Parameter: Timepoint (hr) Value: 6
  misc_feature: MA Experiment 20000087 PARAMETER Experiment Name: At_100uM_ABA_Mutants_cDNA_P Parameter: Tissue Value: Aerial
  misc_feature: MA Experiment 20000087 PARAMETER Experiment Name: At_100uM_ABA_Mutants_cDNA_P Parameter: Treatment Value: 100uM ABA vs. No Treatment
  misc_feature: MA Experiment ID: 20000179 Result: Down-regulated in Transcription
  misc_feature: MA Experiment 20000179 PARAMETER Experiment Name: At_Germinating_Seeds_P Parameter: Age (hr) Value: 6 vs. 0
  misc_feature: MA Experiment 20000179 PARAMETER Experiment Name: At_Germinating_Seeds_P Parameter: Tissue Value: Germinating Seeds
  misc_feature: MA Experiment ID: 20000180 Result: Down-regulated in Transcription
  misc_feature: MA Experiment 20000180 PARAMETER Experiment Name: At_Germinating_Seeds_P Parameter: Age (hr) Value: 24 vs. 0
  misc_feature: MA Experiment 20000180 PARAMETER Experiment Name: At_Germinating_Seeds_P Parameter: Tissue Value: Germinating Seeds
  misc_feature: MA Experiment ID: 20000224 Result: Down-regulated in Transcription
  misc_feature: MA Experiment ID: 20000438 Result: Down-regulated in Transcription
  misc_feature: MA Experiment 20000438 PARAMETER Experiment Name: At_Shoots__P Parameter: Age (day) Value: 14
  misc_feature: MA Experiment 20000438 PARAMETER Experiment Name: At_Shoots__P Parameter: Tissue Value: Shoots vs. Whole Plant
  misc_feature: MA Experiment ID: 20000439 Result: Down-regulated in Transcription
  misc_feature: MA Experiment 20000439 PARAMETER Experiment Name: At_Roots__P Parameter: Age (day) Value: 14 vs. 21
  misc_feature: MA Experiment 20000439 PARAMETER Experiment Name: At_Roots__P Parameter: Organism Value: A. thaliana
  misc_feature: MA Experiment 20000439 PARAMETER Experiment Name: At_Roots__P Parameter: Tissue Value: Roots vs. Whole Plant
  misc_feature: MA Experiment ID: 20000495 Result: Down-regulated in Transcription
  misc_feature: MA Experiment 20000495 PARAMETER Experiment Name: At_Guard_Cells_P Parameter: Harvest Date Value: 8/2/2002
  misc_feature: MA Experiment 20000495 PARAMETER Experiment Name: At_Guard_Cells_P Parameter: Organism Value: A. thaliana
  misc_feature: MA Experiment 20000495 PARAMETER Experiment Name: At_Guard_Cells_P Parameter: Tissue Value: Guard Cells vs. Leaves
  misc_feature: MA Experiment ID: 20001904 Result: Up-regulated in Transcription
  misc_feature: MA Experiment 20001904 PARAMETER Experiment Name: At_Drought_Reproduction_P Parameter: Age (day) Value: 37
  misc_feature: MA Experiment 20001904 PARAMETER Experiment Name: At_Drought_Reproduction_P Parameter: Organism Value: A. thaliana
  misc_feature: MA Experiment 20001904 PARAMETER Experiment Name: At_Drought_Reproduction_P Parameter: Plant Line Value: WS
  misc_feature: MA Experiment 20001904 PARAMETER Experiment Name: At_Drought_Reproduction_P Parameter: Timepoint (day) Value: 7
  misc_feature: MA Experiment 20001904 PARAMETER Experiment Name: At_Drought_Reproduction_P Parameter: Tissue Value: Rosettes
  misc_feature: MA Experiment 20001904 PARAMETER Experiment Name: At_Drought_Reproduction_P Parameter: Treatment Value: Drought vs. No Drought

SEQ ID NO: 32386 - protein, 189 aa, Arabidopsis thaliana; identical to SEQ ID NO: 28796
  peptide (1)..(189): Ceres Seq. ID no. 12333848
  misc_feature (93)..(161): Pfam Name: DnaJ domain Pfam Description: DnaJ domain
  misc_feature (78)..(159): Homolog of NCBI NO: 34863272 NR Description: similar to hypothetical protein FLJ40417 [Rattus
  misc_feature (40)..(189): Homolog of NCBI NO: 34894012 NR Description: P0672D08.16 [Oryza sativa (japonica
  misc_feature (31)..(159): Homolog of NCBI NO: 30682610 NR Description: DnaJ protein family [Arabidopsis thaliana]
  misc_feature (31)..(159): Homolog of NCBI NO: 15236355 NR Description: DnaJ-like protein
  misc_feature (31)..(159): Homolog of NCBI NO: 6691127 NR Description: DnaJ-like protein [Arabidopsis thaliana]
  misc_feature (55)..(189): Homolog of NCBI NO: 15231204 NR Description: DnaJ protein, putative
  misc_feature (44)..(189): Homolog of NCBI NO: 7488763 NR Description: DnaJ protein homolog - kidney bean (fragment)
  misc_feature (29)..(189): Homolog of NCBI NO: 15227919 NR Description: putative DnaJ protein
  misc_feature (29)..(189): Homolog of NCBI NO: 15233446 NR Description: DnaJ-like protein; protein id: At4g36040.1
  misc_feature (29)..(189): Homolog of NCBI NO: 9843641 NR Description: J11 protein [Arabidopsis thaliana]

SEQ ID NO: 32387 - protein, 161 aa, Arabidopsis thaliana; identical to SEQ ID NO: 28797
  peptide (1)..(161): Ceres Seq. ID no. 12333849
  misc_feature (65)..(133): Pfam Name: DnaJ domain Pfam Description: DnaJ domain
  misc_feature (50)..(131): Homolog of NCBI NO: 34863272 NR Description: similar to hypothetical protein FLJ40417 [Rattus
  misc_feature (12)..(161): Homolog of NCBI NO: 34894012 NR Description: P0672D08.16 [Oryza sativa (japonica
  misc_feature (3)..(131): Homolog of NCBI NO: 30682610 NR Description: DnaJ protein family [Arabidopsis thaliana]
  misc_feature (3)..(131): Homolog of NCBI NO: 15236355 NR Description: DnaJ-like protein
  misc_feature (3)..(131): Homolog of NCBI NO: 6691127 NR Description: DnaJ-like protein [Arabidopsis thaliana]
  misc_feature (27)..(161): Homolog of NCBI NO: 15231204 NR Description: DnaJ protein, putative
  misc_feature (16)..(161): Homolog of NCBI NO: 7488763 NR Description: DnaJ protein homolog - kidney bean (fragment)
  misc_feature (1)..(161): Homolog of NCBI NO: 15227919 NR Description: putative DnaJ protein
  misc_feature (1)..(161): Homolog of NCBI NO: 15233446 NR Description: DnaJ-like protein; protein id: At4g36040.1
  misc_feature (1)..(161): Homolog of NCBI NO: 9843641 NR Description: J11 protein [Arabidopsis thaliana]

SEQ ID NO: 32388 - protein, 97 aa, Arabidopsis thaliana; identical to SEQ ID NO: 28798
  peptide (1)..(97): Ceres Seq. ID no. 12333850

SEQ ID NO: 32389 - DNA, 1017 bp, Arabidopsis thaliana; identical to SEQ ID NO: 28799
  misc_feature (1)..(1017): Ceres Seq. ID no. 12422208
  misc_feature: MA Experiment ID: 108434 Result: Up-regulated in Transcription
  misc_feature: MA Experiment 108434 PARAMETER Experiment Name: At_Root_Tips_cDNA_P Parameter: Tissue Value: Root Tips
  misc_feature: MA Experiment ID: 108462 Result: Down-regulated in Transcription
  misc_feature: MA Experiment 108462 PARAMETER Experiment Name: At_Germinating_Seeds_cDNA_P Parameter: Age (day) Value: 2 vs. 0
  misc_feature: MA Experiment 108462 PARAMETER Experiment Name: At_Germinating_Seeds_cDNA_P Parameter: Tissue Value: Germinating Seeds
  misc_feature: MA Experiment ID: 108463 Result: Down-regulated in Transcription
  misc_feature: MA Experiment 108463 PARAMETER Experiment Name: At_Germinating_Seeds_cDNA_P Parameter: Age (day) Value: 3 vs. 0
  misc_feature: MA Experiment 108463 PARAMETER Experiment Name: At_Germinating_Seeds_cDNA_P Parameter: Tissue Value: Germinating Seeds
  misc_feature: MA Experiment ID: 108464 Result: Down-regulated in Transcription
  misc_feature: MA Experiment 108464 PARAMETER Experiment Name: At_Germinating_Seeds_cDNA_P Parameter: Age (day) Value: 4 vs. 0
  misc_feature: MA Experiment 108464 PARAMETER Experiment Name: At_Germinating_Seeds_cDNA_P Parameter: Tissue Value: Germinating Seeds
  misc_feature: MA Experiment ID: 20000180 Result: Down-regulated in Transcription
  misc_feature: MA Experiment 20000180 PARAMETER Experiment Name: At_Germinating_Seeds_P Parameter: Age (hr) Value: 24 vs. 0
  misc_feature: MA Experiment 20000180 PARAMETER Experiment Name: At_Germinating_Seeds_P Parameter: Tissue Value: Germinating Seeds
  misc_feature: MA Experiment ID: 20000265 Result: Up-regulated in Transcription
  misc_feature: MA Experiment 20000265 PARAMETER Experiment Name: At_Open_Flower_P Parameter: Age (day) Value: 21
  misc_feature: MA Experiment 20000265 PARAMETER Experiment Name: At_Open_Flower_P Parameter: Plant Line Value: WS
  misc_feature: MA Experiment 20000265 PARAMETER Experiment Name: At_Open_Flower_P Parameter: Tissue Value: Closed Flower vs. Whole Plant
  misc_feature: MA Experiment ID: 20000794 Result: Down-regulated in Transcription
  misc_feature: MA Experiment 20000794 PARAMETER Experiment Name: At_Petals_P Parameter: Age (day) Value: 23-25 days
  misc_feature: MA Experiment 20000794 PARAMETER Experiment Name: At_Petals_P Parameter: Plant Line Value: WS
  misc_feature: MA Experiment 20000794 PARAMETER Experiment Name: At_Petals_P Parameter: Tissue Value: Petals vs. Whole plant
  misc_feature: MA Experiment ID: 20001905 Result: Down-regulated in Transcription
  misc_feature: MA Experiment 20001905 PARAMETER Experiment Name: At_Drought_Reproduction_P Parameter: Age (day) Value: 40
  misc_feature: MA Experiment 20001905 PARAMETER Experiment Name: At_Drought_Reproduction_P Parameter: Organism Value: A. thaliana
  misc_feature: MA Experiment 20001905 PARAMETER Experiment Name: At_Drought_Reproduction_P Parameter: Plant Line Value: WS
  misc_feature: MA Experiment 20001905 PARAMETER Experiment Name: At_Drought_Reproduction_P Parameter: Timepoint (day) Value: 10
  misc_feature: MA Experiment 20001905 PARAMETER Experiment Name: At_Drought_Reproduction_P Parameter: Tissue Value: Rosettes
  misc_feature: MA Experiment 20001905 PARAMETER Experiment Name: At_Drought_Reproduction_P Parameter: Treatment Value: Drought vs. No Drought

SEQ ID NO: 32390 - protein, 163 aa, Arabidopsis thaliana; identical to SEQ ID NO: 28800
  peptide (1)..(163): Ceres Seq. ID no. 12422209
  misc_feature (12)..(84): Pfam Name: RNA recognition motif. (a.k.a. RRM, RBD, or RNP domain) Pfam Description: RNA recognition motif. (a.k.a. RRM, RBD, or RNP
  misc_feature (4)..(147): Homolog of NCBI NO: 15226631 NR Description: small nuclear ribonucleoprotein U1A
  misc_feature (7)..(161): Homolog of NCBI NO: 34897622 NR Description: putative small nuclear ribonucleoprotein U1A
  misc_feature (5)..(128): Homolog of NCBI NO: 2119045 NR Description: small nuclear ribonucleoprotein U1A - potato
  misc_feature (1)..(143): Homolog of NCBI NO: 421960 NR Description: small nuclear ribonucleoprotein U2B'' - potato
  misc_feature (1)..(139): Homolog of NCBI NO: 21593001 NR Description: putative small nuclear ribonucleoprotein U2B
  misc_feature (1)..(139): Homolog of NCBI NO: 15227729 NR Description: small nuclear ribonucleoprotein U2B, putative
  misc_feature (1)..(139): Homolog of NCBI NO: 19347861 NR Description: putative spliceosomal protein (U2B) [Arabidopsis
  misc_feature (1)..(139): Homolog of NCBI NO: 30679897 NR Description: small nuclear ribonucleoprotein U2B (spliceosomal
  misc_feature (1)..(140): Homolog of NCBI NO: 30679892 NR Description: small nuclear ribonucleoprotein U2B (spliceosomal
  misc_feature (1)..(158): Homolog of NCBI NO: 25294325 NR Description: hypothetical protein [imported] - Arabidopsis

SEQ ID NO: 32391 - protein, 92 aa, Arabidopsis thaliana; identical to SEQ ID NO: 28801
  peptide (1)..(92): Ceres Seq. ID no. 12422210
  misc_feature (1)..(76): Homolog of NCBI NO: 15226631 NR Description: small nuclear ribonucleoprotein U1A
  misc_feature (1)..(90): Homolog of NCBI NO: 34897622 NR Description: putative small nuclear ribonucleoprotein U1A
  misc_feature (1)..(57): Homolog of NCBI NO: 2119045 NR Description: small nuclear ribonucleoprotein U1A - potato
  misc_feature (1)..(72): Homolog of NCBI NO: 421960 NR Description: small nuclear ribonucleoprotein U2B'' - potato
  misc_feature (1)..(68): Homolog of NCBI NO: 21593001 NR Description: putative small nuclear ribonucleoprotein U2B
  misc_feature (1)..(68): Homolog of NCBI NO: 15227729 NR Description: small nuclear ribonucleoprotein U2B, putative
  misc_feature (1)..(68): Homolog of NCBI NO: 19347861 NR Description: putative spliceosomal protein (U2B) [Arabidopsis
  misc_feature (1)..(68): Homolog of NCBI NO: 30679897 NR Description: small nuclear ribonucleoprotein U2B (spliceosomal
  misc_feature (1)..(69): Homolog of NCBI NO: 30679892 NR Description: small nuclear ribonucleoprotein U2B (spliceosomal
  misc_feature (1)..(87): Homolog of NCBI NO: 25294325 NR Description: hypothetical protein [imported] - Arabidopsis

SEQ ID NO: 32392 - protein, 83 aa, Arabidopsis thaliana; identical to SEQ ID NO: 28802
  peptide (1)..(83): Ceres Seq. ID no. 12422211
